United States Patent Application Publication US 2018/0126003 A1 - sequence listing, part 166

SEQ ID NO: 291788 - DNA, 818 bp, Artificial Sequence
  derived and/or modified sequence
ccttcaccatgtctgacgaggaagttgaacaggtggaggagcagtacgaagaagaagaggaagcccaggaggaagctgcagaagtccatgaggaagttcatgaaccagaggaagttcaagaagacaccgcagaggaggacgcggaagaggagaaaccgagacccaaactcactgctcctaagatcccagaaggggagaaagtggacttcgatgacatccagaagaagcgtcagaacaaagacctaatggagctccaggccctcatcgacagccactttgaagcccggaagaaggaggaggaggagctggtcgctctcaaagagagaatcgagaagcgccgtgcagagagagcggagcagcagaggattcgtgcagagaaggagagggagcgccagaacagactggcggaggaaaaggccagaagggaggaggaggatgccaagaggagggcagaggacgacctgaagaagaagaaagctctgtcttccatgggagccaactacagcagctacctggccaaggctgaccagaagagaggcaagaagcagacagcccgggaaatgaagaagaagattctggctgagagacgcaagccgctcaacatcgatcaccttggtgaagacaaactgagggacaaggccaaggagctctgggagaccctgcaccagctggagattgacaagttcgagtttggggagaagctgaaacgccagaaatatgacatcaccacgctcaggagccgcattgaccaggcccagaagcacagcaagaaggctgggaccccagccaagggcaaagtcggcgggcgctggaagtag

SEQ ID NO: 291789 - DNA, 1238 bp, Artificial Sequence
  derived and/or modified sequence
acttggtaaggggcctgcacgggcatagccccccccagcaagactccgcacacaccccggccacccagtcactggccaatgggctcctaggaagatcaaatgtcactataacacgagggtgtgagccgggcgccagtgcctgcagccggtgctgtccacagggagctccagcccttctcacactcgacccgcagaaaccacccaccttcaccatgtctgacgaggaagttgaacaggtggaggagcagtacgaagaagaagaggaagcccaggaggaagctgcagaagtccatgaggaagcacaccctggagaagagagtgtccgagaagacaccgcagaggaggacgcggaagaggagaaaccgagacccaaactcactgctcctaagatcccagaaggggagaaagtggacttcgatgacatccagaagaagcgtcagaacaaagacctaatggagctccaggccctcatcgacagccactttgaagcccggaagaaggaggaggaggagctggtcgctctcaaagagagaatcgagaagcgccgtgcagagagagcggagcagcagaggattcgtgcagagaaggagagggagcgccagaacagactggcggaggaaaaggccagaagggaggaggaggatgccaagaggagggcagaggacgacctgaagaagaagaaagctctgtcttccatgggagccaactacagcagctacctggccaaggctgaccagaagagaggcaagaagcagacagcccgggaaatgaagaagaagattctggctgagagacgcaagccgctcaacatcgatcaccttggtgaagacaaactgagggacaaggccaaggagctctgggagaccctgcaccagctggagattgacaagttcgagtttggggagaagctgaaacgccagaaatatgacatcaccacgctcaggagccgcattgaccaggcccagaagcacagcaagaaggctgggaccccagccaagggcaaagtcggcgggcgctggaagtagagaggccagaaaggcccctcgaggcagagaccctccgccctcttgcacaccagggccgctcgtgggactccacatcctccagcccccacaatcctgtcaggggctccctgacagtcctgggggtggagaggccatcccggggcgtcccccgcgtctgtgtccttgctgccttcatcccctggggcctgtgaataaagctgcagaacccccttc

SEQ ID NO: 291790 - DNA, 644 bp, Artificial Sequence
  derived and/or modified sequence
acttggtaaggggcctgcacgggcatagccccccccagcaagactccgcacacaccccggccacccagtcactggccaatgggctcctaggaagatcaaatgtcactataacacgagggtgtgagccgggcgccagtgcctgcagccggtgctgtccacagggagctccagcccttctcacactcgacccgcagaaaccacccaccttcaccatgtctgacgaggaagttgaacaggtggaggagcagtacgaagaagaagaggaagcccaggaggaagctgcagaagtccatgaggaagagaggagggcagaggacgacctgaagaagaagaaagctctgtcttccatgggagccaactacagcagctacctggccaaggctgaccagaagagaggcaagaagcagacagcccgggaaatgaagaagaagattctggctgagagacgcaagccgctcaacatcgatcaccttggtgaagacaaactgagggacaaggccaaggagctctgggagcccccacaatcctgtcaggggctccctgacagtcctgggggtggagaggccatcccggggcgtcccccgcgtctgtgtccttgctgccttcatcccctggggcctgtgaataaagctgcagaaccccct

SEQ ID NO: 291791 - protein, 606 aa, Artificial Sequence
  derived and/or modified sequence
MAVTFEDVTIIFTWEEWKFLDSSQKRLYREVMWENYTNVMSVENWNESYKSQEEKFRYLEYENFSYWQGWWNAGAQMYENQNYGETVQGTDSKDLTQQDRSQCQEWLILSTQVPGYGNYELTFESKSLRNLKYKNFMPWQSLETKTTQDYGREIYMSGSHGFQGGRYRLGISRKNLSMEKEQKLIVQHSYIPVEEALPQYVGVICQEDLLRDSMEEKYCGCNKCKGIYYWNSRCVFHKRNQPGENLCQCSICKACFSQRSDLYRHPRNHIGKKLYGCDEVDGNFHQSSGVHFHQRVHIGEVPYSCNACGKSFSQISSLHNHQRVHTEEKFYKIECDKDLSRNSLLHIHQRLHIGEKPFKCNQCGKSFNRSSVLHVHQRVHTGEKPYKCDECGKGFSQSSNLRIHQLVHTGEKSYKCEDCGKGFTQRSNLQIHQRVHTGEKPYKCDDCGKDFSHSSDLRIHQRVHTGEKPYTCPECGKGFSKSSKLHTHQRVHTGEKPYKCEECGKGFSQRSHLLIHQRVHTGEKPYKCHDCGKGFSHSSNLHIHQRVHTGEKPYQCAKCGKGFSHSSALRIHQRVHAGEKPYKCREYYKGFDHNSHLHNNHRRGNL

SEQ ID NO: 291792 - DNA, 1821 bp, Artificial Sequence
  derived and/or modified sequence
atggccgtgaccttcgaggacgtgaccatcatcttcacctgggaggagtggaagttcctggacagcagccagaagagactgtacagagaggtgatgtgggagaactacaccaacgtgatgagcgtggagaactggaacgagagctacaagagccaggaggagaagttcagatacctggagtacgagaacttcagctactggcagggctggtggaacgccggcgcccagatgtacgagaaccagaactacggcgagaccgtgcagggcaccgacagcaaggacctgacccagcaggacagaagccagtgccaggagtggctgatcctgagcacccaggtgcccggctacggcaactacgagctgaccttcgagagcaagagcctgagaaacctgaagtacaagaacttcatgccctggcagagcctggagaccaagaccacccaggactacggcagagagatctacatgagcggcagccacggcttccagggcggcagatacagactgggcatcagcagaaagaacctgagcatggagaaggagcagaagctgatcgtgcagcacagctacatccccgtggaggaggccctgccccagtacgtgggcgtgatctgccaggaggacctgctgagagacagcatggaggagaagtactgcggctgcaacaagtgcaagggcatctactactggaacagcagatgcgtgttccacaagagaaaccagcccggcgagaacctgtgccagtgcagcatctgcaaggcctgcttcagccagagaagcgacctgtacagacaccccagaaaccacatcggcaagaagctgtacggctgcgacgaggtggacggcaacttccaccagagcagcggcgtgcacttccaccagagagtgcacatcggcgaggtgccctacagctgcaacgcctgcggcaagagcttcagccagatcagcagcctgcacaaccaccagagagtgcacaccgaggagaagttctacaagatcgagtgcgacaaggacctgagcagaaacagcctgctgcacatccaccagagactgcacatcggcgagaagcccttcaagtgcaaccagtgcggcaagagcttcaacagaagcagcgtgctgcacgtgcaccagagagtgcacaccggcgagaagccctacaagtgcgacgagtgcggcaagggcttcagccagagcagcaacctgagaatccaccagctggtgcacaccggcgagaagagctacaagtgcgaggactgcggcaagggcttcacccagagaagcaacctgcagatccaccagagagtgcacaccggcgagaagccctacaagtgcgacgactgcggcaaggacttcagccacagcagcgacctgagaatccaccagagagtgcacaccggcgagaagccctacacctgccccgagtgcggcaagggcttcagcaagagcagcaagctgcacacccaccagagagtgcacaccggcgagaagccctacaagtgcgaggagtgcggcaagggcttcagccagagaagccacctgctgatccaccagagagtgcacaccggcgagaagccctacaagtgccacgactgcggcaagggcttcagccacagcagcaacctgcacatccaccagagagtgcacaccggcgagaagccctaccagtgcgccaagtgcggcaagggcttcagccacagcagcgccctgagaatccaccagagagtgcacgccggcgagaagccctacaagtgcagagagtactacaagggcttcgaccacaacagccacctgcacaacaaccacagaagaggcaacctgtag

SEQ ID NO: 291793 - DNA, 1821 bp, Artificial Sequence
  derived and/or modified sequence
atggcagtgacttttgaggacgtaacaatcatttttacgtgggaggaatggaaattcttggattcttcccagaaacggttgtaccgagaagtgatgtgggagaattacacaaacgtaatgtccgtcgaaaattggaacgagagctataaatcccaggaagagaagtttagatacttagaatacgaaaacttcagctattggcaggggtggtggaacgccggggctcagatgtatgagaaccaaaactacggggagaccgtgcaaggaacagatagcaaagaccttactcagcaagaccgatcacaatgccaggagtggctgatcctttctacacaggtgccaggatacggcaactacgagctgacgtttgagtctaaatcgctgcgcaacttgaagtataagaactttatgccttggcaatccctggaaaccaaaactacccaggattacggcagggagatctacatgtccggctctcacgggtttcagggcggacggtaccggttgggcatctccagaaagaatctctctatggaaaaggagcagaaactgatagtacaacactcctacataccagtggaagaggcccttccccaatatgtaggcgtgatctgtcaagaggatctattgagggacagcatggaggaaaagtactgcggatgtaataaatgtaaaggcatctattactggaatagtcgttgcgtattccataaacgcaatcagcctggtgagaacttgtgccagtgttccatctgcaaggcgtgtttttcacaacgctcggacctttataggcacccacggaaccacatcgggaaaaaactgtacggctgtgatgaagtggatggtaatttccaccagtcaagtggggttcacttccaccagcgtgttcacataggcgaagtgccctactcctgcaatgcatgcggcaaatcattttcacagatttcaagtctccataaccaccagagggtacacacagaagagaagttctataagattgaatgcgataaagatctctcacggaactcccttctccacattcatcagagactccacatcggcgaaaagccattcaagtgcaaccagtgtggcaaaagcttcaaccgtagctccgttctgcatgtccatcagagggtgcacactggagagaagccatataaatgtgatgaatgcggcaaaggcttctctcaatcatccaacttgagaatccatcaactggtacacacaggcgaaaaatcatataaatgtgaagactgtgggaagggcttcacgcagaggagcaatttacagatccaccagcgagtccataccggcgaaaaaccgtacaaatgtgacgattgcggcaaggacttcagccattcatctgacctgcgcatacaccagagagtgcacaccggagaaaagccttacacgtgtccggaatgtgggaagggattcagcaagtcaagcaaacttcatacccaccagcgggtccatacaggggagaagccttataagtgcgaagagtgcgggaaaggtttctcccagcgttcgcatctcctgatacaccagcgagtgcacacaggggaaaaaccctataaatgccatgactgcggtaagggcttctcgcactcctcaaacctgcacattcatcagagggtccacacgggcgagaaaccttatcagtgtgctaagtgcggcaagggattcagccacagcagtgctctgcgcattcaccaaagagtgcacgccggcgaaaagccttacaaatgccgagagtattataaggggttcgaccacaatagtcacctacataacaaccacaggcgcggcaatctttag

SEQ ID NO: 291794 - DNA, 1821 bp, Artificial Sequence
  derived and/or modified sequence
atggccgtgacttttgaggacgtaacaatcatattcacatgggaagaatggaaatttttggatagttcccagaaacggctgtatcgggaggttatgtgggagaactatactaacgttatgtcagtcgagaattggaacgagtcatacaagtcccaggaggaaaaattcaggtacctggagtacgaaaatttttcttactggcagggatggtggaacgccggagctcagatgtatgaaaaccaaaactacggagagacggtgcaaggcacagacagcaaagaccttactcagcaggacagatcccaatgccaggagtggctcatcctgagtacacaggtgcccgggtacggcaactacgaattgacctttgagtctaaatcgctgcggaacctcaaatacaagaacttcatgccttggcaaagcctggagaccaagactacgcaagattatggtcgtgagatctatatgtccggctcacatggctttcaaggtgggaggtacaggctgggaatttctagaaaaaacctgagcatggagaaagaacagaagctgattgtgcagcattcctacattccagtagaagaggccctgccacagtatgtgggagtgatctgtcaggaggaccttctgcgtgacagtatggaggaaaagtattgcggatgcaacaagtgcaaaggaatttactattggaattctagatgtgtgtttcacaagaggaaccagcccggcgagaacctctgtcagtgcagcatttgcaaggcatgtttcagtcaacggagcgacttgtacagacaccctcggaatcacataggcaaaaaattgtatggttgtgatgaagtggacggaaacttccatcagtcaagcggagtccacttccaccagagggtgcacatcggtgaggtgccgtacagctgcaacgcttgtggaaagtccttttctcagatctcatcccttcacaaccatcagcgagtccatactgaggaaaaattctacaaaatcgagtgcgacaaagatctaagccgcaattcacttctgcacattcaccagaggctacacatcggagagaaaccttttaaatgcaatcagtgcggcaagtcgttcaataggagctctgtgttgcacgtacatcagagggttcacacgggcgagaagccatacaaatgcgatgagtgtggtaaaggattctcccaaagctcaaacctgaggatccatcaactggtccacacaggtgaaaagtcatacaagtgcgaagactgcggcaagggcttcacccagcgatctaacctgcaaatccaccagagggtgcacacaggcgaaaaaccgtataagtgtgacgactgcgggaaagacttctctcactcctcagacctgcggatccaccagcgcgtccacaccggggagaagccgtatacctgtcccgagtgtgggaagggatttagcaagtcaagtaaacttcatacacaccagcgcgtgcataccggcgagaagccctataagtgtgaggagtgtggaaagggattttcacagcgttcacacctgctgatccatcagcgagtccatacgggagagaaaccatacaagtgccatgactgcggcaaagggttctcacatagctcaaatttgcatattcaccagagagtgcacacaggtgaaaagccatatcagtgcgctaaatgtggcaagggcttctctcactctagcgccctgagaatccaccaaagggtgcacgctggagagaaaccatacaaatgccgcgagtattacaagggcttcgaccacaactctcacctccataacaaccaccgccgcggcaatttgtag

SEQ ID NO: 291795 - DNA, 1821 bp, Artificial Sequence
  derived and/or modified sequence
atggctgtgacctttgaagatgtgaccatcatcttcacctgggaggagtggaagttcctggacagcagccagaagaggctgtaccgggaggtgatgtgggagaactacaccaacgtgatgtctgtggagaactggaatgaaagctacaagagccaggaggagaagttccgctacctggagtatgagaacttctcctactggcagggctggtggaatgctggggcccagatgtatgagaaccagaactatggagagaccgtgcagggcacagacagcaaggacctgacccagcaggacaggagccagtgccaggagtggctgatcctgagcacccaggtgcccggctacggcaactatgagctgacctttgagagcaagagcctgaggaacctgaagtacaagaacttcatgccctggcagagcctggagaccaagaccacccaggactatggccgggagatctacatgagcggcagccacggcttccagggcggccgctaccgcctgggcatcagcaggaagaacctgtccatggagaaggagcagaagctgattgtgcagcacagctacatccctgtggaggaggccctgccccagtatgtgggcgtcatctgccaggaggacctgctgcgggacagcatggaggagaagtactgcggctgcaacaagtgcaagggcatctactactggaacagccgctgtgtgttccacaagaggaaccagcccggggagaacctgtgccagtgcagcatctgcaaggcctgcttcagccagaggagtgacctgtaccgccaccccaggaaccacatcggcaagaagctgtatggctgtgatgaggtggatggcaacttccaccagagcagcggcgtgcacttccaccagagggtgcacatcggggaggtgccctacagctgcaatgcctgtgggaagagcttcagccagatcagcagcctgcacaaccaccagagggtgcacacagaggagaagttctacaagattgaatgtgacaaggacctgagcaggaacagcctgctgcacatccaccagaggctgcacatcggggagaagcccttcaagtgcaaccagtgtgggaagagcttcaacagaagctctgtgctgcacgtgcaccagagggtgcacactggagagaagccctacaagtgtgatgaatgtgggaagggcttcagccagagcagcaacctgcgcatccaccagctggtgcacactggagagaagagctacaagtgtgaggactgtgggaagggcttcacccagaggagcaacctgcagatccaccagagggtgcacactggagagaagccctacaagtgtgatgactgtgggaaggacttcagccacagcagtgacctgcgcatccaccagagggtgcacactggagagaagccctacacctgcccagaatgtgggaagggcttcagcaagagcagcaagctgcacacccaccagagggtgcacactggagagaagccctacaagtgtgaggagtgtgggaagggcttcagccagaggagccacctgctgatccaccagagggtgcacactggagagaagccctacaagtgccacgactgtgggaagggcttcagccacagcagcaacctgcacatccaccagagggtgcacactggagagaagccctaccagtgtgccaagtgtgggaagggcttcagccacagcagcgccctgcgcatccaccagagggtgcatgctggggagaagccctacaagtgccgggagtactacaagggctttgaccacaacagccacctgcacaacaaccaccggcggggcaacctgtag

SEQ ID NO: 291796 - DNA, 1821 bp, Artificial Sequence
  derived and/or modified sequence
atggccgtgaccttcgaggacgtgaccatcatcttcacctgggaggaatggaaattcctggactcgagtcagaagcgcctctacagggaggtcatgtgggaaaattatacaaacgtgatgtccgtcgagaattggaacgagtcttacaaaagtcaggaggagaaattccgttacctcgaatacgaaaatttttcatattggcagggctggtggaacgccggagcccagatgtatgaaaaccagaattatggggaaacagtccagggcacggatagtaaggacctgacccagcaggatcgtagccaatgccaggagtggctcatcctgagtacccaggttcctgggtacgggaattacgagctcacctttgagtccaagagcctgcgcaatctcaagtacaaaaactttatgccgtggcagtcgctggaaacgaagaccacgcaagactacggccgtgaaatctatatgtccggatcacatggattccaggggggccgctaccgactcggtataagccggaagaacttgtccatggaaaaagagcagaaattaattgtacagcactcttatatccctgtggaagaagccctcccccagtacgtgggcgttatttgtcaggaggatctcttacgagactccatggaagagaaatactgcggatgcaataaatgtaaagggatctactactggaattcccggtgtgtgttccacaaaagaaaccagcctggggagaatctctgtcagtgcagtatctgcaaggcctgttttagccagcgctctgacttgtacaggcatccaaggaatcacatcgggaaaaagctgtatggatgtgatgaagttgacggaaattttcatcagtcttcgggcgtgcactttcatcagagggttcatatcggggaggttccatacagctgtaatgcttgcggtaaaagttttagccaaatctcctctctgcataatcaccagagagtccatacagaagaaaaattctataagatcgaatgtgataaagacttatctaggaactctctcctgcacattcatcaaaggttacatatcggtgaaaaaccatttaaatgcaaccaatgcggaaaaagcttcaataggagctccgtgctacacgttcaccagagagtgcacactggagagaagccatacaagtgtgatgagtgcgggaaaggatttagccagagtagcaacctcaggatccatcagctggtccacacgggagagaagagttataagtgcgaggattgcggcaaaggattcacacagaggtcaaatctgcagattcaccaacgggtccataccggcgagaaaccctataaatgtgatgattgtgggaaagatttttcccattcttctgatcttaggattcaccaacgagtccacaccggcgagaaaccttatacatgtcctgagtgtggcaaaggcttcagcaagagcagtaaacttcacacacatcagcgagtccatactggtgaaaagccctacaaatgcgaggagtgcggcaagggtttttctcagcgaagtcacctgcttatccatcagcgcgtgcacactggagagaagccatataagtgtcacgactgtggaaagggcttctcccacagcagcaacttgcatatccaccagcgagtgcacacgggagaaaagccgtatcaatgtgccaaatgtgggaaggggttttcccacagcagcgctctacgcatccatcagagagtccacgcaggcgagaaaccatacaagtgcagggagtattataaaggctttgatcacaactcacacctccacaacaaccacagaagaggaaacctttag

SEQ ID NO: 291797 - DNA, 1821 bp, Artificial Sequence
  derived and/or modified sequence
atggccgtgaccttcgaggacgtgaccatcatcttcacctgggaggagtggaaattcctcgactccagccagaaaagactgtatcgggaggtgatgtgggaaaattacacaaacgtgatgtctgtggaaaattggaatgagtcatataagagtcaggaggaaaaatttcggtacctcgagtacgagaatttctcttattggcagggctggtggaatgctggcgcccagatgtacgagaatcagaactatggtgagaccgtgcagggtacagatagcaaagacctgacacaacaggatagaagtcaatgccaggagtggctgattttgtccacacaggtgccaggatatgggaattatgagttgacgtttgagagcaaaagcctaaggaatctcaagtataagaattttatgccttggcagagtctcgagacaaagactacacaggactatggtagggaaatttatatgtcaggttcccatggttttcaaggaggacgctaccgactgggaatttctagaaaaaatttaagcatggaaaaagagcagaagctgatcgtgcagcactcatatattccggtagaggaagctcttcctcaatatgtcggggttatatgccaggaggatctgctgagggatagtatggaggaaaagtattgcggatgtaataagtgtaagggcatctactactggaacagcaggtgcgtcttccacaagcgcaatcagcctggggagaacctttgtcagtgttcaatatgtaaagcatgcttctcgcagaggtctgatctctatagacacccacggaatcacatcgggaagaagttgtacggctgcgatgaagtggacggcaattttcaccagtccagtggagttcacttccaccagcgggtccacatcggggaggtgccttactcctgtaacgcatgtggaaagtccttttcccaaatttcttccctccataaccaccagagagtgcacacagaggaaaaattctacaaaattgaatgcgacaaggatctctcccgtaatagcttgctacacatacatcaacggctccacataggtgagaaacctttcaaatgtaatcaatgcggtaaaagtttcaatcgctctagtgttctgcatgtgcatcagagggtgcacactggagaaaagccctataagtgtgatgagtgtggtaaaggcttctcccaatccagcaatcttagaattcaccagctggtccatactggagagaaaagctataaatgtgaggactgcggaaagggattcacgcagcgctccaatttgcaaatccaccaacgggtgcacacaggcgagaagccctacaagtgtgacgactgtgggaaagacttctctcattcttccgacctgagaatccatcagagagtgcacactggggagaaaccctacacatgcccagagtgtggcaaaggcttcagcaagagctccaagctccacacccaccagagagttcataccggggagaaaccttacaaatgcgaggaatgcgggaagggcttttcgcagcggtctcacctcctcattcaccagcgcgtgcataccggggagaagccttacaaatgtcatgattgtggaaagggattttcgcattcgagcaatctgcacatccaccaacgcgtacataccggcgagaaaccctaccagtgcgctaagtgcggaaaaggtttctctcattctagcgcactccgaatacatcagagggtccacgctggcgagaaaccatacaaatgcagggagtattataaaggctttgaccataacagccacctgcacaacaatcatcgacgcgggaacctatag

SEQ ID NO: 291798 - DNA, 1821 bp, Artificial Sequence
  derived and/or modified sequence
atggctgttacttttgaagacgtgactattatctttacttgggaggagtggaaatttctcgattcgtctcagaagcggttgtaccgtgaggtaatgtgggagaactatactaacgtgatgtcagttgaaaactggaatgagtcttataaaagccaggaagagaaatttcgttacttagagtatgaaaacttcagctactggcagggctggtggaacgccggagcacagatgtacgaaaaccagaactatggagagacagtccaggggactgactccaaggatctaacccaacaagacagatcacagtgtcaggaatggctgatcctgtccacccaggtccccggatatggcaattacgagctgaccttcgaatccaagtctttgcgaaacctcaaatacaaaaatttcatgccctggcagagcttggagacaaagacaacacaagactacgggcgagagatatatatgtctggctcccatgggttccaggggggaagatacaggctgggcatttcccggaagaacctgtcaatggaaaaagaacaaaagctaatcgtccaacactcctacatacccgtggaggaggcgttgccccagtatgttggagtgatctgtcaggaggacctcctgcgcgactccatggaagaaaagtattgcggatgcaataagtgcaagggtatctactattggaactcaaggtgcgttttccacaagcgcaatcagcctggcgagaatttgtgtcagtgttctatctgcaaagcatgtttttctcagcggagtgacttgtatcgacacccccgaaaccatattggcaaaaagttgtatggatgtgacgaggtggacggtaacttccaccagagttctggcgtgcatttccatcagcgggtgcacattggagaggtgccatacagttgcaatgcctgcggcaagagcttctctcaaatatccagtctccacaaccaccagagggtgcataccgaagagaagttctataagattgagtgtgataaggatctgagtcgcaatagtctgctccacattcaccagcgcttgcacatcggcgaaaagccttttaaatgtaaccaatgtggcaaatccttcaatagaagttcagtcctacatgtccatcagcgtgtgcacaccggcgaaaaaccatataaatgcgacgagtgtggcaaggggttcagtcagtcttcgaacctgcggattcatcagctcgtccacactggggagaagagttataagtgcgaagactgtggcaagggctttacacagagatcaaacctgcagattcatcagagggtccacacaggggagaagccgtacaaatgtgacgattgtgggaaggatttctcccatagctccgacctgcgcattcatcagcgggtgcacacaggcgagaagccctacacctgcccggagtgtggcaaggggttttctaaatccagtaagctgcatacacatcagcgggtgcacaccggggagaagccttataagtgcgaggagtgcggaaaagggttctcccaacgctctcacttactcatccaccagagagtgcataccggcgagaaaccatacaagtgtcacgactgtggaaagggattctcgcactctagtaatctgcatattcatcagcgagtccacactggagagaagccctatcaatgcgccaaatgcgggaagggcttttcccactctagtgctctccgtatccatcaacgagtgcacgccggagagaaaccctataagtgcagggagtactataagggctttgaccacaacagtcacttgcataataatcacagaaggggaaatttgtag

SEQ ID NO: 291799 - DNA, 1821 bp, Artificial Sequence
  derived and/or modified sequence
atggcagtcacatttgaggacgtgactattattttcacatgggaggagtggaaatttctcgacagcagccaaaagaggctgtatcgggaggtgatgtgggagaactacacaaacgttatgtctgttgagaactggaacgagagttataaaagccaggaggaaaaattccggtacttggagtacgagaatttttcctattggcaaggatggtggaacgccggtgcccagatgtatgaaaaccagaactacggcgagacagtgcaaggcaccgatagtaaggatctcacgcaacaagacaggagccagtgccaggaatggttgattttaagcacccaagttcccggatacggcaactatgaactaacgtttgaatccaaatccctccggaacctgaagtacaaaaacttcatgccttggcaatccctggagaccaagacgacccaggactatgggagggaaatctacatgagtggatcccatggttttcaggggggaaggtacaggcttggaatttccaggaaaaacctgtctatggagaaggagcagaagctcatcgttcagcactcatatatcccggtggaggaagctctgccccaatacgttggcgtcatttgccaagaagacctcttgcgcgactctatggaagagaagtactgcggatgcaacaagtgcaagggcatatattattggaatagcaggtgtgtcttccacaaaaggaaccagccaggcgagaatttatgccagtgttctatttgcaaggcttgcttctcacagcgctccgacttataccgacaccccaggaatcatatcgggaagaagttgtacggctgcgatgaggtcgacggaaattttcatcagagtagtggagtgcacttccatcagcgcgtacacattggagaagtcccatattcctgcaatgcctgcggcaagagctttagtcagatttcaagtctgcacaaccaccagcgggtgcacacggaagaaaagttctataagatagagtgtgacaaggacctgtccagaaattctctcctgcacatccatcaaagactccatataggtgaaaagcctttcaaatgtaaccagtgtggtaagagctttaatcggtccagcgtgctgcatgtgcatcaaagagtgcacaccggagaaaagccctacaagtgcgacgagtgtgggaaagggttctcccaatcttctaatttgcggatccaccagctagtccatacaggcgaaaagagctataaatgcgaagactgtggaaaaggtttcactcagcgcagtaacctgcaaattcaccaaagagtgcatacaggtgagaagccctataagtgtgatgactgtggtaaggacttcagtcacagttcggacctgcggattcaccagagagttcacaccggcgaaaaaccttacacttgcccagagtgtgggaagggtttcagtaaaagctccaagctccatacccaccaacgggtgcataccggtgaaaagccctacaagtgtgaagagtgtggaaaaggcttttcccagcgatcccatctgcttatccaccaaagagtacataccggcgaaaagccgtataagtgccacgactgcggaaaggggttcagtcatagtagcaacctacatatccaccaacgggtacatactggcgagaaaccttaccaatgtgccaaatgtggaaagggtttttcgcattcttccgccctacgcatccaccagcgggttcacgccggagaaaagccatacaaatgccgtgagtactacaaaggcttcgaccacaattctcacctccacaataatcacagacgaggcaacctttag

SEQ ID NO: 291800 - protein, 207 aa, Artificial Sequence
  derived and/or modified sequence
MCRLKRQEFVISRAQTVTSDQEKRLLHQLREITRVMKEGKFIDRFSPEKEAEEAPYMEDWEGYPEETYPIYDLSDCIKRRQETILVDYPDPKELSAEEIAERMGMIEEEESDHLGWESLPTDPRAQEDNSVTSCDPKPETCSCCFHEDEDPAVLAENAGFSADSYPEQEETTKEEWSQDFKDEGLGISTDKAYTGSMLRKRNPQGLE

SEQ ID NO: 291801 - protein, 128 aa, Artificial Sequence
  derived and/or modified sequence
MAYSTVQRVALASGLVLALSLLLPKAFLSRGKRQEPPPTPEGKLGRFPPMMHHHQAPSDGQTPGARFQRSHLAEAFAKAKGSGGGAGGGGSGRGLMGQIIPIYGFGIFLYILYILFKVSRIILIILHQ

SEQ ID NO: 291802 - protein, 329 aa, Artificial Sequence [sequence omitted]

SEQ ID NO: 291803 - DNA, 990 bp, Artificial Sequence
  derived and/or modified sequence
atggcctacagcaccgtgcagagagtggccctggccagcggcctggtgctggccctgagcctgctgctgcccaaggccttcctgagcagaggcaagagacaggagcccccccccacccccgagggcaagctgggcagattcccccccatgatgcaccaccaccaggcccccagcgacggccagacccccggcgccagattccagagaagccacctggccgaggccttcgccaaggccaagggcagcggcggcggcgccggcggcggcggcagcggcagaggcctgatgggccagatcatccccatctacggcttcggcatcttcctgtacatcctgtacatcctgttcaagctgagcaagggcaagaccaccgccgaggacggcaagtgctacaccgccatgcccggcaacacccacagaaagatcaccagcttcgagctggcccagctgcaggagaagctgaaggagaccgaggccgccatggagaagctgatcaacagagtgggccccaacggcgagagcacccagaccgaccacagcgacgtgtacgtgcactgcctgggcgtgttcaccaccaagtggctggactgcctgatcttcctgagcagagcccagaccgtgaccagcgaccaggagaagagactgctgcaccagctgagagagatcaccagagtgatgaaggagggcaagttcatcgacagattcagccccgagaaggaggccgaggaggccccctacatggaggactgggagggctaccccgaggagacctaccccatctacgacctgagcgactgcatcaagagaagacaggagaccatcctggtggactaccccgaccccaaggagctgagcgccgaggagatcgccgagagaatgggcatgatcgaggaggaggagagcgaccacctgggctgggagagcctgcccaccgaccccagagcccaggaggacaacagcgtgaccagctgcgaccccaagcccgtgtag

SEQ ID NO: 291804 - DNA, 990 bp, Artificial Sequence
  derived and/or modified sequence
atggcctatagcaccgtgcaacgagtcgccttggctagtggcctggtgctggccctttcacttttgctgcccaaggctttcctgagtcgaggcaagcgacaggaacctcctccaactccagaggggaaactgggacggtttcctcccatgatgcaccaccaccaagctccatctgacggccagacaccgggtgcgcgttttcagaggtctcatttggccgaagccttcgccaaggccaagggaagtggagggggtgctggaggcggcggatcggggagaggattgatgggtcaaattatcccaatatatggcttcggcatcttcctttatatcttatacatcctcttcaaactgtccaaaggcaaaaccaccgcggaagacgggaagtgttatacagctatgcctgggaatacacacagaaaaatcacctctttcgaacttgcgcagctacaggaaaaactgaaggaaacggaggctgcaatggaaaagctcatcaatcgcgtcgggccaaacggcgagtctacccagacagaccacagtgatgtctacgtgcattgcctaggagttttcaccacgaagtggctcgactgcctgatctttcttagcagggcccagacagttacgtcagaccaggagaagcggctcctgcaccagctacgcgagataactcgcgttatgaaagagggaaaatttatagataggtttagtcccgagaaggaggcagaagaagccccctatatggaagactgggaaggctaccccgaggaaacctatccaatttacgacctctcagattgcattaagagacggcaggaaaccattttggtcgattatccagatcctaaggaactgtccgccgaggaaatagctgagcgaatgggcatgattgaggaggaagaatccgaccacctgggatgggaatcccttcccaccgatccccgggcgcaggaggataatagtgttacgagttgcgatcccaaacccgtatag

SEQ ID NO: 291805 - DNA, 990 bp, Artificial Sequence
  derived and/or modified sequence
atggcctacagcacagtgcagagggtggccctggccagcggcctggtgctggccctgagcctgctgctgcccaaggccttcctgagccggggcaagaggcaggagcccccacccaccccagagggcaagctgggccgcttcccccccatgatgcaccaccaccaggcccccagtgatggccagacccctggggcccgcttccagaggagccacctggccgaggcctttgccaaggccaagggcagcggcggcggggccggcggcggcggcagcggccggggcctgatgggccagatcatccccatctacggcttcggcatcttcctgtacatcctgtacatcctcttcaagctgagcaagggcaagaccacagcagaagatggcaagtgctacacagccatgcctggcaacacccacaggaagatcaccagctttgagctggcccagctgcaggagaagctgaaggagacagaagctgccatggagaagctgatcaacagagtgggccccaatggagagagcacccagacagaccacagtgatgtgtatgtgcactgcctgggcgtcttcaccaccaagtggctggactgcctgatcttcctgagccgggcccagacagtgaccagtgaccaggagaagaggctgctgcaccagctgcgggagatcaccagggtgatgaaggagggcaagttcatcgaccgcttcagccctgagaaggaggccgaggaggccccctacatggaggactgggagggctacccagaggagacctaccccatctatgacctgagtgactgcatcaagaggcggcaggagaccatcctggtggactacccagaccccaaggagctgtctgctgaggagattgctgagaggatgggcatgattgaggaggaggagagtgaccacctgggctgggagagcctgcccacagacccccgggcccaggaggacaacagcgtgaccagctgtgaccccaagcctgtgtag

SEQ ID NO: 291806 - DNA, 990 bp, Artificial Sequence
  derived and/or modified sequence
atggcctacagcaccgtgcagcgggtggccctggccagcggcctggtgctggcattgtctttactgctgcccaaggctttcttgtcaaggggcaaaaggcaggagccgccccctaccccagaaggtaagcttggccgctttccaccaatgatgcatcatcaccaggcccctagtgacggacagacaccaggagctagattccagcgcagccatctcgccgaggcctttgccaaggcaaaagggtccggaggcggtgcagggggcgggggcagtgggcgaggcttaatgggacagatcatcccaatatatggctttggaattttcctctatattctgtatattctgttcaagctgagtaaagggaaaacaaccgcagaagacggtaagtgctatactgccatgcccggcaatactcataggaaaattacaagcttcgagctggcccagctacaagagaaactgaaggagacggaagccgcaatggaaaaattaatcaaccgcgtgggccctaacggcgagagtacacaaaccgatcattctgatgtgtatgtacactgccttggcgtctttactactaaatggcttgattgcctcattttcctctctcgggcccagaccgtgacttctgaccaggagaagcggctgctccaccagctacgcgagataactcgcgttatgaaagaaggtaagtttattgatagatttagccctgaaaaggaagcggaggaggcaccttatatggaagactgggaaggatatcccgaggagacttaccccatttacgacctctccgactgcatcaaacggagacaggaaaccatattggttgattatcccgaccctaaagaattgtccgcagaggagattgcagagcgcatgggaatgattgaagaggaggagagcgaccacctggggtgggaaagcctgcccacagaccctcgggctcaagaggacaactctgttacttcgtgcgacccgaagcccgtttag

SEQ ID NO: 291807 - DNA, 990 bp, Artificial Sequence
  derived and/or modified sequence
atggcttactccactgtacaaagagtggccctggctagtgggctcgtgttagccttaagcctgctgctgcctaaagctttcttgtcccgaggtaaacggcaagaacctccaccaaccccggagggaaagctcggccgatttccccctatgatgcatcatcatcaggccccatcggacgggcagactccgggagcgagattccagcggtcgcacctggctgaagcctttgcgaaagcaaagggatcaggagggggtgccggaggaggaggatctggtagggggctcatggggcagatcatccctatctatggatttggaatttttctttatatcctctacattctctttaagctgagcaaaggtaagacaacagcagaggacggtaagtgctacaccgccatgcccggaaatacccatagaaaaatcactagctttgagctggcccaactgcaagaaaaacttaaggagaccgaagccgcaatggagaagctgattaatagagtgggtcccaacggtgagagtactcagactgatcactcggacgtgtacgtacattgtctgggagtgtttactactaaatggctcgattgcttgatctttttatcaagggcccagaccgtaacctctgaccaagaaaagcgtctcctacatcagctccgcgagataactagagtgatgaaggagggaaagttcatcgaccggttttcgcctgagaaagaggccgaggaagctccttacatggaagactgggagggttaccccgaagagacctatccgatctatgacctcagtgattgcatcaagagacggcaggaaacaattttggtggactatcccgacccaaaggagctctctgcagaagaaatagccgagcgcatggggatgattgaagaggaagagagcgaccacctgggctgggagtccttgcctactgatccacgagcacaggaggataatagcgtgacctcttgtgatccgaaaccagtgtag

SEQ ID NO: 291808 - DNA, 1031 bp, Artificial Sequence
  derived and/or modified sequence
gaccaccgtgagcagtcatggcgtactccacagtgcagagagtcgctctggcttctgggcttgtcctggctctgtcgctgctgctgcccaaggccttcctgtcccgcgggaagcggcaggagccgccgccgacacctgaaggaaaattgggccgatttccacctatgatgcatcatcaccaggcaccctcagatggccagactcctggggctcgtttccagaggtctcaccttgccgaggcatttgcaaaggccaaaggatcaggtggaggtgctggaggaggaggtagtggaagaggtctgatggggcagattattccaatctacggttttgggatttttttatatatactgtacattctatttaagctctcaaaggggaaaacaactgcagaggatgggaaatgctatactgccatgcctggaaacacccacaggaaaattaccagttttgagcttgctcaactgcaagaaaaactgaaggagacagaagcagccatggaaaaattaatcaacagagtgggacctaatggtgagagtacccagacagaccatagtgatgtttacgtccattgcctaggagtatttaccactaaatggttggattgtctgatatttctaagcagagcacagactgtgacttctgaccaagagaaacggttgctacatcagctccgagaaatcaccagggtcatgaaagaaggaaaattcattgacagattttctccagagaaagaagctgaggaggccccttacatggaggactgggaaggttaccctgaagagacttacccaatttatgacctttcagactgtatcaagcgtaggcaagaaacaatcttggtggattaccctgacccaaaagaactttctgctgaagaaatagctgaaagaatgggaatgatagaagaggaagaatcagatcatttgggttgggaaagtctgcccactgaccccagagcccaggaagataattctgttacctcgtgtgatccaaagccagtctgaagtatccattactcaagtcccaag

SEQ ID NO: 291809 - DNA, 387 bp, Artificial Sequence
  derived and/or modified sequence
atggcctacagcaccgtgcagagagtggccctggccagcggcctggtgctggccctgagcctgctgctgcccaaggccttcctgagcagaggcaagagacaggagcccccccccacccccgagggcaagctgggcagattcccccccatgatgcaccaccaccaggcccccagcgacggccagacccccggcgccagattccagagaagccacctggccgaggccttcgccaaggccaagggcagcggcggcggcgccggcggcggcggcagcggcagaggcctgatgggccagatcatccccatctacggcttcggcatcttcctgtacatcctgtacatcctgttcaaggtgagcagaatcatcctgatcatcctgcaccagtag

SEQ ID NO: 291810 - DNA, 387 bp, Artificial Sequence
  derived and/or modified sequence
atggcctacagcaccgtccaaagggttgcgctcgcatccgggctcgtgttagccttatctctgctgctaccgaaagctttcctgtcccgcggtaaaaggcaggagcctcctccgactccagaggggaagctggggcgcttcccacctatgatgcatcatcaccaggcaccatctgatgggcaaacccccggtgcccgattccaaagatctcatctggccgaagcctttgctaaagctaagggatccggaggcggcgccgggggcggcggcagcggtcgcggcttgatggggcaaatcatccctatttatggattcgggatttttctctatatcctttacatcctcttcaaggtgtctaggatcatactgatcatccttcatcagtag

SEQ ID NO: 291811 - DNA, 387 bp, Artificial Sequence
  derived and/or modified sequence
atggcctacagcacagtgcagagggtggccctggccagcggcctggtgctggccctgagcctgctgctgcccaaggccttcctgagccggggcaagaggcaggagcccccacccaccccagagggcaagctgggccgcttcccccccatgatgcaccaccaccaggcccccagtgatggccagacccctggggcccgcttccagaggagccacctggccgaggcctttgccaaggccaagggcagcggcggcggggccggcggcggcggcagcggccggggcctgatgggccagatcatccccatctacggcttcggcatcttcctgtacatcctgtacatcctcttcaaggtgagccgcatcatcctgatcatcctgcaccagtag

SEQ ID NO: 291812 - DNA, 387 bp, Artificial Sequence
  derived and/or modified sequence
atggcctacagcaccgtgcagcgggtggccctggccagcggcctggtcctcgccctttcgctcttattacccaaggcatttctctcaaggggcaagcgacaggaacccccgccaactcccgaggggaaactgggcagattccctcccatgatgcatcaccatcaagccccaagcgatggacagactcctggagcacgattccagcgcagccacctggcagaggcttttgctaaggccaaaggttccgggggaggtgccggaggtgggggttctggaagggggttgatgggacagatcatacctatatacggtttcggcatcttcctgtatattttgtatatcctatttaaggttagtcgcattatcctgatcattctccatcagtag

SEQ ID NO: 291813 - DNA, 387 bp, Artificial Sequence
  derived and/or modified sequence
atggcatactccaccgtccagcgggtggcactggcatccggcctggtactggctctctccctgttactgccgaaagcattcttaagccgtggcaaacgccaggaaccgccacccacaccggagggcaagctcgggagattcccgcctatgatgcatcatcaccaggcaccctctgatggtcagaccccaggtgcgcgatttcaacgcagccatctggccgaggcctttgccaaggccaaggggagcggagggggagctggtggcggagggtctggtagagggttaatggggcaaatcattcctatctatggtttcggcatatttctctatattctgtatattcttttcaaggtcagccgcataattctgattatcctacatcagtag

SEQ ID NO: 291814 - DNA, 1300 bp, Artificial Sequence
  derived and/or modified sequence
ggctggcgtctgcacctgcgaccaccgtgagcagtcatggcgtactccacagtgcagagagtcgctctggcttctgggcttgtcctggctctgtcgctgctgctgcccaaggccttcctgtcccgcgggaagcggcaggagccgccgccgacacctgaaggaaaattgggccgatttccacctatgatgcatcatcaccaggcaccctcagatggccagactcctggggctcgtttccagaggtctcaccttgccgaggcatttgcaaaggccaaaggatcaggtggaggtgctggaggaggaggtagtggaagaggtctgatggggcagattattccaatctacggttttgggatttttttatatatactgtacattctatttaaggtaagtagaatcatcctaatcatattacatcaatgaaaatctaatatggcaataaaaatcattgtctacattaaaacttcttatagttcataaaattatttcaaatccatcatctctttaaatcctgcctcctcttcatgaggtacttaggatagccattatttcagtttcacataagaaatgtttactcaatgtttaagtgttttgccccaaaattcacaactaacaaggcagaactaggacttgaacatggatcttttggttcttaatccagtgagtgatacaattcaatgcactcccctgccaaaaaaaaaaaaaaaaaaaaaaaaattaacatctttacaggccgaaaaggaataaagattttctaagaagagcttttattattgggattggcacagtgatttccaaatagccattgtaaggccaaataatgacaccactttatcctgcttgtttctccacaggaatttgagatgctgtttttaatattatctccaataattctcctgagacagaactgtccctcctgaaattaagcctgatatttcctagctctggggagacatgggtgtaggttctttaaagcagacccccagttgagttccacctccaggcaggcctttgcaggcccctggcccctgtactgtgaattagaggcagaagactcactttgccctcctgtctagagtaagcttaaataagatgagttctttctcgcccaggaattctgcaggcagtctgagttgagtctgtaagaatgcccatagggtgccacacatcccttttagatgagcatgagcaaggaagatgacctgtagggagattttttttcccttgtgttagaaatgcttgttctctggtgccataaagaagcagcacttggacgtacatttaatttcctcagcaaggc

SEQ ID NO: 291815 - DNA, 923 bp, Artificial Sequence
  derived and/or modified sequence
cccaaggttgttatatcttcatgtcctcatttcttagggaggtaccttcagaaccaatagtgacccctaacttctctggtggtcggttccatgaaaggcaaaggagtgtgagagaggagtggatggtcaacctcccactgccatggtaacatgggtgctggctgatgggagcagaaaataatttagtgaaagtctgtgggggcagtcacaagatgtctgagaaaactggcgagccagctgctgaaaacagggacaaggaagcctccgtggctggagcccaaatcacactgcagacccagacaccgtgaccaccaccatggactccagagagagcagcttatagtactcaatcagctgccactaccaccatccagaacaccagatgttgtagccatggctgcagcaggaatggatgtcccactgtccctgctcctcggtgtgacttgctcccaagttcagggcaggtccatctgattggctgagtctggaatatctgcctgtgcctcagctgtgagggaggcagggaaagtaagccttttcagcttctgtcgtgggaggtgggctctgcctcctaccaagaatcaaagggtggaggatcttcaaacacaggaaaagaacccggatcctggcacccccaaattttcagagtccatttcagagcataagaaattgagggtccaagatcattcatgtaagaagtttagagggggaagaaaagaatgataaacgaaaagaacagcaatagtaaaggatcttttctttgtttcagtaagatgaagaggcctgagcagtttcgtggaggggaagaaacaggaaaacctcttcaaaagacaaaaagctggcactgcattctctctctgtagcaggacagaactgtctaaagacaagacccctttggccaaaataaaggaacctgaaacatt

SEQ ID NO: 291816 - protein, 269 aa, Artificial Sequence
  derived and/or modified sequence
MFPALETHLKQTIPDPYEDFMYRHLQYYGYFKAQRGSLPNSATHQHVRKNNPQCLLNGSLGEKDDLIPDTLQKEKLLYSHMLSLPHLRSRQLLYDELDEVNPRLREPQELFSILSTKRPLQAPRWPIECEVIKENIHHIEWAPPQPEYFYQPKGNEKVPEIVGEKKGTVVYQLDSVPIEGSYFTSSRVGGKRGIVKELAVTLQGPEDNTLLFESRFESGNLQKAVRVDPMSMNSPCELTSTLTNTLSGFIFVFRTPEKMLPIASPLSTC

SEQ ID NO: 291817 - DNA, 1287 bp, Artificial Sequence
  derived and/or modified sequence
agactacccgggccctcacagaaggcggtggcgggcgggtgcagcgagtttgtccccttgcccgcacactgcttggcctctgtacttaagtgcggtggccgcctgcctcgctggagcttctctgccgcagccatccgtgctgcttgggacgggccggggcgcgaaggcggtcgcatccatcgctctgccctcctgcttctcttgtgtaatcagctgcctatttggaaattgggcagggtttgcgactggatgctaatgtcactgactagttttcagcctaccatccagaagtaacatgttcccagctttggaaacgcacctaaagcagactattcctgatccttatgaagactttatgtaccgtcacctccaatattatggctactttaaagctcagagaggcagtttaccaaactctgctacgcatcagcatgttcggaagaataaccctcaatgcctgttgaatggctctcttggggaaaaagatgatttgataccagacaccctgcaaaaggagaagcttctatattcacatatgctgagtttaccacatcttaggagcagacagcttctttatgatgagttggatgaagtaaacccacgtcttcgagaaccccaagagctcttttccattttgtctaccaagaggccactgcaggctccaagatggccaattgaatgtgaggtcatcaaggaaaacatccatcatattgagtgggctccacctcaaccagaatatttctatcagcctaaaggaaatgaaaaggtaccagagattgtaggagagaaaaaaggaacagttgtctatcaattagattcagtgcctatagaaggttcctattttaccagttccagagtgggaggcaaacgaggaattgtcaaggaacttgctgtcacgttgcaaggaccagaagataatactctactgtttgaatcaaggtttgagagtgggaatctgcaaaaagctgtcagagtagaccctatgagtatgaactcaccttgcgaactgacctctacactaacaaacacactcagtggttttattttcgtgttcagaacaccagaaaagatgctacctatcgcttcaccattgtcaacttgctaaaacccaagagtctttatactgtagggatgaagccactcttgtactcccaattggatgccaacacccgcaatattggctggaggagagaaggaaatgaaatcaagtactacaagaacaacacggatgatgggcagcagcccttctactgtctcacgtggaccattcagtttccatatgaccag

SEQ ID NO: 291818 - DNA, 810 bp, Artificial Sequence
  derived and/or modified sequence
atgttccccgccctggagacccacctgaagcagaccatccccgacccctacgaggacttcatgtacagacacctgcagtactacggctacttcaaggcccagagaggcagcctgcccaacagcgccacccaccagcacgtgagaaagaacaacccccagtgcctgctgaacggcagcctgggcgagaaggacgacctgatccccgacaccctgcagaaggagaagctgctgtacagccacatgctgagcctgccccacctgagaagcagacagctgctgtacgacgagctggacgaggtgaaccccagactgagagagccccaggagctgttcagcatcctgagcaccaagagacccctgcaggcccccagatggcccatcgagtgcgaggtgatcaaggagaacatccaccacatcgagtgggcccccccccagcccgagtacttctaccagcccaagggcaacgagaaggtgcccgagatcgtgggcgagaagaagggcaccgtggtgtaccagctggacagcgtgcccatcgagggcagctacttcaccagcagcagagtgggcggcaagagaggcatcgtgaaggagctggccgtgaccctgcagggccccgaggacaacaccctgctgttcgagagcagattcgagagcggcaacctgcagaaggccgtgagagtggaccccatgagcatgaacagcccctgcgagctgaccagcaccctgaccaacaccctgagcggcttcatcttcgtgttcagaacccccgagaagatgctgcccatcgccagccccctgagcacctgctag

SEQ ID NO: 291819 - DNA, 810 bp, Artificial Sequence
  derived and/or modified sequence
atgtttccagcactcgagacccacctgaaacaaaccatccctgatccatacgaggacttcatgtatagacacctgcagtattatggctattttaaagcccaacgggggagcttacctaactccgctacacaccagcatgtgcgcaaaaataatcctcaatgtctgcttaatggatctcttggcgagaaagatgacctcattcccgacacattacaaaaggagaaactactgtattcccacatgctatccttaccacatttacggtccagacagctcctttacgatgagctggatgaagtcaatcccaggcttagagagcctcaggaactattctcgattctctcgactaagcgtcccctgcaggcccccaggtggcctatcgaatgtgaggtcatcaaggagaacatccaccacatcgagtgggcgcctccacagccagagtacttctaccagcccaaggggaatgaaaaggtccctgaaatcgtgggagaaaagaaggggacagtcgtgtatcagttagattccgtgcctatcgaggggtcatatttcacctcctcacgagtgggcgggaaacggggcattgtgaaagagttagctgtgaccttgcagggccctgaggacaacacattactcttcgagtctagattcgaatccggtaaccttcagaaggccgtcagggtggacccaatgagtatgaactctccctgtgagcttacttcgaccctgacaaacactctgtctggattcatttttgtgttccgtacgcccgagaagatgctccctatcgctagtcctctgagtacttgctag

SEQ ID NO: 291820 - DNA, 810 bp, Artificial Sequence
  derived and/or modified sequence
atgtttcctgccctggagacccacctgaagcagaccatcccagacccctatgaggacttcatgtaccgccacctgcagtactacggctacttcaaggcccagaggggcagcctgcccaacagcgccacccaccagcacgtgaggaagaacaacccccagtgcctgctgaatggcagcctgggggagaaggatgacctgatcccagacaccctgcagaaggagaagctgctgtacagccacatgctgagcctgccccacctgcggagccggcagctgctgtatgatgagctggatgaggtgaacccccggctgcgggagccccaggagctgttcagcatcctgagcaccaagaggcccctgcaggccccccgctggcccattgaatgtgaggtgatcaaggagaacatccaccacatcgagtgggccccaccccagcctgagtacttctaccagcccaagggaaatgagaaggtgcctgagatcgtgggggagaagaagggcaccgtggtgtaccagctggacagcgtgcccatcgagggcagctacttcaccagcagccgggtgggcggcaagaggggcatcgtgaaggagctggccgtgaccctgcagggccctgaggacaacaccctgctgtttgagagcagatttgagagcggcaacctgcagaaggctgtgcgggtggaccccatgtccatgaacagcccctgtgagctgaccagcaccctgaccaacaccctgagcggcttcatctttgtgttccgcaccccagagaagatgctgcccatcgccagccccctgagcacctgctag

SEQ ID NO: 291821 - DNA, 810 bp, Artificial Sequence
  derived and/or modified sequence
atgttccccgccctggagacccacctgaagcagaccatccccgacccttatgaggattttatgtacagacacttgcagtactatggttactttaaagcccagcgcggctctcttcctaactcagccacccaccagcacgtccgcaagaacaacccccaatgtcttctgaatggctcgttgggagagaaggacgacctaattcccgatacactccaaaaagaaaaactgctgtactcgcatatgttgtcactgcctcatctacggtcacgccagctcctctacgatgagctggatgaggtgaatcccaggctgagagagcctcaggaattgttttctattctgtccaccaaaaggccactacaggcccctagatggcccatcgagtgcgaggtcatcaaagaaaacattcaccatattgagtgggctccaccacagcctgagtatttctatcagccaaagggaaacgaaaaggtccccgaaatcgttggggagaagaagggtacagtcgtgtaccagctcgattcagtgccaatcgaaggttcgtattttacaagtagtcgggttgggggaaagaggggaattgtcaaggaactggccgtcacgctgcaagggcccgaagacaacaccctgctgttcgagtctcggttcgagtccgggaacttgcaaaaagctgttcgcgtggaccccatgtcaatgaattccccctgcgagctgacctccacattgaccaacacactgtctggattcatcttcgtcttccggaccccagagaagatgctgccgatagccagtcccctttccacctgctag

SEQ ID NO: 291822 - DNA, 810 bp, Artificial Sequence
  derived and/or modified sequence
atgtttcccgctttggaaacacacctgaagcagactatacccgacccatatgaggatttcatgtaccggcatctccaatactatgggtacttcaaagctcagcgagggagtttgcctaacagcgctacacatcagcacgtacggaagaacaaccctcagtgccttctgaatggctctctaggagaaaaagacgatttaatccccgacactctccaaaaagagaagctgctgtactctcatatgctgagcctgcctcatctgcgatccagacagcttttgtacgacgagttagatgaagttaacccacgactacgggaaccacaggagctgttctccatactttcaacgaagcgccctctccaggcccctcgctggcccatagagtgcgaggtgatcaaagaaaatatacaccacattgagtgggccccaccacagcctgagtatttttaccaacccaagggcaatgaaaaggtccccgaaatcgttggggaaaagaagggcaccgtcgtctatcagctggactctgtgcccatcgaagggtcgtatttcacctcttcccgcgtggggggaaagcgtgggatcgtgaaggaattggccgtgaccctgcagggcccagaggacaacacactgctcttcgagagtcggttcgaatctgggaacctgcagaaagctgtgagggtggatccaatgagtatgaattctccatgcgaactgacgagcaccctgaccaatacacttagcggctttatcttcgttttcaggacgccggagaagatgctgcccatcgcctcaccacttagtacatgctag

SEQ ID NO: 291823 - protein, 84 aa, Artificial Sequence
  derived and/or modified sequence
MLLGLAAMELKVWVDGIQRVVCGVSEQTTCQEVVIALAQAIGQTGRFVLVQRLREKERQLLPQECPVGAQATCGQFASDVQFVL

SEQ ID NO: 291824 - protein, 738 aa, Artificial Sequence
  derived and/or modified sequence
MQTPPLQQPHQEQVFLAFLVIVIPSFLTKEVFIPQDGKKVTWYCCGPTVYDASHMGHARSYISFDILRRVLKDYFKFDVFYCMNITDIDDKIIKRARQNHLFEQYREKRPEAAQLLEDVQAALKPFSVKLNETTDPDKKQMLERIQHAVQLATEPLEKAVQSRLTGEEVNSCVEVLLEEAKDLLSDWLDSTLGCDVTDNSIFSKLPKFWEGDFHRDMEALNVLPPDVLTRVSEYVPEIVNFVQKIVDNGYGYVSNGSVYFDTAKFASSEKHSYGKLVPEAVGDQKALQEGEGDLSISADRLSEKRSPNDFALWKASKPGEPSWPCPWGKGRPGWHIECSAMAGTLLGASMDIHGGGFDLRFPHHDNELAQSEAYFENDCWVRYFLHTGHLTIAGCKMSKSLKNFITIKDALKKHSARQLRLAFLMHSWKDTLDYSSNTMESALQYEKFLNEFFLNVKDILRAPVDITGQFEKWGEEEAELNKNFYDKKTAIHKALCDNVDTRTVMEEMRALVSQCNLYMAARKAVRKRPNQALLENIALYLTHMLKIFGAVEEDSSLGFPVGGPGTSLSLEATVMPYLQVLSEFREGVRKIAREQKVPEILQLSDALRDNILPELGVRFEDHEGLPTVVKLVDRNTLLKEREEKRRVEEEKRKKKEEAARRKQEQEAAKLAKMKIPPSEMFLSETDKYSKFDENGLPTHDMEGKELSKGQAKKLKKLFEAQEKLYKEYLQMAQNGSFQ

SEQ ID NO: 291825 - DNA, 2217 bp, Artificial Sequence
  derived and/or modified sequence
atgcagactccaccactgcagcagcctcatcaggagcaagtgttcttagcgtttctggttatagtcattccctcttttctgaccaaagaagtattcattccccaagacggcaagaaggtcacttggtactgttgcggtcctactgtctatgatgcctctcacatggggcatgcaagaagctatatatctttcgacatcctgagaagggtcctgaaagactactttaagtttgatgttttttactgtatgaatataactgatattgatgacaaaataattaagcgcgctcgtcagaatcacctctttgagcagtacagagaaaagagaccagaggcagcacagcttcttgaagacgtgcaggctgctctgaagccctttagcgtcaaactcaacgaaactacagatcctgataagaaacaaatgctcgaacgaatccaacacgcggttcagctggctacagagccgttggagaaagccgtccaatcccgtcttacaggcgaggaagtcaacagttgtgttgaggttttgttggaagaagccaaagatctgctcagcgactggctggactctactctcggatgtgacgtgacggacaacagcatattctctaagctgcctaagttctgggagggtgactttcacagggatatggaagcgctaaacgtcctacccccagacgtgcttacacgggtctccgagtacgttcccgagatagtgaattttgtacagaagatcgtcgataacgggtatgggtatgtgtctaatggtagtgtgtacttcgacaccgcaaaattcgcatcctcggaaaaacactcctatggcaagcttgtgcccgaagccgtgggggatcaaaaggcccttcaggaaggagagggtgacctcagtataagcgccgatcggcttagcgagaagcggtcccctaacgacttcgctctgtggaaggcgtccaagcctggcgaaccctcctggccatgtccttgggggaaggggcgacctggttggcacatcgaatgtagcgccatggcaggcaccctgttgggcgcttccatggatatccatggtgggggctttgatctcagatttcctcatcacgataatgaactggctcagagtgaggcatattttgagaacgactgctgggtaaggtactttctccatactggtcatttgacaatagccggctgtaaaatgagtaaatccttaaaaaactttatcactattaaagatgcattaaaaaaacatagcgctagacagttgcgattggcgtttcttatgcattcatggaaagataccctggattacagctctaacacaatggaatctgcactccagtacgaaaagttcctgaatgagtttttcttgaacgtgaaagacatcctgagggctccagtcgatattacaggacagttcgagaagtggggcgaagaagaagccgaactaaacaagaacttttacgataagaagacggctatccataaggcgctgtgcgacaacgtggatacaagaaccgtgatggaggaaatgcgagccttagtgagtcagtgcaacctgtatatggctgcacgaaaggcagtgcgcaaaaggcctaatcaggcgctccttgaaaatatcgcactttatctcacccatatgttaaagatttttggcgcggtggaggaagattccagcctcggcttcccagtgggagggcctggcacatcgctgtctctggaggccactgtaatgccatacctgcaagttttgagcgaatttcgggagggtgtgaggaaaattgctcgcgaacaaaaggttccagagatcctccaactctctgatgctcttcgtgacaatattctgccggagttgggtgtgcgatttgaagaccacgaaggccttcctacggtagtcaaactcgtggaccggaacacgctactgaaggagagggaagagaagaggagagtagaggaggagaagagaaaaaagaaggaagaagctgctagacgaaagcaagaacaggaagccgctaagctcgcaaagatgaagatcccaccttctgagatgtttctgagcgagaccgacaagtatagcaaatttgatgagaacggattaccaacacatgatatggagggtaaggaactatcaaaggggcaagctaaaaagttgaagaagctgtttgaggctcaggagaagctgtacaaagaatatctccagatggctcagaatgggtccttccaatag

SEQ ID NO: 291826 - DNA, 2217 bp, Artificial Sequence
  derived and/or modified sequence
atgcagaccccacccctgcagcagccccaccaggagcaggtgttcctggccttcctggtgattgtcatccccagcttcctgaccaaggaggtgttcatcccccaggacggcaagaaggtgacctggtactgctgcggccccaccgtgtatgatgccagccacatgggccacgcccggagctacatcagctttgacatcctgcggcgggtgctgaaggactacttcaagtttgatgtgttctactgcatgaacatcacagacattgatgacaagatcatcaagagggcccggcagaaccacctgtttgagcagtaccgggagaagaggcctgaggccgcccagctgctggaggatgtgcaggccgccctgaagcccttctctgtgaagctgaatgagaccacagatcctgacaagaagcagatgctggagcgcatccagcacgctgtgcagctggccacagagcccctggagaaggctgtgcagagccggctgactggagaggaggtgaacagctgtgtggaggtgctgctggaggaggccaaggacctgctgagtgactggctggacagcaccctgggctgtgatgtgacagacaacagcatcttcagcaagctgcccaagttctgggagggggacttccaccgggacatggaggccctgaatgtgctgcccccagatgtgctgaccagggtgtctgaatatgtgcctgagatcgtgaactttgtgcagaagatcgtggacaatggctacggctacgtgtccaatggatctgtgtactttgacacagccaagtttgccagcagcgagaagcacagctatggcaagctggtgcctgaggccgtgggggaccagaaggccctgcaggagggggagggggacctgagcatctctgctgaccggctgtctgagaagaggagccccaatgactttgccctgtggaaggccagcaagccaggagagcccagctggccctgcccctggggcaagggccggcccggctggcacattgaatgttctgccatggccggcaccctgctgggcgcctccatggacatccatggaggcggctttgacctgcgcttcccccaccacgacaatgagctggcccagagcgaggcctactttgaaaatgactgctgggtgcgctacttcctgcacacaggccacctgaccatcgccggctgcaagatgagcaagagcctgaagaacttcatcaccatcaaggatgccctgaagaagcacagcgcccggcagctgcggctggccttcctgatgcacagctggaaggacaccctggactacagcagcaacaccatggagagcgccctgcagtatgagaagttcctgaatgagttcttcctgaatgtgaaggacatcctgcgggcccctgtggacatcaccggccagtttgagaagtggggcgaggaggaggccgagctgaacaagaacttctatgacaagaagacagccatccacaaggccctgtgtgacaacgtggacaccaggacagtgatggaggagatgagggccctggtgtcccagtgcaacctgtacatggccgccaggaaggctgtgaggaagaggcccaaccaggccctgctggagaacatcgccctgtacctgacccacatgctgaagatctttggagctgtggaggaggacagcagcctgggcttccctgtgggcggccctggcaccagcctgagcctggaggccaccgtgatgccctacctgcaggtgctgtctgagttccgggagggcgtgaggaagatcgcccgggagcagaaggtgcctgagatcctgcagctgagtgatgccctgcgggacaacatcctgcctgagctgggcgtgcgctttgaggaccacgagggcctgcccaccgtggtgaagctggtggacaggaacaccctgctgaaggagcgggaggagaagagaagagtggaggaggagaagaggaagaagaaggaggaggccgcccggaggaagcaggagcaggaggccgccaagctggccaagatgaagatcccccccagcgagatgttcctgtctgaaacagacaagtacagcaagtttgatgaaaatggcctgcccacccatgacatggagggcaaggagctgagcaagggccaggccaagaagctgaagaagctgtttgaggcccaggagaagctgtacaaggagtacctgcagatggcccagaatggcagcttccagtag

SEQ ID NO: 291827 - DNA, 2217 bp, Artificial Sequence
  derived and/or modified sequence
atgcagaccccccccctgcagcagccccaccaggagcaggtgttcctggcttttctcgtcatcgtgatcccatcctttttaaccaaagaggtctttatcccgcaggacggaaagaaggtgacctggtattgctgcggccctaccgtgtacgacgctagccacatgggacatgctcgctcctacatcagtttcgatatattgagacgggttttaaaggactatttcaagtttgatgtcttctactgcatgaatatcactgatatcgacgacaaaattatcaaaagggctcgacagaaccatttgtttgaacagtaccgagagaagaggccggaggcagcacagctccttgaggacgtccaggcagcactcaagcctttttcagtcaagctgaacgaaaccacagaccctgacaagaaacagatgctggaacggatccagcacgctgtgcagctagctacagaaccattagaaaaagcagtgcagagcagacttactggcgaagaagttaactcatgcgttgaggttctgcttgaggaagccaaagatttgctgagcgattggttagactccacactgggatgtgatgtcaccgacaactccatctttagcaagctccccaaattttgggaaggcgactttcacagggacatggaggcactcaatgtcctccccccggatgtcctgaccagagtgtccgagtatgtacccgaaattgtgaattttgtccagaagatcgtcgataacgggtatggatacgtctctaatggaagtgtgtattttgataccgcaaagtttgcttccagcgagaaacactcctatggtaagctggtgccagaagcggtcggcgatcagaaggccctccaggagggagagggtgatctgtccattagcgcagatagattgtctgaaaagagatcacctaatgacttcgccctttggaaggcaagcaaacctggtgaaccatcctggccttgtccctggggcaaaggcagaccgggttggcatatcgaatgtagtgccatggcgggcactctgctgggagcatctatggacatacacggcggcggcttcgatcttcgttttccccaccacgacaacgaactggcccagtctgaagcttattttgagaacgactgctgggtcaggtattttctgcatacaggacatctcacaattgcaggatgcaagatgtctaaatctcttaaaaattttatcactatcaaggatgccctcaaaaagcattctgcccggcaactgcgcttggccttcttaatgcatagctggaaggataccttggactactcaagtaacacaatggaaagcgcattacagtacgaaaagtttctgaacgaattttttctgaatgtgaaggacatactccgcgcacccgtcgatattacggggcagttcgaaaagtggggcgaggaggaggcggaattgaacaagaacttttacgacaaaaaaactgctatccataaggcactctgcgataacgtcgataccaggacagtgatggaggaaatgcgggcacttgtgtcgcagtgtaatttatacatggcggccaggaaagctgtcagaaaacgccccaaccaggccttgcttgagaacattgcactgtacctgactcacatgctcaagatcttcggtgccgttgaggaggatagctcactcggcttccctgttggtggacccggtacctctctgtcactggaagccactgtgatgccctacctgcaagtactgtcagagtttcgcgaaggggtacgcaaaatcgcaagagagcagaaggttcctgagatccttcagctgagcgacgctctgagggataacatcctgcccgaacttggcgtccggtttgaggaccacgaaggactgcccacagtggtcaagctggtggatcgaaatacgttgctgaaagagagggaggagaaacgcagagttgaagaagagaagcggaaaaaaaaagaagaggcagccaggagaaagcaggaacaggaggcagctaagttggcaaagatgaaaatccctccctccgagatgttcttgagcgagaccgacaaatatagcaagttcgacgaaaacgggctgcccacccatgatatggagggcaaggagctttcaaagggccaggccaagaaactgaagaagctgtttgaggcccaggagaaactgtacaaggagtatctccagatggctcagaacggatcttttcaatag

SEQ ID NO: 291828 - DNA, 2217 bp, Artificial Sequence
  derived and/or modified sequence
atgcaaacgccgcctctgcagcaaccacaccaggagcaggtgttcctggcgtttttggttatcgtcattccgtctttcctgactaaagaagttttcataccccaggatggtaagaaagtgacatggtactgttgcggccctaccgtgtacgatgcgagccacatgggccacgctcgatcctatatatcttttgacatcctgagacgtgtgttgaaagactatttcaaatttgacgtgttttattgtatgaatattacggacattgacgataagataatcaaacgcgctcgacagaatcacctgttcgaacagtacagagagaaaaggcccgaagctgcccagctactggaggatgtccaggccgcactgaagcctttcagcgtgaagctcaacgagacgacggaccctgacaaaaaacagatgctggaacgcatccagcatgctgtgcagcttgctacagaacccctagagaaagccgtccagagtcgtctgacgggggaggaggtgaactcttgcgtggaagttttgctggaggaggccaaggacttgttgagcgattggctcgacagcacacttggctgtgacgttaccgataattctatatttagcaagctgccaaagttctgggagggtgactttcatcgagacatggaggccctgaacgtgttgcctccagatgtgctgacacgagtgtccgaatatgtgccggagattgttaactttgtccaaaaaatcgtggataacgggtatggatacgtgagcaacggatccgtgtacttcgacaccgctaagtttgcttcctcagagaagcacagctacggtaagttggtccccgaagcagtcggcgaccagaaagcattgcaagaaggggaaggcgatctgagcataagcgctgacaggctgtcagaaaagcgctcacctaatgacttcgctttgtggaaggcttccaagcctggtgagccgagctggccttgcccctggggcaaaggtcgcccaggatggcatatcgagtgcagcgccatggcaggcacccttctgggagcctctatggatattcacggaggagggtttgatctgcgttttccacaccatgataatgagcttgcccagtcagaagcttatttcgaaaatgattgttgggttagatatttcctgcatacaggccacctgacaatcgctggatgcaagatgtccaagtccctgaaaaactttataaccatcaaggacgctttgaaaaaacacagcgctagacagttgaggttggccttcctcatgcactcttggaaggacacactggattactcttctaatacaatggaaagcgctctgcaatatgaaaaatttctgaacgaattctttctcaatgtaaaggacatcctgcgggctccagtcgacattactggacaattcgagaaatggggagaggaagaggcagagctcaacaaaaacttttacgataagaaaacagccatccacaaagccttgtgcgataacgttgacactagaacagtcatggaggagatgcgcgctctggtgtctcagtgcaacttgtacatggcagcccgtaaggccgtgaggaagagacccaatcaggctcttctagagaatatcgccctatacctgactcatatgctgaagatctttggcgctgtcgaggaggattcatccctgggctttccagtgggtggcccagggacatccctcagtctggaagctacagtcatgccatatttgcaggtcctgtccgagttcagagagggagtgagaaaaatcgcacgtgagcagaaagttcctgagatcctccagctgagtgacgccctccgagataacattctcccggagttgggcgtgcggtttgaagaccatgaagggttgcccaccgtggttaagctggtggacagaaacactctcctaaaggaaagagaggaaaagcgcagggttgaggaggaaaaaaggaaaaagaaagaagaggcggcacgcagaaagcaggaacaggaggccgctaagctagccaagatgaagattcccccttctgaaatgtttttgagcgaaacggataagtattctaagtttgacgagaacggactccccacccacgatatggaaggtaaggagctgagcaaggggcaggctaagaagctgaagaaactcttcgaggcacaggagaaactctataaggagtacctccagatggcccagaatggatctttccagtag

SEQ ID NO: 291829 - DNA, 2778 bp, Artificial Sequence
  derived and/or modified sequence
agattctaggaagtgtctgtagccgcagctgcgggtccgggattcccagccatggcagattcctccgggcagcaggctcctgactacaggtccattctgagcattagtgacgaggcagccagggcacaagccctgaacgagcacctcagcacgcgtagctatgtccaggggtactcactgtcccaggcagacgtggacgcgttcaggcagctctcggccccgcccgctgacccccagctcttccacgtggctcggtggttcaggcacatagaagcgctcctgggtagcccctgtggcaaaggccagccctgcaggctccaagcaagcaaaggccggcgtgtgcagccccagtggtcccctcctgctgggacccagccatgcagactccacctttacaacagcctcaccaggaacaagtgtttcttgcatttcttgtgatcgtcattccttcattcctaacaaaggaagtgttcatacctcaagatgggaaaaaggtgacgtggtattgctgtgggccaaccgtctatgacgcatctcacatggggcacgccaggtcctacatctcttttgatatcttgagaagagtgttgaaggattacttcaaatttgatgtcttttattgcatgaacattacggatattgatgacaagatcatcaagagggcccggcagaaccacctgttcgagcagtatcgggagaagaggcctgaagcggcacagctcttggaggatgttcaggccgccctgaagccattttcagtaaaattaaatgagaccacggatcccgataaaaagcagatgctcgaacggattcagcacgcagtgcagcttgccacagagccacttgagaaagctgtgcagtccagactcacgggagaggaagtcaacagctgtgtggaggtgttgctggaagaagccaaggatttgctctctgactggctggattctacacttggctgtgatgtcactgacaattccatcttctccaagctgcccaagttctgggagggggacttccacagagacatggaagctctgaatgttctccctccagatgtcttaacccgggttagtgagtatgtgccagaaattgtgaactttgtccagaagattgtggacaacggttacggctatgtctccaatgggtctgtctactttgatacagcgaagtttgcttctagcgagaagcactcctatgggaagctggtgcctgaggccgttggagatcagaaagcccttcaagaaggggaaggtgacctgagcatctctgcagaccgcctgagtgagaagcgctctcccaacgactttgccttatggaaggcctctaagcccggagaaccgtcctggccgtgcccttggggaaagggtcgtccgggctggcatatcgagtgctcggccatggcaggcaccctcctaggggcttcgatggacattcacggaggtgggttcgacctccggttcccccaccatgacaatgagctggcacagtcggaggcctactttgaaaacgactgctgggtcaggtacttcctgcacacaggccacctgaccattgcaggctgcaaaatgtcaaagtcactaaaaaacttcatcaccattaaagatgccttgaaaaagcactcagcacggcagttgcggctggccttcctcatgcactcgtggaaggacaccctggactactccagcaacaccatggagtcagcgcttcaatatgagaagttcttgaatgagtttttcttaaatgtgaaagatatccttcgcgctcctgttgacatcactggtcagtttgagaagtggggagaagaagaagcagaactgaataagaacttttatgacaagaagacagcaattcacaaagccctctgtgacaatgttgacacccgcaccgtcatggaagagatgcgggccttggtcagtcagtgcaacctctatatggcagcccggaaagccgtgaggaagaggcccaaccaggctctgctggagaacatcgccctgtacctcacccatatgctgaagatctttggggccgtagaagaggacagctccctgggattcccggtcggagggcctggaaccagcctcagtctcgaggccacagtcatgccctaccttcaggtgttatcagaattccgagaaggagtgcggaagattgcccgagagcaaaaagtccctgagattctgcagctcagcgatgccctgcgggacaacatcctgcccgagcttggggtgcggtttgaagaccacgaaggactgcccacagtggtgaaactggtagacagaaacaccttattaaaagagagagaagaaaagagacgggttgaagaggagaagaggaagaagaaagaggaggcggcccggaggaaacaggaacaagaagcagcaaagctggccaagatgaagattccccccagtgagatgttcttgtcagaaaccgacaaatactccaagtttgatgaaaatggtctgcccacacatgacatggagggcaaagagctcagcaaagggcaagccaagaagctgaagaagctcttcgaggctcaggagaagctctacaaggaatatctgcagatggcccagaatggaagcttccagtgagggggcacaggactgactttttaaaccattgtggactagtggctgctgtctgcctcagtgacaatgtcccagcgctcctatcatgtttacagtcacccttgggtcctaaattaagagttgtgttcatgtaggttcgtgtcgtcgttggctctgagacattgataataaatttttctcaacagtg

SEQ ID NO: 291830 - DNA, 2217 bp, Artificial Sequence
  derived and/or modified sequence
atgcagaccccccccctgcagcagccccaccaggagcaggtgttcctggccttcctggtgatcgtgatccccagcttcctgaccaaggaggtgttcatcccccaggacggcaagaaggtgacctggtactgctgcggccccaccgtgtacgacgccagccacatgggccacgccagaagctacatcagcttcgacatcctgagaagagtgctgaaggactacttcaagttcgacgtgttctactgcatgaacatcaccgacatcgacgacaagatcatcaagagagccagacagaaccacctgttcgagcagtacagagagaagagacccgaggccgcccagctgctggaggacgtgcaggccgccctgaagcccttcagcgtgaagctgaacgagaccaccgaccccgacaagaagcagatgctggagagaatccagcacgccgtgcagctggccaccgagcccctggagaaggccgtgcagagcagactgaccggcgaggaggtgaacagctgcgtggaggtgctgctggaggaggccaaggacctgctgagcgactggctggacagcaccctgggctgcgacgtgaccgacaacagcatcttcagcaagctgcccaagttctgggagggcgacttccacagagacatggaggccctgaacgtgctgccccccgacgtgctgaccagagtgagcgagtacgtgcccgagatcgtgaacttcgtgcagaagatcgtggacaacggctacggctacgtgagcaacggcagcgtgtacttcgacaccgccaagttcgccagcagcgagaagcacagctacggcaagctggtgcccgaggccgtgggcgaccagaaggccctgcaggagggcgagggcgacctgagcatcagcgccgacagactgagcgagaagagaagccccaacgacttcgccctgtggaaggccagcaagcccggcgagcccagctggccctgcccctggggcaagggcagacccggctggcacatcgagtgcagcgccatggccggcaccctgctgggcgccagcatggacatccacggcggcggcttcgacctgagattcccccaccacgacaacgagctggcccagagcgaggcctacttcgagaacgactgctgggtgagatacttcctgcacaccggccacctgaccatcgccggctgcaagatgagcaagagcctgaagaacttcatcaccatcaaggacgccctgaagaagcacagcgccagacagctgagactggccttcctgatgcacagctggaaggacaccctggactacagcagcaacaccatggagagcgccctgcagtacgagaagttcctgaacgagttcttcctgaacgtgaaggacatcctgagagcccccgtggacatcaccggccagttcgagaagtggggcgaggaggaggccgagctgaacaagaacttctacgacaagaagaccgccatccacaaggccctgtgcgacaacgtggacaccagaaccgtgatggaggagatgagagccctggtgagccagtgcaacctgtacatggccgccagaaaggccgtgagaaagagacccaaccaggccctgctggagaacatcgccctgtacctgacccacatgctgaagatcttcggcgccgtggaggaggacagcagcctgggcttccccgtgggcggccccggcaccagcctgagcctggaggccaccgtgatgccctacctgcaggtgctgagcgagttcagagagggcgtgagaaagatcgccagagagcagaaggtgcccgagatcctgcagctgagcgacgccctgagagacaacatcctgcccgagctgggcgtgagattcgaggaccacgagggcctgcccaccgtggtgaagctggtggacagaaacaccctgctgaaggagagagaggagaagagaagagtggaggaggagaagagaaagaagaaggaggaggccgccagaagaaagcaggagcaggaggccgccaagctggccaagatgaagatcccccccagcgagatgttcctgagcgagaccgacaagtacagcaagttcgacgagaacggcctgcccacccacgacatggagggcaaggagctgagcaagggccaggccaagaagctgaagaagctgttcgaggcccaggagaagctgtacaaggagtacctgcagatggcccagaacggcagcttccagtag

SEQ ID NO: 291831 - protein, 70 aa, Artificial Sequence
  derived and/or modified sequence
MASDASHALEAALEQMDGIIAGTKTGADLSDGTCEPGLASPASYMNPFPVLHLIEDLRLALEMLELPQER

SEQ ID NO: 291832 - protein, 89 aa, Artificial Sequence
  derived and/or modified sequence
MASDASHALEAALEQMDGIIAGTKTGADLSDGTCEPGLASPASYMNPFPVLHLIEDLRLALEMLELPQERAALLSQIPGPTAAYIKEWF

SEQ ID NO: 291833 - protein, 170 aa, Artificial Sequence
  derived and/or modified sequence
MASDASHALEAALEQMDGIIAGTKTGADLSDGTCEPGLASPASYMNPFPVLHLIEDLRLALEMLELPQERAALLSQIPGPTAAYIKEWFEESLSQVNHHSAASNETYQERLARLEGDKESLILQVSVLTDQVEAQGEKIRDLEVCLEGHQVKLNAAEEMLQQELLSRTSL

SEQ ID NO: 291834 - protein, 758 aa, Artificial Sequence
  derived and/or modified sequence
MDGDIDVYKHFSWLKRSQVNHHSAASNETYQERLARLEGDKESLILQVSVLTDQVEAQGEKIRDLEVCLEGHQVKLNAAEEMLQQELLSRTSLETQKLDLMTEVSELKLKLVGMEKEQREQEEKQRKAEELLQELRHLKIKVEELENERNQYEWKLKATKAEVAQLQEQVALKDAEIERLHSQLSRTAALHSESHTERDQEIQRLKMGMETLLLANEDKDRRIEELTGLLNQYRKVKEIVMVTQGPSERTLSINEEEPEGGFSKWNATNKDPEELFKQEMPPRCSSPTVGPPPLPQKSLETRAQKKLSCSLEDLRSESVDKCMDGNQPFPVLEPKDSPFLAEHKYPTLPGKLSGATPNGEAAKSPPTICQPDATGSSLLRLRDTESGWDDTAVVNDLSSTSSGTESGPQSPLTPDGKRNPKGIKKFWGKIRRTQSGNFYTDTLGMAEFRRGGLRATAGPRLSRTRDSKGQKSDANAPFAQWSTERVCAWLEDFGLAQYVIFARQWVSSGHTLLTATPQDMEKELGIKHPLHRKKLVLAVKAINTKQEEKSALLDHIWVTRWLDDIGLPQYKDQFHESRVDRRMLQYLTVNDLLFLKVTSQLHHLSIKCAIHVLHVNKFNPHCLHRRPADESNLSPSEVVQWSNHRVMEWLRSVDLAEYAPNLRGSGVHGGLIILEPRFTGDTLAMLLNIPPQKTLLRRHLTTKFNALIGPEAEQEKREKMASPAYTPLTTRWDRLADALVTCPLCTLRAHSNTVCVTI

SEQ ID NO: 291835 - DNA, 2277 bp, Artificial Sequence
  derived and/or modified sequence
atggacggcgacatcgacgtgtacaagcacttcagctggctgaagagaagccaggtgaaccaccacagcgccgccagcaacgagacctaccaggagagactggccagactggagggcgacaaggagagcctgatcctgcaggtgagcgtgctgaccgaccaggtggaggcccagggcgagaagatcagagacctggaggtgtgcctggagggccaccaggtgaagctgaacgccgccgaggagatgctgcagcaggagctgctgagcagaaccagcctggagacccagaagctggacctgatgaccgaggtgagcgagctgaagctgaagctggtgggcatggagaaggagcagagagagcaggaggagaagcagagaaaggccgaggagctgctgcaggagctgagacacctgaagatcaaggtggaggagctggagaacgagagaaaccagtacgagtggaagctgaaggccaccaaggccgaggtggcccagctgcaggagcaggtggccctgaaggacgccgagatcgagagactgcacagccagctgagcagaaccgccgccctgcacagcgagagccacaccgagagagaccaggagatccagagactgaagatgggcatggagaccctgctgctggccaacgaggacaaggacagaagaatcgaggagctgaccggcctgctgaaccagtacagaaaggtgaaggagatcgtgatggtgacccagggccccagcgagagaaccctgagcatcaacgaggaggagcccgagggcggcttcagcaagtggaacgccaccaacaaggaccccgaggagctgttcaagcaggagatgccccccagatgcagcagccccaccgtgggccccccccccctgccccagaagagcctggagaccagagcccagaagaagctgagctgcagcctggaggacctgagaagcgagagcgtggacaagtgcatggacggcaaccagcccttccccgtgctggagcccaaggacagccccttcctggccgagcacaagtaccccaccctgcccggcaagctgagcggcgccacccccaacggcgaggccgccaagagcccccccaccatctgccagcccgacgccaccggcagcagcctgctgagactgagagacaccgagagcggctgggacgacaccgccgtggtgaacgacctgagcagcaccagcagcggcaccgagagcggcccccagagccccctgacccccgacggcaagagaaaccccaagggcatcaagaagttctggggcaagatcagaagaacccagagcggcaacttctacaccgacaccctgggcatggccgagttcagaagaggcggcctgagagccaccgccggccccagactgagcagaaccagagacagcaagggccagaagagcgacgccaacgcccccttcgcccagtggagcaccgagagagtgtgcgcctggctggaggacttcggcctggcccagtacgtgatcttcgccagacagtgggtgagcagcggccacaccctgctgaccgccaccccccaggacatggagaaggagctgggcatcaagcaccccctgcacagaaagaagctggtgctggccgtgaaggccatcaacaccaagcaggaggagaagagcgccctgctggaccacatctgggtgaccagatggctggacgacatcggcctgccccagtacaaggaccagttccacgagagcagagtggacagaagaatgctgcagtacctgaccgtgaacgacctgctgttcctgaaggtgaccagccagctgcaccacctgagcatcaagtgcgccatccacgtgctgcacgtgaacaagttcaacccccactgcctgcacagaagacccgccgacgagagcaacctgagccccagcgaggtggtgcagtggagcaaccacagagtgatggagtggctgagaagcgtggacctggccgagtacgcccccaacctgagaggcagcggcgtgcacggcggcctgatcatcctggagcccagattcaccggcgacaccctggccatgctgctgaacatccccccccagaagaccctgctgagaagacacctgaccaccaagttcaacgccctgatcggccccgaggccgagcaggagaagagagagaagatggccagccccgcctacacccccctgaccaccagatgggacagactggccgacgccctggtgacctgccccctgtgcaccctgagagcccacagcaacaccgtgtgcgtgaccatctag

SEQ ID NO: 291836 - DNA, 2277 bp, Artificial Sequence
  derived and/or modified sequence
atggacggggacatagacgtctacaagcacttttcttggttaaagcgttctcaggtcaaccatcacagcgcagcttccaacgagacctaccaggaacgtctggctagactcgaaggagataaggaatccttaatcctacaggtgagtgtcctcaccgaccaggtagaggctcagggtgaaaaaattagagacctggaagtgtgcctcgaagggcaccaggtgaagcttaacgccgctgaggaaatgctgcaacaggaactgctttcacgtacttccctggagactcagaaactggacctgatgacagaggtgtctgaactgaagctgaagctggtaggtatggagaaagaacagcgggaacaagaagagaagcaacgcaaagccgaggagctgttgcaggagcttagacacttgaagattaaggttgaggagctggaaaatgagaggaatcagtatgagtggaaactcaaggcaaccaaagccgaggtggcccagctacaggagcaggtcgctctgaaggacgctgagatcgagcgactccacagtcagctgagccgtaccgccgcattacattccgagtcacatactgaacgagatcaggagatccagaggctaaagatggggatggagaccttgcttctggcaaatgaggataaggaccgacggatagaggagttaactggactcctgaatcagtacaggaaggtgaaggagattgtgatggtgacccaagggcccagcgaacggaccctatctattaatgaggaggagcccgagggcggcttttcaaagtggaacgccacaaataaggatcctgaagaactgttcaagcaagaaatgccgccgcgctgctcctcgccaactgtaggtccaccaccactcccccagaagagtctggaaactagagctcagaagaagcttagctgtagcctggaagacttgcgttcagaaagcgtggataagtgcatggacgggaatcaacctttccccgtgcttgagcccaaagacagtccgtttttggctgaacataagtaccccacactgcctggaaagctcagcggcgccaccccgaacggagaagcggcaaagtcccctcctactatttgtcagcccgatgcaacaggaagctcccttctgcggcttcgcgataccgagtcaggctgggatgacaccgccgtggtgaatgacctgtctagcacatcaagcggtacagaatctgggccgcagagtccccttacgcctgatggcaagcgcaacccaaaggggatcaagaagttttggggaaaaatcaggagaacccagtccggaaatttctataccgacacactaggaatggcggaattccgacggggcggcttgagagcgacagcaggcccgcggctatcccggactagagactcaaaaggccagaagagcgacgctaacgctccctttgcgcagtggtcaactgaacgagtctgcgcttggctggaagattttggcttggcacaatacgtaatctttgctagacaatgggtctccagcgggcacaccctcctcaccgctacaccacaggatatggagaaggaactgggaattaaacatccactgcatagaaagaaactcgtgctggctgtgaaagcgatcaatacaaagcaggaggaaaagagcgccttgcttgatcatatctgggtgaccaggtggttggatgacataggcctcccccagtacaaagatcaatttcacgagtccagagtcgatcgcaggatgcttcagtatcttactgtgaatgaccttctgttcctcaaagtgacatcccagctgcaccacctctccattaaatgcgccatacatgtcctacatgtaaacaagtttaatccccactgcctgcaccggagaccggcagatgagagcaacctttctccatctgaagtagtccaatggagtaaccatcgggtaatggagtggctgcggagcgtggacttagccgagtacgctcccaacctccgtggtagcggcgtacatggcggcttaataattctggaaccaagatttacaggcgacacactcgccatgttgcttaatatccccccacaaaaaactctgcttcggagacacctgactacaaaattcaatgctctcataggccccgaggctgagcaggagaaaagagagaagatggcaagccccgcctataccccgcttaccaccaggtgggacaggttggcagacgccctggtgacatgtccgctttgcactctgagggcgcacagcaacaccgtctgtgttacaatatag

SEQ ID NO: 291837 - DNA, 2277 bp, Artificial Sequence
  derived and/or modified sequence
atggatggagacattgatgtgtacaagcacttctcctggctgaagaggagccaggtgaaccaccacagcgctgccagcaatgagacctaccaggagcggctggcccggctggagggggacaaggagagcctcatcctgcaggtgtctgtgctgacagaccaggtggaggcccagggcgagaagatccgggacctggaggtgtgcctggagggccaccaggtgaagctgaatgctgctgaggagatgctgcagcaggagctgctgagcaggaccagcctggagacccagaagctggacctgatgacagaggtgtctgagctgaagctgaagctggtgggcatggagaaggagcagcgggagcaggaggagaagcagaggaaggccgaggagctgctgcaggagctgcggcacctgaagatcaaggtggaggagctggagaatgaaagaaaccagtatgagtggaagctgaaggccaccaaggccgaggtggcccagctgcaggagcaggtggccctgaaggatgctgagattgagcggctgcacagccagctgagcaggacagctgccctgcacagcgagagccacacagagcgggaccaggagatccagaggctgaagatgggcatggagaccctgctgctggccaatgaagacaaggacagaagaattgaggagctgaccggcctgctgaaccagtacaggaaggtgaaggagatcgtgatggtgacccagggccccagcgagaggaccctgagcatcaatgaggaggagcctgagggcggcttcagcaagtggaatgccaccaacaaggaccctgaggagctgttcaagcaggagatgccaccccgctgcagcagccccaccgtgggccccccacccctgccccagaagagcctggagacccgggcccagaagaagctgagctgcagcctggaggacctgcggtctgagagcgtggacaagtgcatggatggcaaccagcccttccctgtgctggagcccaaggacagccccttcctggccgagcacaagtaccccaccctgcccgggaagctgagcggggccacccccaacggggaggccgccaagagcccccccaccatctgccagccagatgccaccggcagcagcctgctgcggctgcgggacacagagagcggctgggatgacacagctgtggtgaatgacctgagcagcaccagcagcggcacagagagcggcccccagagccccctgaccccagatggcaagaggaaccccaagggcatcaagaagttctggggcaagatccggaggacccagagcggcaacttctacacagacaccctgggcatggccgagttcagaagaggaggcctgcgggccacagctggcccccggctgagcaggacccgggacagcaagggccagaagagtgatgccaatgccccctttgcccagtggagcacagagcgggtgtgtgcctggctggaggactttggcctggcccagtatgtgatctttgcccggcagtgggtgagcagcggccacaccctgctgacagccaccccccaggacatggagaaggagctgggcatcaagcaccccctgcacaggaagaagctggtgctggccgtgaaggccatcaacaccaagcaggaggagaagagcgccctgctggaccacatctgggtgacccgctggctggatgacatcggcctgccccagtacaaggaccagttccacgagagccgggtggacaggaggatgctgcagtacctgactgtgaatgacctgctcttcctgaaggtgaccagccagctgcaccacctgagcatcaagtgtgccatccacgtgctgcacgtgaacaagttcaacccccactgcctgcacagaagaccagcagatgagagcaacctgagccccagcgaggtggtgcagtggagcaaccaccgggtgatggagtggctgcggtctgtggacctggccgagtatgcccccaacctgcggggcagcggcgtgcacggcggcctcatcatcctggagccccgcttcaccggggacaccctggccatgctgctgaacatccccccccagaagaccctgctgcggcggcacctgaccaccaagttcaatgccctgattggccctgaggccgagcaggagaagcgggagaagatggccagccctgcctacacccccctgaccacccgctgggaccggctggctgatgccctggtgacctgccccctgtgcaccctgcgggcccacagcaacacagtgtgtgtgaccatctag

SEQ ID NO: 291838 - DNA, 2277 bp, Artificial Sequence
  derived and/or modified sequence
atggacggcgacatcgacgtgtacaagcacttcagctggctgaagcggagtcaggtcaatcaccatagtgctgccagcaatgaaacctatcaagagaggttagccagactggaaggagataaggaaagtcttatccttcaagtatcggtgctgaccgatcaggtggaagcgcagggtgagaagatcagagacctggaagtctgtctggaaggacatcaagtcaagttgaacgcagcagaagaaatgctgcagcaggagctattgagccgtacttcccttgagacacagaaactggatctgatgacagaggtctctgagctaaaattgaagttagtgggtatggagaaagagcagagggaacaggaagagaagcaaagaaaggccgaggagcttctacaggaattgcgacacctgaagattaaagtggaagagttggaaaacgagcgaaaccagtacgagtggaaacttaaagctaccaaggcagaggtggcacagttgcaggagcaggtggcactcaaagatgccgaaatcgaacggttacattcacagctgtctcgtacggcagcattgcacagcgaaagccacaccgaaagggaccaagagattcaaaggctgaagatgggcatggagactcttctgctcgctaacgaggataaagacaggcgcattgaggaactcactggtctgttaaatcagtaccgaaaagtcaaggagatcgtaatggtgactcaaggacccagcgagaggaccctgagcatcaatgaggaagagcccgagggggggttcagtaaatggaatgcaaccaataaagatcccgaggaactgtttaagcaggagatgcccccaagatgctcgtctcccaccgtggggccccccccgctgccccagaaaagtttggagacccgcgcgcaaaaaaagctcagttgctctctggaggatttacgttctgaaagcgtagataaatgcatggacggtaatcagccatttcccgtgctggagcccaaagactctccatttttggccgagcacaagtaccccacgttgcccgggaaactcagcggagccacaccgaatggcgaagccgccaagagcccccccacgatctgccagccggatgctaccgggagctcattacttcgcctccgggacacagaaagcggttgggatgatacggcagtggttaacgatctaagctcaacgagcagtggaactgaatccgggccccagtcccctcttacgcccgatggaaagaggaatcccaaggggattaagaagttctggggcaagataaggaggacgcagagtggcaatttttacacggataccctggggatggctgagttcagaaggggaggactgcgggccaccgctggccccagactgagcaggacaagagatagcaaaggccaaaagtctgatgcaaacgccccatttgctcagtggtccactgaacgagtctgcgcatggctggaggacttcggcctagcccaatatgtgatttttgctagacaatgggtctcatctggccatacactcctgaccgcgaccccccaggacatggaaaaagagctggggatcaagcaccccttgcatcgtaaaaagttagtcctcgctgtgaaggcaattaatactaaacaagaagagaagtcagcgcttttggatcatatttgggtgactcgctggctcgatgacatagggctgcctcaatataaagaccagttccatgagtccagagtcgatcggagaatgttacagtacctgacagttaacgatctgctatttttgaaggtaaccagccaattgcaccatctgagtatcaagtgcgccattcacgtgctgcacgttaacaagttcaacccccattgtctgcatagacggcccgccgacgagtctaatctgtcccccagtgaggtggtgcagtggtctaaccacagggtgatggaatggcttaggtctgtcgacttagccgagtacgcgcccaatctgaggggttcaggcgtgcatggcggtctcatcatcctagagccaaggtttactggggatacactggctatgctcctgaacatcccgccccagaaaacgctactgcggagacatcttacaacgaaattcaacgctctaatcggtcccgaggctgagcaggagaaacgcgaaaagatggccagtcccgcctatacgccgctgactacacgctgggatcgtctggcagatgccctggttacttgtcctctatgtactctgcgggctcatagcaacacggtgtgtgtcaccatttag

SEQ ID NO: 291839 - DNA, 2277 bp, Artificial Sequence
  derived and/or modified sequence
atggatggcgatatcgatgtctacaaacactttagctggctgaagagaagccaggtcaaccaccactccgccgcaagcaacgagacttatcaggagcgactcgctaggctcgagggagataaggagagtttgattttgcaggtctccgtgttaaccgaccaggtcgaggcccaaggggaaaagataagagacctcgaggtgtgtctcgagggtcaccaggtgaagctaaacgctgctgaggaaatgctgcagcaagaactcctctcccggacgtctctggaaacgcagaagctcgatctgatgaccgaagtaagcgaactgaaactgaaactcgtgggcatggagaaagagcagcgcgaacaagaggagaaacaaagaaaggctgaggagctgctccaggagctgcgacatctcaaaatcaaagttgaggaactggaaaatgagagaaaccagtacgagtggaaactcaaggccacgaaggccgaggtggctcagcttcaggagcaggtagcactgaaggacgcagagattgagcgtttacatagccaactgtctagaacagccgctcttcacagtgagagccacacagagcgggaccaggagatacagagattgaagatgggcatggagactctgttattggcaaacgaagataaggaccgacgcattgaggagttaacaggtctacttaaccagtaccgcaaagtgaaggaaatagttatggtgacgcaaggccctagcgagcgcacactgtctattaacgaggaggagcctgaaggcggattctcaaagtggaacgctaccaacaaggaccctgaggaactcttcaagcaggagatgcctccaaggtgcagctctccgacggtagggcctcccccactcccacaaaagagcttagagacgagggcccaaaagaaattgagctgctctcttgaagatctgcgctccgaatctgtcgataagtgtatggatgggaatcagccattcccggtcctagagcccaaggattctccattcctggcagaacacaagtaccccacactgcccggtaaactctcaggagcaacacctaatggggaggctgcaaagtctccccctaccatttgtcagccagacgcaactggatcaagtctgttgcgcctcagagacacagagtccggttgggatgatactgcagtcgttaacgatctgtcctctactagcagcggtacagaatccggaccacagtcccccttaactcctgacggcaagaggaatcctaaaggaattaagaaattttggggcaaaatccgccgtacacaatccgggaatttctacactgacactcttggaatggctgagtttcggaggggcggtctcagagccaccgccggacccagactgtcacgaactcgagatagtaagggacagaagtcagacgctaacgccccttttgcacagtggagcacagagcgtgtgtgcgcctggctcgaggacttcggcttagcccagtacgtgatctttgccaggcaatgggttagctcaggtcatacgttgttaacagctacgccacaggatatggagaaagagctgggaatcaagcacccactccaccgcaaaaagctcgtgttggccgtgaaggcgatcaatacgaagcaagaagaaaaatccgctctcctggaccacatttgggtcactagatggctggatgacatcgggctccctcaatacaaggatcagttccacgagagtagggtggatagacgcatgttgcagtacctcaccgttaacgatctcctgtttttaaaagtcacatcccagctccatcatctcagtatcaagtgtgccatccacgtacttcatgtcaacaagtttaatccccactgcctgcacaggcgcccagccgatgagtccaacctttcgccctctgaggtggttcagtggagtaatcatagagtcatggagtggcttcgtagtgtagatctggccgaatatgccccaaatctgcgcggaagtggagtgcatggaggtcttatcattctagagccaagattcactggtgacacacttgccatgcttttgaacatacccccacaaaagaccctgctgaggaggcacctaacgaccaaatttaacgccttaattggtccagaggcagagcaggaaaaacgtgaaaagatggctagtcctgcatacacaccactaacgactaggtgggaccgcctggctgacgcgcttgtgacatgtccactgtgcacattaagggcacactcaaataccgtttgcgttaccatctag

SEQ ID NO: 291840 - DNA, 1955 bp, Artificial Sequence
  derived and/or modified sequence
aaatgcagagtgaagcagagacaggaaatcggggctctcagtaatgagttccagccactccagaagggggaagccagacaaggaattttcttcaggactgtttccctctggcaggctccgtcccaggtaaaccaccacagtgctgctagtaatgaaacctaccaggaacgcttggcacgtctagaaggggataaggagtccctcatattgcaggtgagtgtcctcacagaccaagtagaagcccagggagaaaagattcgagacctggaagtgtgtctggaaggacaccaggtgaaactcaatgctgctgaagagatgcttcaacaggagctgctaagccgcacatctcttgagacccagaagctcgatctgatgactgaagtgtctgagctgaagctcaagctggttggcatggagaaggagcagagagagcaggaggagaagcagagaaaagcagaggagttactgcaagagctcaggcacctcaaaatcaaagtggaagagttggaaaatgaaaggaatcagtatgaatggaagctaaaggccactaaggctgaagtcgcccagctgcaagaacaggtggccctgaaagatgcagaaattgagcgtctgcacagccagctctcccggacagcagctctccacagtgagagtcacacagagagagaccaagaaattcaacgtctgaaaatggggatggaaactttgctgcttgccaatgaagataaggaccgtcggatagaggagcttacggggctgttaaaccagtaccggaaggtaaaggagattgtgatggtcactcaagggccttcggagagaactctctcaatcaatgaagaagaaccggagggaggtttcagcaagtggaacgctacaaataaggaccctgaagaattatttaaacaagagatgcctccaagatgtagctctcctacagtggggccacctccattgccacagaaatcactggaaaccagggctcagaaaaagctctcttgtagtctagaagacttgagaagtgaatctgtggataagtgtatggatgggaaccagcccttcccggtgttagaacccaaggacagccctttcttggcggagcacaaatatcccactttacctgggaagctttcaggagccacgcccaatggagaggctgccaaatctcctcccaccatctgccagcctgacgccacggggagcagcctgctgaggctgagagacacagaaagtggctgggacgacactgctgtggtcaatgacctctcatccacatcatcgggcactgaatcaggtcctcagtctcctctgacaccagatggtaaacggaatcccaaaggcattaagaagttctggggaaaaatccgaagaactcagtcaggaaatttctacactgacacgctggggatggcagagtttcgacgaggtgggctccgggcaaccgcagggccaagactctctaggaccagggactccaagggacagggtctacagtggctaccggggcctcagcccccttgatgcccctgaactggatgggctggaccagatggcaccttcggaaggtaccgtgacgcagatagggctcctctcccaagacattcaccgccttacgacaatgctgagccaggaccagctgctgaatgactctcgcctgcctgcccccaactctgatgactggagatgactttcttcgtggctgagagcgtagggaggcatgtgtgggggccccggagcctttgcttctgtggggagcgggcacacagccccctctgcaagcccagtccgggctggcagggtgtctcagacaggctgctgacaggcatgaagcagagctgtgggacaggtgtccaggggtggccccagggtccatgtgtgtcttcaaccatgctgcgctcttcaccgcaggcttcataccttttgtacttttatacgtggactgcagaccactttgtggg

SEQ ID NO: 291841 - DNA, 2314 bp, Artificial Sequence
  derived and/or modified sequence
ccaccaaggcatctaactgctgacatgggtgcccagcatggatggggacattgatgtttacaagcatttctcgtggctgaagaggtcccaggtaaaccaccacagtgctgctagtaatgaaacctaccaggaacgcttggcacgtctagaaggggataaggagtccctcatattgcaggtgagtgtcctcacagaccaagtagaagcccagggagaaaagattcgagacctggaagtgtgtctggaaggacaccaggtgaaactcaatgctgctgaagagatgcttcaacaggagctgctaagccgcacatctcttgagacccagaagctcgatctgatgactgaagtgtctgagctgaagctcaagctggttggcatggagaaggagcagagagagcaggaggagaagcagagaaaagcagaggagttactgcaagagctcaggcacctcaaaatcaaagtggaagagttggaaaatgaaaggaatcagtatgaatggaagctaaaggccactaaggctgaagtcgcccagctgcaagaacaggtggccctgaaagatgcagaaattgagcgtctgcacagccagctctcccggacagcagctctccacagtgagagtcacacagagagagaccaagaaattcaacgtctgaaaatggggatggaaactttgctgcttgccaatgaagataaggaccgtcggatagaggagcttacggggctgttaaaccagtaccggaaggtaaaggagattgtgatggtcactcaagggccttcggagagaactctctcaatcaatgaagaagaaccggagggaggtttcagcaagtggaacgctacaaataaggaccctgaagaattatttaaacaagagatgcctccaagatgtagctctcctacagtggggccacctccattgccacagaaatcactggaaaccagggctcagaaaaagctctcttgtagtctagaagacttgagaagtgaatctgtggataagtgtatggatgggaaccagcccttcccggtgttagaacccaaggacagccctttcttggcggagcacaaatatcccactttacctgggaagctttcaggagccacgcccaatggagaggctgccaaatctcctcccaccatctgccagcctgacgccacggggagcagcctgctgaggctgagagacacagaaagtggctgggacgacactgctgtggtcaatgacctctcatccacatcatcgggcactgaatcaggtcctcagtctcctctgacaccagatggtaaacggaatcccaaaggcattaagaagttctggggaaaaatccgaagaactcagtcaggaaatttctacactgacacgctggggatggcagagtttcgacgaggtgggctccgggcaaccgcagggccaagactctctaggaccagggactccaagggacagaaaagtgacgccaatgccccctttgcccagtggagcacagagcgtgtgtgtgcatggctggaggactttggcctggctcagtatgtgatctttgccaggcagtgggtatcttctggccacaccttattgacagccacccctcaggacatggaaaaggagctaggaattaagcacccactccacaggaagaagcttgttttagcagtgaaagccatcaacaccaaacaggaggagaagtctgcactgctagaccacatttgggtgacaaggtggcttgatgatattggcttaccccagtacaaagaccagtttcatgaatctagagttgacagacgaatgctgcaatacctaactgtgaacgatttactcttcttaaaagtcaccagccaactacatcatctcagcatcaaatgtgccattcacgtgctgcatgtcaacaagttcaacccccactgcctgcaccggcggccagctgatgagagtaacctttctccttcagaagttgtacagtggtccaaccacagggtgatggagtggttacgatctgtggacctggcagagtatgcacccaatcttcgagggagtggagtccatggaggcctcattatcctggagccacgcttcactggggacaccctggctatgcttctcaacatccccccacaaaagacgctcctcaggcgccacctgaccaccaagttcaatgccttgattggtccggaggctgaacaggagaagcgagagaaaatggcctcaccagcttacacaccactgaccaccaggtgggacagattagctgatgcccttgtcacctgccctctgtgcaccctgagagctcacagtaacactgtgtgtgtcaccatataa

SEQ ID NO: 291842 - DNA, 630 bp, Artificial Sequence
  derived and/or modified sequence
atggccagcggcatcctggtgaacgtgaaggaggaggtgacctgccccatctgcctggagctgctgacccagcccctgagcctggactgcggccacagcttctgccaggcctgcctgaccgccaaccacaagaagagcatgctggacaagggcgagagcagctgccccgtgtgcagaatcagctaccagcccgagaacatcagacccaacagacacgtggccaacatcgtggagaagctgagagaggtgaagctgagccccgagggccagaaggtggaccactgcgccagacacggcgagaagctgctgctgttctgccaggaggacggcaaggtgatctgctggctgtgcgagagaagccaggagcacagaggccaccacaccttcctgaccgaggaggtggccagagagtaccaggtgaagctgcaggccgccctggagatgctgagacagaagcagcaggaggccgaggagctggaggccgacatcagagaggagaaggccagctggaagacccagatccagtacgacaagaccaacgtgctggccgacttcgagcagctgagagacatcctggactgggaggagagcaacgagctgcagaacctggagaaggaggaggaggactag

SEQ ID NO: 291843 - DNA, 219 bp, Artificial Sequence
  derived and/or modified sequence
atggccagcggcatcctggtgaacgtgaaggaggaggtgacctgccccatctgcctggagctgctgacccagcccctgagcctggactgcggccacagcttctgccaggcctgcctgaccgccaaccacaagaagagcatgctggacaagggcgagagcagctgccccgtgtgcagaatcagctaccagcccgagaacatcagacccaacagacactag

SEQ ID NO: 291844 - DNA, 630 bp, Artificial Sequence
  derived and/or modified sequence
atggccagtgggattctggtgaacgtgaaggaggaagtgacttgtcctatttgcctggagctccttacccaacctttatctctggactgtggccattctttttgtcaagcatgtctcaccgccaatcataagaaatccatgctagataagggcgagtcttcctgtcctgtgtgcaggatttcttaccaacccgaaaatatccggccgaaccgccatgttgccaacatcgttgagaaactcagggaagtgaagctctctccggagggacagaaggtcgaccattgcgccagacacggggagaagcttttgttattctgtcaggaagacggtaaagtcatctgctggctttgtgagcgctcacaggaacacaggggtcatcacacgtttctcactgaggaggtagcaagagaataccaggtcaaattgcaggccgctctggaaatgctcaggcagaaacagcaggaggccgaggagctcgaagctgatatccgcgaggagaaagccagttggaaaactcagatacagtacgataaaaccaacgttctcgccgactttgaacaactccgcgacattcttgactgggaagaatccaatgaactgcagaacctggagaaggaagaagaggactag

SEQ ID NO: 291845 - DNA, 219 bp, Artificial Sequence
  derived and/or modified sequence
atggctagcggaatcctagttaatgtcaaggaggaggtaacatgccctatctgcctggaacttctaacacagcctctgagccttgactgtggacactcattttgccaggcctgtcttaccgccaaccacaagaagtcaatgctggataaaggggaatcatcctgtcccgtttgtaggatctcctaccagccagaaaacatccggcctaaccgacactag

SEQ ID NO: 291846 - DNA, 630 bp, Artificial Sequence
  derived and/or modified sequence
atggccagcggcatcctggtgaatgtgaaggaggaggtgacctgccccatctgcctggagctgctgacccagcccctgagcctggactgtggccacagcttctgccaggcctgcctgacagccaaccacaagaagtccatgctggacaagggggagagcagctgccctgtgtgccgcatctcctaccagcctgagaacatccggcccaacagacatgtggccaacatcgtggagaagctgcgggaggtgaagctgagccctgagggccagaaggtggaccactgtgcccggcacggggagaagctgctgctcttctgccaggaggatggcaaggtgatctgctggctgtgtgagaggagccaggagcaccggggccaccacaccttcctgacagaggaggtggcccgggagtaccaggtgaagctgcaggccgccctggagatgctgcggcagaagcagcaggaggccgaggagctggaggccgacatccgggaggagaaggcctcctggaagacccagatccagtatgacaagaccaacgtgctggccgactttgagcagctgcgggacatcctggactgggaggagagcaatgagctgcagaacctggagaaggaggaggaggactag

SEQ ID NO: 291847 - DNA, 219 bp, Artificial Sequence
  derived and/or modified sequence
atggccagcggcatcctggtgaatgtgaaggaggaggtgacctgccccatctgcctggagctgctgacccagcccctgagcctggactgtggccacagcttctgccaggcctgcctgacagccaaccacaagaagtccatgctggacaagggggagagcagctgccctgtgtgccgcatctcctaccagcctgagaacatccggcccaacagacactag

SEQ ID NO: 291848 - DNA, 630 bp, Artificial Sequence
  derived and/or modified sequence
atggccagcggcatcctggtgaacgtgaaggaggaggtgacctgcccaatatgcctcgaactgttgacgcaacccctgagcctcgattgcgggcattctttctgccaggcctgcctaaccgccaaccataagaagagcatgttggacaagggcgagagcagctgccccgtatgcaggatttcgtatcagccagaaaatattagacccaacaggcatgtcgcgaacatcgttgagaaattgagggaggtgaagctatctcccgagggccaaaaggtggaccattgcgcaaggcatggggagaagctactgctattttgtcaggaagatggcaaggtaatttgctggttgtgtgagagaagtcaggagcatcgggggcaccataccttccttaccgaggaagtcgctcgggaatatcaggttaagctccaggccgccttagaaatgctccgccagaagcagcaggaagctgaggagctggaggccgacattagagaagaaaaggcatcctggaaaacccagattcagtacgacaagaccaacgtcctggccgactttgaacaacttagggacattttggattgggaagaatcgaacgagcttcagaacctagagaaggaagaagaggactag

SEQ ID NO: 291849 - DNA, 219 bp, Artificial Sequence
  derived and/or modified sequence
atggccagcggcatcctggtgaacgtgaaggaggaggtgacctgccccatctgtcttgagctgttaacccagccacttagccttgattgtggccatagcttttgccaggcctgcctgaccgccaaccacaaaaagtcaatgctcgacaagggagagtcgtcttgtcctgtgtgcagaatatcctaccagccagagaacattagacctaaccgacactag

SEQ ID NO: 291850 - DNA, 630 bp, Artificial Sequence
  derived and/or modified sequence
atggccagtggaattcttgtgaatgtcaaagaggaagttacctgtccaatttgtctcgagctgctaacccagccgctgtcccttgactgtggacattccttctgccaggcatgccttactgcaaatcacaagaagtctatgctggacaagggagaaagctcctgcccagtatgcaggatttcctaccaacccgagaatataaggcccaatcggcatgtggccaacatcgtggagaagctgagagaagtaaagctgagcccggagggccaaaaggtcgatcattgcgccagacacggggagaagctcctgctgttttgccaggaagatggcaaggtaatctgttggctgtgtgagagatcacaggagcatcggggtcaccatacctttttgactgaggaggttgccagggaataccaagtgaagctgcaggcagcgctcgagatgctgcggcagaagcagcaggaggctgaggaacttgaagcagacattcgggaagaaaaggccagttggaaaacacagatccaatacgacaaaactaatgttttagccgactttgagcagttgcgcgacatcttggactgggaagagtctaatgaattgcagaacttggagaaagaggaggaagactag

SEQ ID NO: 291851 - DNA, 219 bp, Artificial Sequence
  derived and/or modified sequence
atggctagcggaatactcgtgaacgtaaaggaggaggttacctgtcctatctgtttggagctattgacccagcccctgtctctcgattgcggacattccttctgtcaagcatgcctgacagcgaaccacaaaaagtcgatgctcgataaaggggagagctcatgtcccgtctgtcgcatctcctatcaacccgagaacatcaggcccaaccgtcactag

SEQ ID NO: 291852 - DNA, 1054 bp, Artificial Sequence
  derived and/or modified sequence
tccgttctgctggaacacaaacgcgcttctcagtttctctggaggaacttggttggcgaagagcttggcgcttcttgtaaaccttgtcccgctggacaaagacttgtgaaggaacacggagtgccaccaggactccgtggccctccccgcctctctctcctttttcccttcatggcggtgaagctgtggacgcttctcttcaggaggtgagctccagatgagacgccacatcccagcggagtcccggaagggtcaccccgcaggtctaaggcccgcctgttctgtgccgtgacctgtgctaccgaagtcatctgttgctgtagggaggccagggactcagccgatgcctcaatggccaactgcagggatctgtgaacaagaggaacctcagcagccaggacaggcaggagcagtggaatagctactatggcttctggaatcctggttaatgtaaaggaggaggtgacctgccccatctgcctggaactcctgacacaacccctgagcctggactgcggccacagcttctgccaagcatgcctcactgcaaaccacaagaagtccatgctagacaaaggagagagtagctgccctgtgtgccggatcagttaccagcctgagaacatacggcctaatcggcatgtagccaacatagtggagaagctcagggaggtcaagttgagcccagaggggcagaaagttgatcattgtgcacgccatggagagaaacttctactcttctgtcaggaggacgggaaggtcatttgctggctttgtgagcggtctcaggagcaccgtggtcaccacacgttcctcacagaggaggttgcccgggagtaccaagtgaagctccaggcagctctggagatgctgaggcagaagcagcaggaagctgaagagttagaagctgacatcagagaagagaaagcttcctggaagactcaaatacagtatgacaaaaccaacgtcttggcagattttgagcaactgagagacatcctggactgggaggagagcaatgagctgcaaaacctggagaaggaggaggaagaca

SEQ ID NO: 291853 - DNA, 607 bp, Artificial Sequence
  derived and/or modified sequence
cctttgtgcagatcaggcccgtggattggtgagtgaatcctaaccacgtcttccctggcctgtcttcactcttctccccagaatcaccacttctgcactggtgtctgaaggtgtattgagtgattttgtggagggcagaagtaggaagtctttgggacaaaactgtatttaccttgaatgaagccgcggacgcttgcagtgagtgttacagttcttaaaggcggcatgtccggagtttcttccttctgatgttcggatgtgttcagagtttcttctttctggtgggttcgtggtctcgctggctcaggagggaagctgcagaccttcgcgggatctgtgaacaagaggaacctcagcagccaggacaggcaggagcagtggaatagctactatggcttctggaatcctggttaatgtaaaggaggaggtgacctgccccatctgcctggaactcctgacacaacccctgagcctggactgcggccacagcttctgccaagcatgcctcactgcaaaccacaagaagtccatgctagacaaaggagagagtagctgccctgtgtgccggatcagttaccagcctgagaacatacggcctaatcggcat

SEQ ID NO: 291854 - protein, 2419 aa, Artificial Sequence
  derived and/or modified sequence
MAIDLYCGLACLWGIHEPRQIYTDWANHYLAKSGHKRLIRDLQQDVTDGVLLAQIIQVVANEKIEDINGCPKNRSQMIENIDACLNFLAAKGINIQGLSAEEIRNGNLKAILGLFFSLSRYKQQQQQPQKQHLSSPLPPAVSQVAGAPSQCQAGTPQQQVPVTPQAPCQPHQPAPHQQSKAQAEMQSSASSKDSSQSKIIRFTLGQKKISRLPGPTARVSAAGSEAKTRGGSTTANNRRSQSFNNYDKSKPVTSPPPPPSSHEKEPLASSASSHPGMSDNAPASLESGSSSTPTNCSTSSAIPQPGAATKPWRSKSLSVKHSATVSMLSVKPPGPEAPRPTPEAMKPAPNNQKSMLEKLKLFNSKGGSKAGEGPGSRDTSCERLETLPSFEESEELEAASRMLTTVGPASSSPKIALKGIAQRTFSRALTNKKSSLKGNEKEKEKQQREKDKEKSKDLAKRASVTERLDLKEEPKEDPSGAAVPEMPKKSSKIASFIPKGGKLNSAKKEPMAPSHSGIPKPGMKSMPGKSPSAPAPSKEGERSRSGKLSSGLPQQKPQLDGRHSSSSSSLASSEGKGPGGTTLNHSISSQTVSGSVGTTQTTGSNTVSVQLPQPQQQYNHPNTATVAPFLYRSQTDTEGNVTAESSSTGVSVEPSHFTKTGQPALEELTGEDPEARRLRTVKNIADLRQNLEETMSSLRGTQVTHSTLETTFDTNVTTEMSGRSILSLTGRPTPLSWRLGQSSPRLQAGDAPSMGNGYPPRANASRFINTESGRYVYSAPLRRQLASRGSSVCHVDVSDKAGDEMDLEGISMDAPGYMSDGDVLSKNIRTDDITSGYMTDGGLGLYTRRLNRLPDGMAVVRETLQRNTSLGLGDADSWDDSSSVSSGISDTIDNLSTDDINTSSSISSYANTPASSRKNLDVQTDAEKHSQVERNSLWSGDDVKKSDGGSDSGIKMEPGSKWRRNPSDVSDESDKSTSGKKNPVISQTGSWRRGMTAQVGITMPRTKPSAPAGALKTPGTGKTDDAKVSEKGRLSPKASQVKRSPSDAGRSSGDESKKPLPSSSRTPTANANSFGFKKQSGSAAGLAMITASGVTVTSRSATLGKIPKSSALVSRSAGRKSSMDGAQNQDDGYLALSSRTNLQYRSLPRPSKSNSRNGAGNRSSTSSIDSNISSKSAGLPVPKLREPSKTALGSSLPGLVNQTDKEKGISSDNESVASCNSVKVNPAAQPVSSPAQTSLQPGAKYPDVASPTLRRLFGGKPTKQVPIATAENMKNSVVISNPHATMTQQGNLDSPSGSGVLSSGSSSPLYSKNVDLNQSPLASSPSSAHSAPSNSLTWGTNASSSSAVSKDGLGFQSVSSLHTSCESIDISLSSGGVPSHNSSTGLIASSKDDSLTPFVRTNSVKTTLSESPLSSPAASPKFCRSTLPRKQDSDPHLDRNTLPKKGLRYTPTSQLRTQEDAKEWLRSHSAGGLQDTAANSPFSSGSSVTSPSGTRFNFSQLASPTTVTQMSLSNPTMLRTHSLSNADGQYDPYTDSRFRNSSMSLDEKSRTMSRSGSFRDGFEEESWEKSSVDNFVSRLHSSLHFSLPLFHHARYELVHGSSLSLVSSTSSVYSTPEEKCQSEIRKLRRELDASQEKVSALTTQLTANAHLVAAFEQSLGNMTIRLQSLTMTAEQKDSELNELRKTIELLKKQNAAAQAAINGVINTPELNCKGNGTAQSADLRIRRQHSSDSVSSINSATSHSSVGSNIESDSKKKKRKNWVNELRSSFKQAFGKKKSPKSASSHSDIEEMTDSSLPSSPKLPHNGSTGSTPLLRNSHSNSLISECMDSEAETVMQLRNELRDKEMKLTDIRLEALSSAHQLDQLREAMNRMQSEIEKLKAENDRLKSESQGSGCSRAPSQVSISASPRQSMGLSQHSLNLTESTSLDMLLDDTGECSARKEGGRHVKIVVSFQEEMKWKEDSRPHLFLIGCIGVSGKTKWDVLDGVVRRLFKEYIIHVDPVSQLGLNSDSVLGYSIGEIKRSNTSETPELLPCGYLVGENTTISVTVKGLAENSLDSLVFESLIPKPILQRYVSLLIEHRRIILSGPSGTGKTYLANRLSEYIVLREGRELTDGVIATFNVDHKSSKELRQYLSNLADQCNSENNAVDMPLVIILDNLHHVSSLGEIFNGLLNCKYHKCPYIIGTMNQATSSTPNLQLHHNFRWVLCANHTEPVKGFLGRFLRRKLMETEISGRVRNMELVKIIDWIPKVWHHLNRFLEAHSSSDVTIGPRLFLSCPIDVDGSRVWFTDLWNYSIIPYLLEAVREGLQLYGRRAPWEDPAKWVMDTYPWAASPQQHEWPPLLQLRPEDVGFDGYSMPREGSTSKQMPPSDAEGDPLMNMLMRLQEAANYSSPQSYDSDSNSNSHHDDILDSSLESTL

SEQ ID NO: 291855 - DNA, 7254 bp, Artificial Sequence
  derived and/or modified sequence
atgtctgtgatgctctggcggtgggaacagaataatactactatgaagctgcagatttatacagactgggccaaccattatctggcaaagtctggccataagagactgatcagggatcttcagcaggatgtgaccgacggcgtgctcctagctcagatcatccaggtggtggccaatgagaagatagaagacattaacgggtgtcccaagaacaggtcacaaatgattgagaacatagacgcttgcctgaattttctggctgccaaagggatcaacatccagggcctgtcggcagaggagatccgcaatgggaacctcaaggcaatcctggggctctttttctcgctgtcccgctacaagcaacaacagcagcaacctcaaaagcaacacctttcatctcctcttccaccggccgttagccaggtcgccggagccccatcccagtgtcaggcaggcacgccacaacaacaggtgcccgtgacacctcaggccccttgtcagccccaccaaccggcaccccatcaacagtctaaagcacaggcggagatgcagtctagcgcctcttcaaaagactcttcacaaagcaaaataattaggtttactctcggacaaaagaaaatttctcgactacccggccctactgcaagggtttctgccgccggatcagaagccaagacccggggaggctccacaaccgccaacaatcgcagatcacaatccttcaacaactacgacaaaagtaagcctgtaacctctccaccgccacctccctccagccacgaaaaggaaccacttgcttcgtccgctagctcccaccctggtatgtcggacaacgcacccgccagcctcgagagcggtagtagcagcactcccacaaactgttccacgagttctgccatacctcagcctggagcagcaaccaaaccttggcgctctaagtctttatcagtgaagcactctgcaacggtttctatgctgagtgtgaagccccccggccctgaggctccccggccgacccctgaggccatgaagcccgcccctaataaccagaagagtatgctggagaaactgaaactgttcaactcgaagggcggttcaaaggcaggagaaggacctggttcgcgtgatactagctgtgaaagactggagaccctcccatcgttcgaagagtctgaagagcttgaggctgctagcaggatgttgactacggtaggtcccgccagtagcagccccaaaattgctctaaaggggatagctcagaggacattctcccgcgcacttacgaataagaagagttcattgaagggaaacgaaaaagagaaggaaaaacaacagagggaaaaggacaaggagaaaagcaaagacctcgccaagcgcgctagcgtaacggagaggctcgatctaaaggaagagcctaaggaggatccctccggcgctgcagtaccggagatgccgaaaaagagttctaaaatagccagcttcatccccaaaggtggaaaactgaatagcgctaagaaggagccgatggctccgtcacactccggcattcctaagccaggtatgaaatccatgccagggaaatctcccagtgcgccagccccaagcaaggagggcgagcggtctaggtctggcaaactgtcatccgggctcccccagcagaagccacaactcgacgggagacactcctcctcctcatcaagcctagcatcctctgagggcaagggcccgggcggcaccaccctgaaccatagcatcagcagtcagaccgtgtccggatcagtgggcacaacgcaaacaactggtagcaataccgtgagtgtgcaactgccacagccccagcaacagtataaccaccccaacactgcaacagtggcccccttcctctatagatcccagactgacacagaggggaatgttactgctgagtcatcctccactggagtgtccgtggagcccagtcacttcactaaaacaggacagccagcactggaagaacttactggagaagatcccgaagcccggaggctcaggacagtcaagaatattgcagatctcaggcagaacctcgaggaaaccatgtcctcgctgaggggcacgcaagtcacccactctacgctggaaacaacgttcgacacaaacgttacaacagaaatgtcagggcgatctatcctctcgttaaccggtcggcctacacccttgtcctggcgattaggccagagtagccctaggctgcaggccggtgacgctcccagcatggggaacggctatccgcctcgagccaatgcttcacgatttatcaacaccgaatctggcagatatgtgtactcagcccctctccgcaggcaattggctagccggggttctagcgtgtgccacgtcgacgtcagcgacaaggcgggcgacgagatggacttggaaggtatctcaatggatgcgcccggatatatgtcggatggagatgtgctgtccaagaatatcaggaccgacgatatcacgagcgggtacatgacagacggaggactggggctatatacgcggcgccttaatagattgccggatgggatggcagtggtgagagaaacgctccagaggaacacatctctgggactgggcgacgcagactcttgggacgattccagctcagtatccagcggaatctccgacacaattgacaatttatccacagacgacattaacaccagttcatcaatctctagctacgctaatacaccggcctcttcgcgaaaaaatctggatgtgcagacagacgcagaaaagcatagtcaagttgagcggaactccttgtggtcgggggatgacgtaaagaagtctgacggcggaagtgactctggcatcaagatggaacccggaagtaagtggagacgaaacccaagcgatgtgtctgatgaatctgataagagtactagcggtaaaaagaatcccgttatttcccagacgggttcctggcggcgggggatgacagctcaggtgggcatcacaatgccccggaccaagcctagcgctcccgccggagcacttaagacacccggcacaggaaagacagatgacgccaaggttagcgagaaggggcgcttgtcccctaaagcctctcaggtgaagcggtctccatccgatgctgggcgatcctccggtgacgagagcaagaagcccctaccgtccagtagcaggacccccactgccaacgcgaattccttcggcttcaaaaagcaaagcggctcggccgctggcctcgccatgatcaccgcgagcggtgtgactgtaacatctagatctgcgacgctgggaaaaatccctaaatcctccgcccttgtgtcccggagcgcaggacgtaaaagctcaatggatggggcacagaatcaggatgatgggtatcttgctctgtctagcaggacaaatctgcagtaccgcagccttcccagacctagtaaaagcaacagcaggaatggagcgggaaacagatctagtacatcgtccatagattcaaacatatcaagcaagagtgctggactacctgtaccaaagctgagggagccatctaagacagcactggggtctagcttgcctgggctggtcaaccaaacagacaaagaaaaaggaatttccagcgacaatgagtcggtcgcatcatgcaattctgtaaaggtcaaccccgccgcccaaccagtgagctctccagcccaaacgagcttacagccaggggcgaagtaccccgacgttgcttccccaacgctgcggcggctgttcggaggtaagcccacgaagcaggtccctatcgcaaccgcagagaatatgaaaaactcagtcgtcatctcgaacccacacgcaaccatgacacaacagggaaatctggattctccctcagggtctggagttttgtcatctggatccagctcacccctctattctaaaaatgtcgaccttaatcagtcgcctctcgcatcatcacctagctctgcccactctgccccgagcaattcactcacctgggggactaacgcctcaagcagttcagccgtttccaaagatgggcttgggtttcaaagcgtgtccagccttcataccagttgtgagtcaattgacataagtctgtcatctggcggcgtcccttcccataactcctccactggcttaattgccagcagcaaggatgacagtctgactcctttcgtcaggacaaatagtgtgaaaacaaccctgtccgagtcacccctgagcagtcctgcagcctcacccaagttctgccggtccacgctgcctcgaaagcaggactccgatccccatctcgaccgcaatacactgccaaaaaagggattgcgctacacaccaacctcgcagctgaggacccaagaggatgccaaagaatggctgagaagtcattcagcgggggggctccaggacacagccgcaaatagccctttttcaagtgggagttccgtcactagcccctctgggacaaggtttaattttagccagctcgcctcccccactacggtgacacagatgagcctttctaacccaacaatgcttcggacacatagcttatctaatgctgacgggcagtacgacccgtacaccgacagccggtttagaaattcttccatgagcttagacgagaaaagccgcacgatgtcccgatccggatccttccgggacggatttgaagaggagtcctgggagaaatcctccgtggacaacttcgtgtctcgcctgcactcctcactgcacttctctctgcctctgttccaccatgcaagatacgaattggtacatgggagttcactctcactggtgtcaagcacttctagtgtgtatagcacgccagaggagaaatgtcagtctgaaattcgcaagctgcgaagagagttagacgcaagccaggaaaaggtttctgccctgacaactcagcttaccgccaatgcccacctcgtagcagcatttgagcagtccttaggcaacatgactatcagactccagagtcttaccatgaccgccgaacagaaggactctgagctgaacgaacttaggaaaaccatcgagttattgaagaaacagaatgctgctgctcaagctgctatcaatggcgtaattaatacacctgagcttaattgtaagggaaacgggaccgcccagtccgctgacctgcgtatccgcaggcaacattcctccgattccgtgtcctccataaactcggcaacatcacacagcagcgtaggctctaacattgagtctgactctaagaagaaaaaacgcaaaaactgggtgaacgagttacggtcctcatttaagcaagcgtttggaaaaaagaaatccccaaaaagcgcttcatcccactccgacattgaagaaatgacggattcctccctgccatcaagccctaagcttcctcacaatggtagtacaggctctactcctctgctacgcaatagccactccaacagcctgatatccgagtgcatggacagtgaagccgagaccgttatgcagttgaggaacgaactgcgcgacaaggagatgaagctgactgatatcaggctggaagcactatcctccgcccaccagctggatcaactcagggaggcaatgaacagaatgcagagtgagatcgaaaagctgaaagcggaaaatgaccggctcaagtccgagagccaagggtccggctgcagtagagcccccagccaggtttccattagcgcttcgccacgacagagcatggggctgtcacaacattcattaaacctgacggagtctaccagcctggatatgctgctcgacgataccggagaatgctcggcccggaaagaaggcgggcggcatgtcaaaatagtcgtcagcttccaggaagagatgaagtggaaagaggattcccgcccacacctattccttatcggatgtataggagtctccggcaagaccaagtgggatgtactcgacggggtggtgcggcgactttttaaagagtatattatccacgtggatcccgtgtctcaactgggactgaactcagattctgtacttggctattcaattggagagataaagaggtccaatacctccgaaacaccagagctccttccctgtgggtatctcgtgggtgaaaatactacaattagtgttacagtgaagggcctggcagaaaattccctcgattccctggtcttcgagtctctgattcccaagcccattcttcagagatacgtgagtctgctcattgagcacagaaggatcattctgagtggcccctcagggactggaaaaacctacctggctaaccggcttagcgaatatatcgtcctacgggaaggacgggagcttacagacggggtcatagctaccttcaacgtggaccacaagtccagcaaagaacttaggcagtacctgtcaaacctagctgatcagtgcaactcagaaaacaatgccgtcgatatgcctttagtgataatcttagataatctacatcatgtgtcatcactcggcgaaatttttaatgggttactcaactgcaagtaccataagtgtccatacatcattggcacaatgaaccaagccaccagtagcacccctaacctgcagttgcatcataactttcgttgggtcctttgcgcgaaccacactgagcctgtgaaagggtttctggggaggttcctgaggaggaagctgatggagaccgaaattagcggccgggtgagaaacatggagcttgtcaaaataattgactggatcccaaaggtatggcaccatctcaatcgtttcctagaggcccactccagcagtgacgtcacaatcggaccacggctgttcctgtcctgcccgattgacgtggacgggagcagagtctggtttacagacctgtggaattatagcataatcccatatttattggaagcagtacgcgaagggctgcagctttacggtagacgggccccttgggaagatccagctaagtgggtgatggacacctacccctgggcagcctctcctcagcagcacgaatggcctccacttctccagctcaggccagaggatgtgggctttgatggctactccatgccccgggaggggtccacttcaaagcagatgcctccctccgatgcagaaggagatcctctgatgaacatgctgatgaggctgcaggaggcagcaaactactcatctccacaatcatatgatagtgattctaactcgaacagtcatcacgacgatatcctagactcttctttggagagcaccttgtag

SEQ ID NO: 291856 - DNA, 7254 bp, Artificial Sequence
  derived and/or modified sequence
atgtctgtgatgctgtggcgctgggagcagaacaacaccaccatgaagctgcagatctacacagactgggccaaccactacctggccaagagcggccacaagaggctcatccgggacctgcagcaggatgtgacagatggagtgctgctggcccagatcatccaggtggtggccaatgagaagattgaggacatcaatggctgccccaagaacagaagccagatgattgaaaatattgatgcctgcctgaacttcctggccgccaagggcatcaacatccagggcctgtctgctgaggagatcagaaatggaaacctgaaggccatcctgggcctcttcttcagcctgagccgctacaagcagcagcagcagcagccccagaagcagcacctgagcagccccctgcccccagctgtgtcccaggtggccggggcccccagccagtgccaggccggcaccccccagcagcaggtgcctgtgaccccccaggccccctgccagccccaccagcctgccccccaccagcagagcaaggcccaggccgagatgcagagcagcgccagcagcaaggacagcagccagagcaagatcatccgcttcaccctgggccagaagaagatcagccggctgcccggccccacagcccgggtgtctgctgctggcagcgaggccaagacccggggcggcagcaccacagccaacaacagaagaagccagagcttcaacaactatgacaagagcaagcctgtgaccagccccccacctccacccagcagccatgagaaggagcccctggccagcagcgccagcagccaccctggcatgtctgacaatgccccagccagcctggagagcggcagcagcagcacccccaccaactgcagcaccagcagcgccatcccccagcctggagctgccaccaagccctggaggagcaagagcctgtctgtgaagcacagcgccaccgtgtccatgctgtctgtgaagcccccaggccctgaggccccccggcccaccccagaggccatgaagccagcccccaacaaccagaagtccatgctggagaagctgaagctgttcaacagcaaaggaggcagcaaggccggggagggccctggcagccgggacaccagctgtgagcggctggagaccctgcccagctttgaggagagcgaggagctggaggccgccagcaggatgctgaccaccgtgggccctgccagcagcagccccaagatcgccctgaagggcatcgcccagaggaccttcagccgggccctgaccaacaagaagagcagcctgaagggaaatgagaaggagaaggagaagcagcagcgggagaaggacaaggagaagagcaaggacctggccaagagggcctctgtgacagagcggctggacctgaaggaggagcccaaggaggaccccagcggggctgctgtgcctgagatgcccaagaagagcagcaagatcgccagcttcatccccaagggcggcaagctgaacagcgccaagaaggagcccatggcccccagccacagcggcatccccaagccaggcatgaagtccatgcctgggaagagccccagcgccccagcccccagcaaggagggggagaggagccgcagcggcaagctgagcagcggcctgccccagcagaagccccagctggatggccgccacagcagcagcagcagcagcctggccagcagcgagggcaagggccctgggggcaccaccctgaaccacagcatcagcagccagacagtgtctggctctgtgggcaccacccagaccaccggcagcaacacagtgtctgtgcagctgccccagccccagcagcagtacaaccaccccaacacagccaccgtggcccccttcctgtaccgcagccagacagacacagagggcaatgtgacagctgagagcagcagcactggagtgtctgtggagcccagccacttcaccaagacaggccagcctgccctggaggagctgactggagaagatcctgaggcccggcggctgaggacagtgaagaacattgctgacctgcggcagaacctggaggagaccatgagcagcctgcggggcacccaggtgacccacagcaccctggagaccacctttgacaccaacgtgaccacagagatgagcggccgcagcatcctgagcctgaccggccggcccacccccctgtcctggaggctgggccagagcagcccccggctgcaggccggagatgcccccagcatgggaaatggctacccaccccgggccaatgccagccgcttcatcaacacagagagcggccgctacgtgtacagcgcccccctgcggcggcagctggccagccggggcagctctgtgtgccacgtggatgtgtctgacaaggctggagatgagatggacctggagggcatctccatggatgcccctggctacatgtctgatggagatgtgctgagcaagaacatcagaacagatgacatcaccagcggctacatgacagatggcggcctgggcctgtacacccggcggctgaaccggctgcctgatggcatggctgtggtgcgggagaccctgcagaggaacaccagcctgggcctgggagatgctgacagctgggatgacagcagctctgtgagcagcggcatcagtgacaccatcgacaacctgagcacagatgacatcaacaccagcagcagcatcagcagctatgccaacaccccagccagcagcaggaagaacctggatgtgcagacagatgctgagaagcacagccaggtggagaggaacagcctgtggagcggagatgatgtgaagaagagtgatggcggcagtgacagcggcatcaagatggagcccggcagcaagtggaggaggaaccccagtgatgtgtctgatgaaagtgacaagagcaccagcggcaagaagaaccctgtgatcagccagacaggctcctggaggcggggcatgacagcccaggtgggcatcaccatgcccaggaccaagcccagcgccccagctggggccctgaagaccccaggcaccgggaagacagatgatgccaaggtgtctgagaagggccgcctgagccccaaggccagccaggtgaagaggagccccagtgatgctggccgcagcagtggagatgagagcaagaagcccctgcccagcagcagcaggacccccacagccaatgccaacagctttggcttcaagaagcagagcggcagcgctgctggcctggccatgatcacagccagcggcgtgacagtgaccagccgcagcgccaccctgggcaagatccccaagagcagcgccctggtgagccgctctgctggcaggaagagctccatggatggagcccagaaccaggatgatggctacctggccctgagcagcaggaccaacctgcagtaccgcagcctgccccggcccagcaagagcaacagcagaaatggagctggcaacagaagcagcaccagcagcattgacagcaacatcagcagcaagtctgctggcctgcctgtgcccaagctgcgggagcccagcaagacagccctgggcagcagcctgcccggcctggtgaaccagacagacaaggagaagggcatcagcagtgacaatgaatctgtggccagctgcaacagcgtgaaggtgaacccagctgcccagcctgtgagcagccctgcccagaccagcctgcagcccggggccaagtacccagatgtggccagccccaccctgcggcggctgtttggaggcaagcccaccaagcaggtgcccatcgccacagctgagaacatgaagaacagcgtggtgatcagcaacccccacgccaccatgacccagcagggcaacctggacagccccagcggcagcggcgtgctgagcagcggcagcagcagccccctgtacagcaagaatgtggacctgaaccagagccccctggccagcagccccagcagcgcccacagcgcccccagcaacagcctgacctggggcaccaatgccagcagcagcagcgctgtgtccaaggatggcctgggcttccagagcgtgagcagcctgcacaccagctgtgagagcattgacatcagcctgagcagcggcggcgtgcccagccacaacagcagcacaggcctgattgccagcagcaaggatgacagcctgaccccatttgtgaggaccaacagcgtgaagaccaccctgtctgagagccccctgagcagccctgctgccagccccaagttctgccgcagcaccctgcccaggaagcaggacagcgacccccacctggacaggaacaccctgcccaagaagggcctgcgctacacccccaccagccagctgcggacccaggaggatgccaaggagtggctgcggagccacagcgctgggggcctgcaggacacagctgccaacagccccttcagcagcggcagctctgtgaccagccccagcggcacccgcttcaacttcagccagctggccagccccaccaccgtgacccagatgagcctgagcaaccccaccatgctgcggacccacagcctgagcaatgctgatggccagtatgacccctacacagacagccgcttcaggaacagctccatgagcctggatgagaagagcaggaccatgagccgcagcggcagcttcagagatggctttgaggaggagagctgggagaagagctctgtggacaactttgtgtcccggctgcacagcagcctgcacttcagcctgcccctcttccaccacgcccgctatgagctggtgcacggcagcagcctgagcctggtgagcagcaccagctctgtgtacagcaccccagaggagaagtgccagagcgagatcaggaagctgcggcgggagctggatgccagccaggagaaggtgtctgccctgaccacccagctgacagccaatgcccacctggtggccgcctttgagcagagcctgggcaacatgaccatccggctgcagagcctgaccatgacagctgagcagaaggacagcgagctgaatgagctgaggaagaccatcgagctgctgaagaagcagaatgctgctgcccaggccgccatcaacggggtcatcaacaccccagagctgaactgcaagggaaatggaacagcccagagcgctgacctgcgcatccggcggcagcacagcagtgacagcgtgagcagcatcaacagcgccaccagccacagctctgtgggcagcaacatcgagagtgacagcaagaagaagaagaggaagaactgggtgaatgagctgcggagcagcttcaagcaggccttcggcaagaagaagagccccaagagcgccagcagccacagcgacatcgaggagatgacagacagcagcctgcccagcagccccaagctgccccacaacggcagcacaggcagcacccccctgctgaggaacagccacagcaacagcctcatcagcgagtgcatggacagcgaggccgagaccgtgatgcagctgagaaatgagctgcgggacaaggagatgaagctgacagacatccggctggaggccctgagcagcgcccaccagctggaccagctgcgggaggccatgaacaggatgcagagcgagattgagaagctgaaggcagaaaatgaccggctgaagtctgagagccagggcagcggctgcagccgggcccccagccaggtgtccatcagcgccagcccccggcagagcatgggcctgagccagcacagcctgaacctgacagagagcaccagcctggacatgctgctggatgacacaggagaatgttctgccaggaaggagggcggcagacatgtgaagatcgtggtgtccttccaggaggagatgaagtggaaggaggacagccggccccacctgttcctgattggctgcatcggcgtgtctgggaagaccaagtgggatgtgctggatggagtggtgcggcggctcttcaaggagtacatcatccacgtggaccctgtgtcccagctgggcctgaacagcgacagcgtgctgggctacagcatcggggagatcaagaggagcaacaccagcgagaccccagagctgctgccctgtggctacctggtgggggagaacaccaccatctctgtgacagtgaagggcctggccgagaacagcctggacagcctggtgtttgagagcctcatccccaagcccatcctgcagcgctacgtgtccctgctgattgagcaccggcgcatcatcctgagcggccccagcggcaccgggaagacctacctggccaaccggctgtctgagtacatcgtgctgcgggagggccgggagctgacagatggagtcatcgccaccttcaacgtggaccacaagagcagcaaggagctgcggcagtacctgagcaacctggccgaccagtgcaacagtgaaaataatgctgtggacatgcccctggtgatcatcctggacaacctgcaccacgtgagcagcctgggggagatcttcaacggcctgctgaactgcaagtaccacaagtgcccctacatcatcggcaccatgaaccaggccaccagcagcacccccaacctgcagctgcaccacaacttccgctgggtgctgtgtgccaaccacacagagcctgtgaagggcttcctgggccgcttcctgcggaggaagctgatggagacagagatcagcggccgggtgaggaacatggagctggtgaagatcatcgactggatccccaaggtgtggcaccacctgaaccgcttcctggaggcccacagcagcagtgatgtgaccatcggccccaggctcttcctgagctgccccattgatgtggatggcagccgggtgtggttcacagacctgtggaactacagcatcatcccctacctgctggaggccgtgcgggagggcctgcagctgtatggccggcgggccccctgggaggaccctgccaagtgggtgatggacacctacccctgggccgccagcccccagcagcacgagtggccacccctgctgcagctgcggccagaagatgtgggctttgatggctacagcatgccccgggagggcagcaccagcaagcagatgcccccatctgatgctgagggggaccccctgatgaacatgctgatgaggctgcaggaggccgccaactacagcagcccccagagctatgacagcgacagcaacagcaacagccaccatgatgacatcctggacagcagcctggagagcaccctgtag

SEQ ID NO: 291857 - DNA, 7254 bp, Artificial Sequence
  derived and/or modified sequence
atgagcgtgatgctgtggcggtgggagcagaacaacaccaccatgaagctccaaatctacactgactgggcaaatcactacttggccaaaagtggccacaaacggttgattcgggatttgcagcaggatgtgaccgatggggtgttgcttgctcagatcattcaggttgtcgccaacgaaaagatcgaagacattaatgggtgtcccaaaaacaggtcacagatgatcgagaacattgatgcgtgtctgaatttcctagctgctaagggcataaacattcagggactgtcagcagaagaaatccgcaacggaaatttgaaagccattcttggcttgtttttctcgttaagccggtacaaacaacagcagcagcagccacagaagcagcacctgtcgtctcccttgcctccagccgtgtcacaggtagctggggcgccatctcagtgccaggccggtacccctcagcagcaggttccggtgacaccccaggcaccctgtcagccacatcagcccgcccctcaccagcagtcaaaagcccaagccgaaatgcagagctcagcctcttccaaagattcctctcagtccaagatcatacgtttcactcttgggcagaagaaaatctctcgtcttccaggccctacagccagggtttcagccgccggctcagaggctaaaacacgcgggggttccacaacagctaataaccgcagatcacagtccttcaacaactacgacaaatccaagcctgtcaccagccccccgcctcccccatcttcacacgagaaggagccactggcctcctctgcttcctctcaccctgggatgtccgacaatgcaccagcctcattagagagcgggtcgagcagcactcccacgaattgttcaactagctccgctattccacaaccaggagccgcaacaaaaccctggaggagcaaaagcctgtcagtgaagcatagtgctactgttagcatgctgtcggtcaagccacctgggccagaggcaccacgaccaacccccgaggccatgaagccagcgccaaataatcaaaagtcaatgctggagaaactcaagttgttcaatagcaagggcggctctaaggccggcgaagggcccggatcccgagatacttcttgtgagaggttggaaaccttgccgtccttcgaggaatctgaagaactcgaagccgcttctagaatgctgactactgtcggcccggcctcctcatcacctaaaattgctttgaagggcattgctcaacgcacattttccagggcgctgacaaataaaaagagcagtctcaagggcaacgaaaaggaaaaagagaagcaacagcgagagaaagacaaagagaagagtaaggatttagctaagcgggcctctgtaaccgaacgcttagacttgaaggaagagccgaaggaagatcccagtggcgcagcggtcccagaaatgccaaagaaaagctcaaagatcgcctcttttattccaaaaggcggaaagctgaactccgcaaagaaggagcccatggcaccgtctcacagcggtattccaaaaccggggatgaaatccatgcccggcaagtcccccagcgcccctgccccttctaaggagggtgagcggtcacgctccgggaagctaagctccggcctgcctcaacagaaaccccagctagatggtcggcactctagctccagttccagtttggcaagcagtgagggcaagggcccaggcggcacaacactgaatcatagtataagttctcagacagtgtcaggttccgtcggaaccacacagaccaccgggagcaacacggttagcgttcagctgcctcagcctcaacagcagtacaaccacccaaacaccgcaacagtggcacccttcctctacagatcccagactgatacagagggtaatgtgaccgcagaaagctccagcaccggagtctctgtggaaccaagccacttcacaaagactggtcagccagcacttgaggagctcacaggcgaggaccccgaagcaagaagactccgcaccgtgaaaaatattgccgacctgcgacagaaccttgaagagacgatgtcctctctgaggggcacccaggtgacacacagcactttggaaaccacttttgacacaaacgtgactactgaaatgagcggtaggtctatcctgtctcttacgggccggccaactccattatcttggcgtctaggacagtcaagtcctcgcctccaggccggagacgctccttcaatgggcaatgggtatccaccacgcgcaaacgcctctagatttattaatactgagtcgggaagatacgtgtacagtgcccccctgagaaggcaactcgcatccaggggaagtagtgtctgccatgtggatgtcagcgacaaggccggcgacgagatggatctagaaggcatttccatggatgccccgggttatatgtcagatggcgacgtcctgagtaagaatatcagaacagacgatattactagcggctacatgaccgatgggggtctggggctgtacacacgccgactgaaccggctgcctgatggcatggcagtggtccgcgaaaccctgcagcgcaataccagtttgggacttggggacgccgacagctgggatgattcaagttctgtatcttccgggatctcagacaccattgataatctctctaccgacgatatcaacacatcttcaagcatcagcagctatgccaacacccctgcttcttcaagaaagaaccttgacgtccagactgacgccgagaagcactcccaagtggagcggaattccctctggtccggcgacgacgtcaaaaagtcagacggcggctccgactcagggatcaaaatggagccaggctctaagtggaggaggaacccaagcgacgtgagcgacgaatcagacaaaagcacttctgggaagaagaaccccgtgattagccaaactggttcatggaggcgaggaatgaccgcacaggtaggcatcaccatgcctaggaccaaacccagcgcccccgccggagctttaaagacccccggaacaggcaagaccgacgacgcaaaggtcagcgaaaaaggtaggttatccccaaaggcatcccaggtgaagcgatctccaagcgacgcgggacgctcatccggggacgagagcaaaaagcctctccccagttcatcccgcacccccacagctaatgctaacagtttcggcttcaagaaacaaagcggctcagccgcgggcctggccatgattacagcttcgggggttaccgtgacctccaggtcggccacgctgggaaaaataccaaagagttccgccctcgtctcacgatcagcaggccgtaaaagctctatggacggtgcccagaaccaggatgacggatatctggctctgagcagccgcaccaacctccagtatcgctcactcccccggccttcaaaatccaattcgagaaacggggccggcaaccgttcctccacgtcttcaatcgacagcaacatcagcagcaagagcgccggtctgcctgtccccaaactgagggagccgtcgaaaactgccctcggctcaagtctgccaggcctggtcaatcaaaccgacaaggaaaaagggatcagtagtgacaacgagtcagtggctagctgcaactccgtgaaggtaaaccccgccgctcagcctgtgagttctcccgcccagacctctctgcagccaggggccaaatatccagacgtggcgtccccaaccttgcggaggctcttcggtggaaagcctactaaacaggtgcccatagccacagcagagaacatgaagaatagcgtcgtgatctctaatccacacgcgaccatgacccaacaaggcaacctggactctccttccggatcaggtgtcctttcatccggatcttcatcccccctatattcaaagaatgtggacctgaatcagtctcctcttgccagttcaccctctagtgcccactctgcccctagcaatagtttgacctggggaaccaatgcttcgagctcatccgccgtctctaaagatgggttggggttccagtctgtgagtagcctgcacaccagctgcgagtctattgatattagtcttagctccggcggagtcccatcacacaattcttcaacaggcctaatcgcttcaagcaaggatgactcgctgaccccattcgtgagaacgaactcagtgaagacaactctatcggagtctcctctgagtagcccggccgcgagtccgaagttttgccgtagtaccttgcctcgcaagcaagacagcgatccccatctggatagaaatacactgccgaagaagggattgcggtacacgcccacatctcagctgcgaacccaagaagacgcgaaagagtggctgcgatcacatagtgctggtggtctacaagatacggccgctaatagcccgttcagctctgggagctccgtaacatctccatctgggactaggttcaacttttcacaattagcctctcctacgaccgtgacacagatgtctctgtccaatcccaccatgcttcgaacccatagcctgtcgaacgcggacgggcagtatgacccttatacagactcccggtttagaaactcctccatgagcctggacgagaagagtcgcactatgtcccgaagcggttcttttagagatggcttcgaggaggagtcttgggaaaagagctctgtagataactttgttagtagactgcatagctcgctgcacttttctctgccattattccatcacgccaggtacgaacttgtgcacggatctagtctatctctggtgtcatctacttcatcagtgtacagcacccccgaagaaaagtgccagagcgagataaggaagctaagacgggagctggatgcctcacaggaaaaagtctcagctctgactacacaactgaccgctaacgcacacctcgtcgccgcattcgaacagtcacttggaaacatgaccatccgtttgcaatccttgaccatgaccgctgaacaaaaagattccgaactgaacgagctcaggaagacaatcgagttgctaaagaagcagaatgccgcagcccaggccgcaatcaacggcgtgatcaatacccctgagcttaattgcaaagggaatggcactgctcaaagcgccgacctgagaatacgccgccaacactccagcgattcggtgtcctctataaatagcgccacgagtcactccagtgtagggtctaacatcgaatcagactcaaagaagaagaaacgtaaaaattgggtgaacgagctcagatccagcttcaagcaggcttttggcaaaaaaaagtcacccaaatccgcttccagccatagtgatatcgaagagatgaccgattcatcgctgcccagctcacccaagctgccacacaatgggagcacgggttccaccccccttctcagaaacagtcactccaattccctaatcagcgagtgtatggattcagaggctgagacagtaatgcaactccgaaatgagttgcgagataaggagatgaagctcactgatattcgcctcgaggcactttctagcgcacatcagctggatcaacttcgggaggctatgaacaggatgcagagtgaaatcgaaaagctgaaggcagagaatgataggctgaagtccgaatctcaagggagcggttgctccagggccccttctcaggtatctattagtgcttcacctagacagtccatgggacttagtcagcattccctgaaccttactgagtctacatctttggatatgctactggacgataccggcgagtgttctgctcgcaaggagggaggccgacatgttaagatagtggtatcttttcaagaggagatgaaatggaaggaggactcgcggccgcaccttttcctgattggctgtatcggggtgtccggcaagacaaagtgggatgtgttagatggagtcgtgagacggctgttcaaagagtacatcatacatgttgacccagtgagccaattgggtttgaacagcgacagcgtcttgggctattctattggtgaaataaagaggtcgaacaccagtgaaacacccgagctccttccatgtggatatctggttggagagaatacaaccatttccgtcacagtgaaaggactggcggagaattcacttgattccctggtgtttgagtcactgatacctaagccgattcttcagcgttacgtgtccttgctgattgagcatcgccgaattattctcagtggcccaagcggaaccggcaagacttacctagctaatcgactatccgaatacatagtgcttagggaggggcgcgagctgacagacggggtcatcgctacctttaacgtcgaccacaagtcctctaaggaattgcggcagtacttgagcaatctcgccgaccagtgtaactctgagaacaatgcagtagacatgccgctggtgatcatccttgataatctgcatcatgtctcaagcctcggggaaattttcaacgggcttctgaactgtaagtatcataaatgtccttatatcatcggtacaatgaaccaagccacgagctctactccaaatctgcagctccatcataactttcggtgggtgctgtgtgctaaccacactgagccagttaaaggcttcctcggtcgcttcttgcggcgcaagctcatggaaacggaaatctccggacgggtacggaacatggaattagtcaaaattatcgactggatccccaaggtgtggcaccacctcaatcggtttttggaagctcatagcagctctgacgtgaccattggcccacggctgttcctcagttgtccgatcgacgtggacggctccagagtttggtttactgatctttggaactactcaattattccttacctccttgaggcggttagggaaggattgcagctttacggtaggcgcgctccttgggaggatccagcaaaatgggtcatggatacatacccctgggccgcgtctccgcagcagcacgaatggccacctctccttcagctgagaccagaagacgttggttttgacggatactcaatgcctagggagggttcaacttcaaaacagatgcctccttcggatgccgagggggaccctctcatgaatatgcttatgcgtctgcaggaagccgccaattacagtagtccccagtcttatgatagcgactccaatagcaactcacaccacgatgacatacttgattcctcgctggagtccacactttag

SEQ ID NO: 291858 - DNA, 10594 bp, Artificial Sequence
  derived and/or modified sequence
atgagcgtgatgctgtggcgctgggaacagaataacaccaccatgaagctgcaaatctacacagactgggccaatcattacctagccaaatccggccacaagcgtctcatcagggatctccagcaagatgtgacagatggcgtcctcctggcccagattatccaggttgtggcaaatgaaaagattgaagacatcaatggctgtccgaagaacagatcccaaatgattgaaaacatagatgcctgcttgaatttcctggcagctaagggaataaacatccaggggctgtctgcagaagagatcaggaatggaaacctcaaggccattctaggcctcttcttcagcctctcccgatacaagcagcagcagcagcagccccagaagcagcacctctcctcacctctgccgcccgccgtatcccaggtggccggggccccctcccagtgccaggctggcacccctcagcagcaggtgccagtcactccccaagccccgtgccagcctcaccagccagcgccacatcagcagtcaaaagcacaagctgaaatgcagtccagtgcatcatccaaggactcatctcaaagcaaaatcatccgcttcactctgggtcagaaaaagatctctagacttccaggtcctaccgcgagggtatccgctgcaggcagcgaggccaaaacacgcggagggtcaactactgctaacaaccgacgcagccagagctttaacaactatgataaatccaaaccagtcacctccccacccccaccgccaagcagccacgagaaagagcctttggcaagttcagcctcctcccaccccggaatgagtgacaatgcacctgcttccttggagagcggcagcagctccacccctactaattgcagtacctcctcggccatcccgcagcccggtgcagccaccaagccttggcgcagcaaatccctcagcgtgaagcacagtgccacggtatccatgctctcggtcaagcctcctgggcctgaggcccccaggcccacacctgaagccatgaagccggcccccaacaatcagaagtccatgctggaaaagctgaaacttttcaacagtaaagggggctcaaaggcaggtgaggggccggggtcccgggacacaagctgtgagcggctggagactctgcccagcttcgaagagagcgaggagctggaggccgccagtcgcatgctcaccaccgtgggccctgcttccagcagccccaagattgcactcaagggcattgcccagaggacttttagccgggcactgaccaacaagaagagttctctgaaaggcaatgagaaagagaaggagaaacaacagcgggagaaggataaggagaaaagcaaggaccttgccaagagagcctctgtgacggagaggctggacctcaaggaggagccaaaagaagaccccagtggagcagctgtgcccgagatgccaaaaaagtcctccaagattgccagcttcatccccaaaggggggaagctcaacagtgccaagaaggagcccatggccccttcccacagtggaataccaaaaccaggaatgaaaagcatgcccgggaaatccccaagtgccccagcgccttccaaggaaggggagcggagccggagtgggaagctgagctcaggactcccccagcagaagccccagctggacggcagacactccagttcctcttccagcctggcgtcctcagaaggaaaaggcccaggagggaccaccctgaaccacagcatcagcagccagactgtcagtgggtctgtcgggaccacccagaccacaggaagcaataccgtcagtgttcagctacctcagccccagcagcaatacaaccatcccaacactgccacggttgcacctttcctgtacaggtctcagacggacactgaagggaatgttactgccgagtcaagctcaacaggtgtgagcgtggagcccagccacttcaccaagactggacagcctgctctggaagaactcactggggaagatcctgaggctcggcggctgcggacagtgaagaacatcgctgatctgcggcagaatttggaggaaaccatgtccagtttaaggggaactcaggttacacacagcacattggaaaccacgtttgacaccaatgtcaccacggagatgagtggccgtagcatactcagcttgacagggaggcccacacctctgtcctggagactgggccagtccagccctcggctccaagcaggagacgccccctcaatgggcaatgggtatccccctcgagccaacgccagcaggttcatcaacactgagtcaggtcgctatgtgtactccgcccctctgagaaggcagctggcctcccggggcagtagtgtctgccatgtggacgtctcagacaaggcaggagatgagatggacctggaaggcatcagcatggatgcccccggctacatgagcgacggggatgttctgagcaagaacatccggaccgatgacattacaagcggatacatgactgatggtggacttggcctctatacccgtcgcctgaaccggctccctgatgggatggctgtggtacgggagaccctgcaacgaaatacctccctgggcctcggagacgctgacagctgggacgacagcagctccgtcagcagcggcatcagcgacaccatagacaacctcagcactgatgacatcaacaccagctcctccatcagctcttatgccaacacacctgcctcctctcgaaaaaacctggatgtgcagactgatgctgagaagcactcacaggtggagaggaattccctgtggtctggtgatgatgtcaagaaatcagacggaggctcagacagcggcataaaaatggagccaggttccaagtggaggcggaatccttctgatgtgtctgacgagtccgacaaaagcacgtcgggcaagaagaatcctgtcatctcccagacaggctcatggcggcgaggcatgacagctcaggtgggcatcaccatgccaaggacgaagccttcagccccggcaggcgcactgaagaccccaggaactggaaaaacagacgacgcaaaggtgtctgagaaaggaaggctttctcctaaagcctcccaggtgaagcgctccccatcagatgcaggccggagcagtggtgacgaatccaaaaagcccctccccagcagctctaggacacctactgccaatgccaacagctttgggttcaagaagcagagtggttccgccgccggcctggccatgatcacagccagcggggtgactgtcaccagcaggtcagccacactgggcaaaatcccaaagtcatctgcactcgtcagtcggtctgctggtcggaagtcaagtatggatggggctcagaatcaggatgacgggtatctagccctaagctcccggacaaaccttcagtaccggagtttgccgaggcccagtaagtccaacagccggaacggggctgggaacaggtctagcaccagcagcatagattccaacattagcagcaagtccgcaggcctgccagtgcccaaactgagggagccttccaaaacagccctaggcagctctctaccaggtctggtcaaccaaacagacaaggagaaaggcatctcatcagacaacgagagtgtggcttcctgtaactcggtgaaagtgaatccggcagcccagcctgtgtccagtccggctcagaccagtctccagcctggagccaagtacccagatgtggcctctcccacactccgcagactctttggtgggaagcctaccaagcaagtgcccatcgccacagctgaaaacatgaaaaattcggtggtcatctccaatcctcatgccaccatgactcagcaaggtaacctagactccccgtcaggcagtggcgtcctgagcagtgggagcagcagtcctctctacagcaagaatgtggacctcaaccagtctccgctagcctccagccccagctcagcccactcggccccttccaacagcctcacctggggcaccaacgccagcagctcctccgcagttagcaaggatggcctgggctttcagtctgtcagcagcctccacaccagctgtgagtccatcgacatctccctcagcagtggaggggtccccagccacaattcttccactggcctcatcgcctcctccaaggacgactccttgactccctttgtcagaactaacagtgtgaagaccacactgtcagaaagccctctctcttcccctgctgctagccctaagttctgcagaagtactctgcccaggaaacaggacagtgacccgcaccttgataggaacactttgcctaagaaaggactcaggtatactcccacctcccagcttcgcacgcaagaagatgcaaaagaatggttacggtcccattctgcaggaggccttcaggacaccgctgccaattcccccttttcctctggctccagcgtgacttctccctccggaacaagattcaacttttcccagcttgcgagtcccaccactgtcacccagatgagcttgtccaacccgaccatgctgaggactcacagcctctccaatgctgatgggcagtatgatccatacactgacagccgcttccggaatagctccatgtccctggatgagaagagcagaaccatgagccgttcaggctcattccgggatgggtttgaagaagaatcatgggagaaaagttctgtggacaactttgtcagccgtcttcacagctcacttcatttctctcttcctttgttccatcacgcaaggtatgagttagttcatggatcctcactctccttggtttccagcacatcgtcagtttattctacaccagaagaaaaatgccagtcagagattcgcaagctgcggcgggaactggatgcctcccaggagaaagtttcagctttgaccacccagctgacagcaaatgctcaccttgtggcagcctttgaacagagtcttggtaacatgacaatcaggctccagagtctgaccatgacagctgagcagaaggactcagaactgaatgagttaagaaaaaccattgagctgctaaagaaacagaacgcagctgcccaggctgccattaatggagtaattaacacacctgagctcaactgcaaaggaaacggcactgcccagtctgcagacctccgcatccgcaggcagcactcctcagacagcgtctccagcatcaacagtgccaccagccactccagcgtgggcagcaacatagagagtgactcaaagaagaagaagcggaagaactgggtcaatgagttacgcagctccttcaagcaagctttcgggaagaagaagtccccaaaatctgcgtcctctcattcagatattgaggagatgacggattcttctttgccttcctcaccaaagttaccgcacaatgggtccacaggttccaccccactgctgaggaattctcactccaactctctaatttcagaatgcatggatagtgaagctgagaccgtcatgcagctccgaaatgagttaagagacaaggagatgaagctgacggatatccgcttagaagctctcagttctgcccaccagctggaccagctccgggaggccatgaacaggatgcagagtgaaatagagaagctgaaagctgagaatgatcggctgaagtcagagtctcaaggcagtggctgcagccgggctccttcccaagtgtccatctctgcctccccgaggcagtccatgggcctctcccagcacagcttgaacctcactgagtcaaccagcctggacatgttgctggatgacactggtgaatgctcggctcggaaggaaggaggcaggcatgttaagatagttgtcagctttcaggaggaaatgaagtggaaggaggattccagaccacatctctttcttattggctgcattggagttagtggcaagacgaagtgggatgtgctcgatggggtggttagacggctgttcaaagaatacatcattcatgtcgacccagtgagtcagctagggctgaattcagacagcgttcttggctacagcattggagaaatcaagcgcagcaacacttccgaaacaccggagctgcttccttgtggctatctggttggagagaacacgaccatctcagtgactgtgaaagggctcgcagaaaacagcctggactcactggtgtttgagtccttgattcccaagcccatcctgcagcgctacgtctccctcctgatagagcaccgtcggatcattctctctggccccagcggcactgggaaaacctacctggccaaccggctgtctgagtatatagtgcttcgagagggacgggagttgacagacggggttatcgccacctttaacgtggaccataagtccagcaaggaattgcgccagtacctgtccaaccttgctgaccagtgcaacagtgagaacaatgctgtggacatgcccctcgtcatcatcctggacaacctacaccacgtgagctctctgggagagatcttcaatgggctgctcaactgcaagtaccacaaatgcccttacataattggcacaatgaaccaggctacctcttcgactcccaacctgcagcttcaccataacttcagatgggtgctttgtgccaaccacacggagcctgtgaagggtttccttggccgattcctgaggaggaagctcatggaaacagagatcagtgggcgggtgcgcaatatggagctggtaaaaatcattgactggattcccaaggtctggcatcacctcaaccgcttcctggaggctcacagttcctcggacgtcaccatcggcccccggctcttcctgtcatgccccatcgatgtggacggctcgagagtgtggttcaccgacttgtggaactattccattatcccctatctcctggaagccgtcagagaaggactccagctctatggaaggcgcgccccctgggaggatcctgccaagtgggtgatggacacatatccatgggcagccagcccacaacagcacgagtggcctcccctgctgcagttacggcctgaggatgtcggcttcgacggctactccatgcctcgggagggatcgacaagcaagcagatgccccccagtgatgctgaaggtgacccgctgatgaacatgctgatgaggctgcaggaggcagccaactactccagcccccagagctatgacagcgactccaacagcaacagccatcacgatgacatcttggactcctctttggagtccactctgtgacaggggcccggagcccagcgccctcctcttctcctcaccgcattccacctgcatcccccacatcaccctgaagatgacttcctgagccagcccccagccacagccttagagctgcgggaacaccgagaccccccgtccttcagcctcgacctgggtgcaggcatcccgggccagctgcctgcggaccgcttccttccacagcgagaactgcactaccttctgttgtactttaattattgttttgccttgttgctgtgacctccctaagacactgaagatacttctcgggaaaggatcatcgccgttgaaatgaaaagagagacagagagaaaaaaaaaaagagaacccacatgaagctctgaaaccaaacagcatcctgccatgagcttcccagagacagaagagactggagcaaagtcggaaacacagagaagcacggcttcccctcagcacagaccctccagactgggtctcagagccgtgccacccaccctcccacacagccggccacagggagaactggtgctaaccagggtgcttgctttggtcacgttcaacgcactacagagctacgacacagggaaaccttaggagcaaataaaccgtgctttcatgttttttaaatggtgctttccttacccgagaggtattttgcctgttccaatcaaaccaccccattcaggtccatcagcctctgattaatatccgtgagagtgagtgacggagtgagagtgtgagcgagtggatgtggctgtcagtgcagaacagcatgtgtctctttccttctgatatatgaatgaatcaggtttttttttttttttttctgcaaacactgtgtatagtgagacttgttctactttggagaacaggttaccttttgaaaatgaggttgagtttcttcctttctgatgcattgatttttgaagatttttttttcccccttcccctcttggtcagaatcaatcctttggtgaaagtaagaaccgcaggagttgagttttggtttggtcctgctcagttttggtttttagttgtccatcctcacagtcctacacactcgcctcctcctgctagggctgggggtatctgtgtcctttaaaatggatgaggacctggtcctcgacatgtgggtgagccatggaccttgccttcccttctcgtccttgagggtttagaacacacaccaacacctccagcgtccccgccccagcttccggtggggtgatgcggtcaccctgcaaaagacttgcactttcctcagaaccaacatgacgcagctcaataagggtgagggtcactccctcccagaagccccgtctggacgagccttgcctgacctcttcggtgctgaccttcccaaagtgatgccttactggttttgtactaactgtgttcattttacataagtgtcgtgcctgcctggggtttgttttttttgtcattgttttccccattgaaacaaacagggctaaaaagtcatctgttcattaggagaactcaagttgctgtgacttttctcatccaaaagactcatttgtgtggatgcgtgaccatgggaaaaagaaaaaaaaaaagatccattttttaggttcttttcggtctccagctgacaacccaactggacaatgatctgtctggtgcaggagaaggcaaaagtttctacaagtctacatgaccttgctgatacttgttctaatagaaacccagtctgctgtgtcttcaacatactggtattttcattacaaagtatggtaaatttttgagttgtttgtttctgttttgtaaagagaatccttattggacaccagtgaaggtgtctctgttttaatgatcagggtttttattccatcttttgcatttcttctatttctgaaggtttgtctcttggcatctttttttagtttcttaccataagagtttgacccgaaactgctcacttcacattggatgacaccatgttcttcctctttgaaaagaaaaggggaatgtgtcccactagtgaaaggaaaacttttcaacactatccctgctttagtctcagcaaactcagactattctgcttagccttcattagtcatctgggtgtgagtgtgtcttgttctgtttttctttttaataaaacttttaaaccatatatttagcctgtgaccaggggggccaaaccctaagatttctggtaaacctgaagggtggccctcctcagacaatttatctcccagcaatgaccctactacactcgcgtactgtgaatttgggaggaggtaaagttgacttctcctcgtgggcagttttccaatcaccttgtgagtagacacctgccaatattgtttgaaacctttttttaatatgacatcctctcttgtcattctcttctcccctttcccacagacttccctcctgggtccaggttcagaaccaagacttctgtacctagtgctgcctgattggtgaacattgacttcaagtagcatagcccttgtgtgactcacaactccgtgtccttcctaaagtttcgggaagcagggttgtctaatatgcacatttcttattttggtcatatttttactttagtgtcactcaccttttacaaagtgactttgtactcatttagggctctatcggaaatgcttccattttgccttttctacagttaggccaattttgaaatatataaattctatgcaacatttatgttgagttaccaatggaagccaaaagttctcttcccaaactgccaagaatgatacaggccataattgaaatgggaataccttttaagtttcattaggggtggggtgggagtgggacaggaacaagacttgcctagatctttgttgtatcttggggacttttactttgttgtttgatgcttaaacttcaaaattctctgtattcaaatttgattgtggcgaatctacttcaaaaaggaaaaataatccaactttgtggatattaaatggaaggtttgctgttttgatctagttgtttccagtggagcagttttatgaaatatgttctataagatgtacattttttcattgtaacatagaaattgtaaataattgattaaagtgctgcattttgatgaattttttctagccatttttaaagagaaaactaggaattgagtattttgtgtacggtatgtttccatcctccctccccttcctcctcccctcctctctctctcttcctacctatttaattttcatttgtcatgaggtttttggatttgccaatgatctgctggacatcatgccccatgtcatagagaataaagctgatgattgtaccagtcttaaattattcatgattcaataaaattgatgcttatttattc

SEQ ID NO: 291859 - DNA, 7253 bp, Artificial Sequence
  derived and/or modified sequence
atgtcagttatgctgtggcgatgggaacagaataataccaccatgaaattgcaaatatatactgactgggccaatcactacctggcaaagagtggccataaaaggctgattcgcgaccttcagcaggatgtcacagatggcgtgctgctcgcccagatcatacaagtggttgcgaatgagaagattgaggatattaatggttgccctaaaaatcgctcccagatgatcgagaatattgacgcatgcttgaacttcctggccgctaagggcattaacattcagggactaagtgccgaggagataagaaatgggaatctcaaggctattttgggcttgttcttttccctcagcaggtataagcagcagcagcagcagccacagaaacagcacctttcgtcacccttacctccggctgtgtcacaggtggctggagctcctagccagtgtcaggctgggacacctcagcagcaggtccctgtgacaccacaagcaccatgccagcctcaccagccagcaccccaccagcaaagcaaggcacaggctgaaatgcaaagctccgccagttccaaagacagtagccagtccaagattatcaggttcaccctgggccagaagaaaatttcccgacttcccggtcctactgccagagtatctgctgctggaagcgaagcaaagacacgcggtgggagtactaccgccaacaatcgtcggtcgcagtcttttaataattatgataagtcaaagcccgttacttccccacccccacctcccagttctcatgaaaaggagccactggcctcctcagcttcatctcaccccggtatgtcagacaatgccccagccagcctggagtcagggtcgagttctacaccaaccaattgcagtacgtcatcagcaattcctcaaccgggagcagcaacaaagccatggagaagcaaaagcctgtcagtgaagcactcggccactgtctcgatgttgagtgtaaagcctccgggacccgaggcaccccgaccaacccctgaggccatgaaaccggcacccaataatcaaaagagtatgctagaaaagcttaaattgtttaacagcaagggcggaagcaaggcaggcgaaggtccgggatcccgtgatacctcttgcgaacgcctggagacacttccctccttcgaagaaagtgaagagctggaagccgcttctcggatgctgacaaccgttggcccagcctcctcaagtcctaagatcgcactgaagggcattgcacagaggacgttctcgcgggcacttaccaacaagaaatcttcgctgaaaggcaatgagaaagagaaagaaaaacaacaacgggaaaaagataaggagaaaagcaaggatcttgcgaaacgagcgtcagtaactgaacggttagatctcaaagaagaacctaaagaggacccaagcggtgccgcagtgcccgaaatgccaaagaagtcttcaaaaatcgctagctttatccccaagggaggaaaactcaattctgcaaaaaaagagccaatggcaccctctcactcagggattcctaagcctggcatgaagtctatgcccggaaaaagtccttccgcaccagccccaagcaaagaaggcgaacgctccaggtcagggaaactgagctccgggttgccgcagcagaagccacagctggatggtcgccattcgtccagtagttcatccctagcgtccagtgagggcaagggtcctgggggaaccaccctgaaccattcgatttcttcccaaacggtgtccggtagcgtgggaacaacacaaacgactggtagcaatactgtttcggtccagctgcctcaacctcagcagcaatataaccaccccaacaccgctactgtggccccttttctatacagaagtcagacagacacagagggaaatgttaccgccgagtcaagctcaacaggggtgtctgtggaaccatcacacttcactaagacaggtcagcccgcactggaggagctcactggagaggatccagaggccaggagattacggaccgttaaaaatattgctgacctgagacagaacttggaagaaacgatgagttccttgaggggcacccaggtcacccactctacgttggagaccacttttgacaccaatgtgacaacagagatgtccgggagatccatacttagcctcactggacgccctacacctctctcttggcggctcggccagtcctcacccagactacaggccggtgatgcaccatccatgggcaatggatacccacctcgggctaatgcaagccggtttattaacaccgagtccggcagatatgtttacagcgcaccgctccgcagacagctcgcctccagaggaagttctgtgtgtcatgtggatgttagtgataaagcaggagacgagatggatttagaaggaatttccatggacgctcctgggtacatgtccgatggtgatgtactgagcaaaaacatcagaacggatgatattacgagcggttatatgactgacggcggactgggactctacactaggagactgaataggttgcccgatggaatggccgttgtccgggaaacactgcagagaaacacatcactgggtttaggcgatgctgattcttgggacgactcaagttctgtttcaagcgggatcagcgacactatcgataaccttagtaccgacgatatcaacaccagctctagtatctcctcctacgccaacacacctgctagcagccggaaaaacctggacgtgcagacggacgccgagaaacatagtcaggtcgaaaggaattccctgtggtcaggcgacgacgtgaaaaaatccgatgggggttccgattcagggataaagatggaacctggttctaagtggagaagaaacccctctgacgtgtccgatgaatcagacaagagcacttcaggcaagaaaaaccccgtgatatctcagacaggcagctggagaaggggtatgaccgcccaagttgggatcactatgccacgaacaaaaccctccgctccagccggagccttgaagaccccaggaaccgggaaaactgacgatgccaaggtgtccgaaaaaggcaggttgagccccaaagcatcccaagtcaagagatctccatctgatgcagggagatcgagtggagatgagtctaaaaagcccctacctagttctagcaggacgcctaccgcgaacgccaacagtttcggtttcaagaagcaatctggaagtgccgcaggacttgctatgatcaccgcttctggggtgacagtgacaagcaggagtgctaccctcggcaaaattccaaagtcaagcgctctcgtgtccagatctgccggacgcaagtccagcatggacggcgcacagaatcaggatgacgggtacttagccttatctagccgcacgaacctgcagtaccgatctttgcccaggccttctaagagcaatagccgaaatggcgctggcaataggagctccacttcttcaatcgactcgaatatctcaagcaaatccgcaggtttgccagtgcccaagttgagggagccgtcaaaaaccgctttggggtcatccctccccggactggtgaaccagacggacaaagaaaagggtatctcttctgataacgagtctgtcgcttcatgtaacagtgtgaaggtgaatccggctgcacagcccgttagtagccccgcacagacaagtttgcagcctggggctaagtaccctgacgtggcatcgccaacccttcgaagactctttggtggaaagcccactaagcaggtccctatcgccaccgcggagaatatgaagaattccgtagtgatttctaatccacatgccactatgacacaacagggcaatttagattcccccagcgggagcggggtgctttcatcggggtcttcatctccgctttattctaagaacgtggacctgaaccagtcaccactcgcatcttctccatcctccgcccactccgctccatcaaactccctcacgtggggaaccaacgcttcttcatccagtgccgtgagcaaagatggattgggatttcaatccgtgagctctttgcacactagttgcgagagcatcgacattagcttgagtagcggcggtgtgccatcccataactctagtacaggcctgatagcttcaagcaaggacgactcactaaccccctttgtacgtacgaattctgtcaagactaccctgtctgagtcccctctaagttcacccgcagcatctcctaaattctgcaggtccaccctgccacgcaagcaagattctgaccctcatctggaccggaataccctgcccaaaaaggggctgcggtacactccaacgagccagctgcgaacgcaagaggacgccaaagaatggcttaggtctcatagtgccggaggcctacaagacactgcagcaaactctccatttagtagtggctcctcagtgacaagtccttcaggaacaagattcaatttctcccaactcgcttctcctaccacagtaacccagatgtctctctccaacccaacgatgctccgcacccattcattgtccaatgcagatggacaatacgatccctatacggatagtcggttcagaaacagtagtatgtctctggacgagaaaagccggacaatgagcaggagcggtagcttccgggatggattcgaggaggagagctgggaaaagtcatccgttgacaatttcgtatcccgcctccactcgtctctgcattttagtttgccactgttccatcacgcaaggtacgagctggtccatggttcctctctgtcactcgtgagttcgacctcctccgtttactctacccctgaagagaagtgtcaatctgagatcaggaaactgagaagagagctggacgcgtctcaggaaaaggtgtcagcattgaccacccagctcaccgcgaacgctcacctggtagccgcttttgaacaatcgctcggaaacatgaccatccgcttacagagtctaactatgaccgccgaacaaaaagattccgagctgaatgaattgcgaaagactattgagctgcttaaaaagcagaacgccgcagcacaggcagcgatcaatggggtgattaatacgccggaacttaactgtaagggaaatggtaccgcccagtccgccgacttgcggattcgccgacagcactcgagtgactccgtatcatcaatcaatagtgctacaagtcattctagcgttggatccaatatcgaaagtgacagtaagaaaaaaaagcgaaagaattgggtgaatgaacttcgtagcagtttcaagcaggcctttggtaagaagaagagtcccaaatccgcctcctcacatagtgacatcgaggagatgactgacagcagcttgccgagcagccccaagctgccccataatggctcaactggctcgaccccactactgagaaattctcatagtaacagccttatcagcgaatgcatggatagcgaagctgaaaccgttatgcaactaagaaatgagctgcgtgacaaggagatgaagttgaccgacatcaggctggaagcgctaagttctgcccaccagttggaccagctgcgtgaagctatgaacaggatgcagtctgagattgaaaagcttaaggcggaaaatgataggctgaaatctgagtctcaagggtcaggctgctccagggcaccctcccaggtgtctataagcgcctctcccaggcagtctatgggtctgtctcagcactcccttaatctgactgaaagtacgtcactggatatgctgctggacgacactggcgaatgttcggcgcgtaaggaaggcggtaggcacgtcaagatagtagtctctttccaagaggaaatgaagtggaaagaagattcgagaccccatcttttcctgatcggatgcatcggagtttccgggaaaaccaagtgggacgtgctggatggcgtcgtgagacggctttttaaggagtatattatccacgtagatcctgtgtctcaactgggtctgaactcagatagcgtgcttggctactcaattggggagatcaagcggtcaaatacatccgagactcccgagctccttccctgcgggtaccttgtgggggagaacacgaccatctcagtcacggtcaagggcctcgctgaaaactcactggactctctagttttcgaatcccttattcctaagcccatccttcaacgatacgtaagcctccttatcgagcaccggaggattatattgagtggcccatctggaacaggaaagacatacctcgcaaaccgactttccgagtatatcgtgttgagagaaggcagggagctcaccgatggcgtcatcgctaccttcaacgtggatcacaagtcttctaaagaactgcgtcaatatttgtctaacctcgctgaccagtgtaattccgagaacaacgcagtcgatatgcccctcgtaatcatcctcgataacctgcatcatgtgagcagtctcggtgaaatttttaacggcctcctgaattgcaaatatcacaaatgcccctatatcattggcacaatgaaccaggccacaagtagcacaccaaacttgcaacttcatcataatttccggtgggtcttatgtgcaaatcacactgaaccagtgaaaggctttctcggcaggttccttagacggaaattgatggaaacggagatttccgggagggtacgcaatatggagttggtaaaaattattgattggatccccaaggtatggcaccatctgaataggttcttagaagcacattcctcgtctgacgttaccattggtcctagattgtttcttagttgcccaatcgatgtggatggtagcagagtttggttcaccgacctgtggaactactctatcatcccttatctgttggaagcagtcagggaggggctgcaactatacggccgtcgcgcaccatgggaggaccccgcaaagtgggttatggatacctatccttgggctgcctctccccagcagcacgagtggccgccactcctgcagctaagacccgaggacgtggggtttgatggatattccatgccacgggagggctcaacctctaagcagatgcctcctagtgacgcagaaggggaccctctaatgaacatgcttatgcggctgcaggaagccgctaattactcctccccacaaagttacgattcagactctaatagcaattcccaccatgatgacatccttgactcctctctggaatctactctcta

SEQ ID NO: 291860 - DNA, 7254 bp, Artificial Sequence
  derived and/or modified sequence
atgagcgtgatgctgtggagatgggagcagaacaacaccaccatgaagctgcagatctacaccgactgggccaaccactacctggccaagagcggccacaagagactgatcagagacctgcagcaggacgtgaccgacggcgtgctgctggcccagatcatccaggtggtggccaacgagaagatcgaggacatcaacggctgccccaagaacagaagccagatgatcgagaacatcgacgcctgcctgaacttcctggccgccaagggcatcaacatccagggcctgagcgccgaggagatcagaaacggcaacctgaaggccatcctgggcctgttcttcagcctgagcagatacaagcagcagcagcagcagccccagaagcagcacctgagcagccccctgccccccgccgtgagccaggtggccggcgcccccagccagtgccaggccggcaccccccagcagcaggtgcccgtgaccccccaggccccctgccagccccaccagcccgccccccaccagcagagcaaggcccaggccgagatgcagagcagcgccagcagcaaggacagcagccagagcaagatcatcagattcaccctgggccagaagaagatcagcagactgcccggccccaccgccagagtgagcgccgccggcagcgaggccaagaccagaggcggcagcaccaccgccaacaacagaagaagccagagcttcaacaactacgacaagagcaagcccgtgaccagccccccccccccccccagcagccacgagaaggagcccctggccagcagcgccagcagccaccccggcatgagcgacaacgcccccgccagcctggagagcggcagcagcagcacccccaccaactgcagcaccagcagcgccatcccccagcccggcgccgccaccaagccctggagaagcaagagcctgagcgtgaagcacagcgccaccgtgagcatgctgagcgtgaagccccccggccccgaggcccccagacccacccccgaggccatgaagcccgcccccaacaaccagaagagcatgctggagaagctgaagctgttcaacagcaagggcggcagcaaggccggcgagggccccggcagcagagacaccagctgcgagagactggagaccctgcccagcttcgaggagagcgaggagctggaggccgccagcagaatgctgaccaccgtgggccccgccagcagcagccccaagatcgccctgaagggcatcgcccagagaaccttcagcagagccctgaccaacaagaagagcagcctgaagggcaacgagaaggagaaggagaagcagcagagagagaaggacaaggagaagagcaaggacctggccaagagagccagcgtgaccgagagactggacctgaaggaggagcccaaggaggaccccagcggcgccgccgtgcccgagatgcccaagaagagcagcaagatcgccagcttcatccccaagggcggcaagctgaacagcgccaagaaggagcccatggcccccagccacagcggcatccccaagcccggcatgaagagcatgcccggcaagagccccagcgcccccgcccccagcaaggagggcgagagaagcagaagcggcaagctgagcagcggcctgccccagcagaagccccagctggacggcagacacagcagcagcagcagcagcctggccagcagcgagggcaagggccccggcggcaccaccctgaaccacagcatcagcagccagaccgtgagcggcagcgtgggcaccacccagaccaccggcagcaacaccgtgagcgtgcagctgccccagccccagcagcagtacaaccaccccaacaccgccaccgtggcccccttcctgtacagaagccagaccgacaccgagggcaacgtgaccgccgagagcagcagcaccggcgtgagcgtggagcccagccacttcaccaagaccggccagcccgccctggaggagctgaccggcgaggaccccgaggccagaagactgagaaccgtgaagaacatcgccgacctgagacagaacctggaggagaccatgagcagcctgagaggcacccaggtgacccacagcaccctggagaccaccttcgacaccaacgtgaccaccgagatgagcggcagaagcatcctgagcctgaccggcagacccacccccctgagctggagactgggccagagcagccccagactgcaggccggcgacgcccccagcatgggcaacggctacccccccagagccaacgccagcagattcatcaacaccgagagcggcagatacgtgtacagcgcccccctgagaagacagctggccagcagaggcagcagcgtgtgccacgtggacgtgagcgacaaggccggcgacgagatggacctggagggcatcagcatggacgcccccggctacatgagcgacggcgacgtgctgagcaagaacatcagaaccgacgacatcaccagcggctacatgaccgacggcggcctgggcctgtacaccagaagactgaacagactgcccgacggcatggccgtggtgagagagaccctgcagagaaacaccagcctgggcctgggcgacgccgacagctgggacgacagcagcagcgtgagcagcggcatcagcgacaccatcgacaacctgagcaccgacgacatcaacaccagcagcagcatcagcagctacgccaacacccccgccagcagcagaaagaacctggacgtgcagaccgacgccgagaagcacagccaggtggagagaaacagcctgtggagcggcgacgacgtgaagaagagcgacggcggcagcgacagcggcatcaagatggagcccggcagcaagtggagaagaaaccccagcgacgtgagcgacgagagcgacaagagcaccagcggcaagaagaaccccgtgatcagccagaccggcagctggagaagaggcatgaccgcccaggtgggcatcaccatgcccagaaccaagcccagcgcccccgccggcgccctgaagacccccggcaccggcaagaccgacgacgccaaggtgagcgagaagggcagactgagccccaaggccagccaggtgaagagaagccccagcgacgccggcagaagcagcggcgacgagagcaagaagcccctgcccagcagcagcagaacccccaccgccaacgccaacagcttcggcttcaagaagcagagcggcagcgccgccggcctggccatgatcaccgccagcggcgtgaccgtgaccagcagaagcgccaccctgggcaagatccccaagagcagcgccctggtgagcagaagcgccggcagaaagagcagcatggacggcgcccagaaccaggacgacggctacctggccctgagcagcagaaccaacctgcagtacagaagcctgcccagacccagcaagagcaacagcagaaacggcgccggcaacagaagcagcaccagcagcatcgacagcaacatcagcagcaagagcgccggcctgcccgtgcccaagctgagagagcccagcaagaccgccctgggcagcagcctgcccggcctggtgaaccagaccgacaaggagaagggcatcagcagcgacaacgagagcgtggccagctgcaacagcgtgaaggtgaaccccgccgcccagcccgtgagcagccccgcccagaccagcctgcagcccggcgccaagtaccccgacgtggccagccccaccctgagaagactgttcggcggcaagcccaccaagcaggtgcccatcgccaccgccgagaacatgaagaacagcgtggtgatcagcaacccccacgccaccatgacccagcagggcaacctggacagccccagcggcagcggcgtgctgagcagcggcagcagcagccccctgtacagcaagaacgtggacctgaaccagagccccctggccagcagccccagcagcgcccacagcgcccccagcaacagcctgacctggggcaccaacgccagcagcagcagcgccgtgagcaaggacggcctgggcttccagagcgtgagcagcctgcacaccagctgcgagagcatcgacatcagcctgagcagcggcggcgtgcccagccacaacagcagcaccggcctgatcgccagcagcaaggacgacagcctgacccccttcgtgagaaccaacagcgtgaagaccaccctgagcgagagccccctgagcagccccgccgccagccccaagttctgcagaagcaccctgcccagaaagcaggacagcgacccccacctggacagaaacaccctgcccaagaagggcctgagatacacccccaccagccagctgagaacccaggaggacgccaaggagtggctgagaagccacagcgccggcggcctgcaggacaccgccgccaacagccccttcagcagcggcagcagcgtgaccagccccagcggcaccagattcaacttcagccagctggccagccccaccaccgtgacccagatgagcctgagcaaccccaccatgctgagaacccacagcctgagcaacgccgacggccagtacgacccctacaccgacagcagattcagaaacagcagcatgagcctggacgagaagagcagaaccatgagcagaagcggcagcttcagagacggcttcgaggaggagagctgggagaagagcagcgtggacaacttcgtgagcagactgcacagcagcctgcacttcagcctgcccctgttccaccacgccagatacgagctggtgcacggcagcagcctgagcctggtgagcagcaccagcagcgtgtacagcacccccgaggagaagtgccagagcgagatcagaaagctgagaagagagctggacgccagccaggagaaggtgagcgccctgaccacccagctgaccgccaacgcccacctggtggccgccttcgagcagagcctgggcaacatgaccatcagactgcagagcctgaccatgaccgccgagcagaaggacagcgagctgaacgagctgagaaagaccatcgagctgctgaagaagcagaacgccgccgcccaggccgccatcaacggcgtgatcaacacccccgagctgaactgcaagggcaacggcaccgcccagagcgccgacctgagaatcagaagacagcacagcagcgacagcgtgagcagcatcaacagcgccaccagccacagcagcgtgggcagcaacatcgagagcgacagcaagaagaagaagagaaagaactgggtgaacgagctgagaagcagcttcaagcaggccttcggcaagaagaagagccccaagagcgccagcagccacagcgacatcgaggagatgaccgacagcagcctgcccagcagccccaagctgccccacaacggcagcaccggcagcacccccctgctgagaaacagccacagcaacagcctgatcagcgagtgcatggacagcgaggccgagaccgtgatgcagctgagaaacgagctgagagacaaggagatgaagctgaccgacatcagactggaggccctgagcagcgcccaccagctggaccagctgagagaggccatgaacagaatgcagagcgagatcgagaagctgaaggccgagaacgacagactgaagagcgagagccagggcagcggctgcagcagagcccccagccaggtgagcatcagcgccagccccagacagagcatgggcctgagccagcacagcctgaacctgaccgagagcaccagcctggacatgctgctggacgacaccggcgagtgcagcgccagaaaggagggcggcagacacgtgaagatcgtggtgagcttccaggaggagatgaagtggaaggaggacagcagaccccacctgttcctgatcggctgcatcggcgtgagcggcaagaccaagtgggacgtgctggacggcgtggtgagaagactgttcaaggagtacatcatccacgtggaccccgtgagccagctgggcctgaacagcgacagcgtgctgggctacagcatcggcgagatcaagagaagcaacaccagcgagacccccgagctgctgccctgcggctacctggtgggcgagaacaccaccatcagcgtgaccgtgaagggcctggccgagaacagcctggacagcctggtgttcgagagcctgatccccaagcccatcctgcagagatacgtgagcctgctgatcgagcacagaagaatcatcctgagcggccccagcggcaccggcaagacctacctggccaacagactgagcgagtacatcgtgctgagagagggcagagagctgaccgacggcgtgatcgccaccttcaacgtggaccacaagagcagcaaggagctgagacagtacctgagcaacctggccgaccagtgcaacagcgagaacaacgccgtggacatgcccctggtgatcatcctggacaacctgcaccacgtgagcagcctgggcgagatcttcaacggcctgctgaactgcaagtaccacaagtgcccctacatcatcggcaccatgaaccaggccaccagcagcacccccaacctgcagctgcaccacaacttcagatgggtgctgtgcgccaaccacaccgagcccgtgaagggcttcctgggcagattcctgagaagaaagctgatggagaccgagatcagcggcagagtgagaaacatggagctggtgaagatcatcgactggatccccaaggtgtggcaccacctgaacagattcctggaggcccacagcagcagcgacgtgaccatcggccccagactgttcctgagctgccccatcgacgtggacggcagcagagtgtggttcaccgacctgtggaactacagcatcatcccctacctgctggaggccgtgagagagggcctgcagctgtacggcagaagagccccctgggaggaccccgccaagtgggtgatggacacctacccctgggccgccagcccccagcagcacgagtggccccccctgctgcagctgagacccgaggacgtgggcttcgacggctacagcatgcccagagagggcagcaccagcaagcagatgccccccagcgacgccgagggcgaccccctgatgaacatgctgatgagactgcaggaggccgccaactacagcagcccccagagctacgacagcgacagcaacagcaacagccaccacgacgacatcctggacagcagcctggagagcaccctgtag

SEQ ID NO: 291861 - protein, 248 aa, Artificial Sequence
  derived and/or modified sequence
MEGDCLSCMKYLMFVFNFFIFLGGACLLAIGIWVMVDPTGFREIVAANPLLLTGAYILLAMGGLLFLLGFLGCCGAVRENKCLLLFFFLFILIIFLAELSAAILAFIFRENLTREFFTKELTKHYQGNNDTDVFSATWNSVMITFGCCGVNGPEDFKFASVFRLLTLDSEEVPEACCRREPQSRDGVLLSREECLLGRSLFLNKQGCYTVILNTFETYVYLAGALAIGVLAIELFAMIFAMCLFRGIQ

SEQ ID NO: 291862 - protein, 271 aa, Artificial Sequence
  derived and/or modified sequence
  misc_feature (1)..(1): Xaa can be any naturally occurring amino acid
XWSTMEGDCLSCMKYLMFVFNFFIFLGGACLLAIGIWVMVDPTGFREIVAANPLLLTGAYILLAMGGLLFLLGFLGCCGAVRENKCLLLFFFLFILIIFLAELSAAILAFIFRENLTREFFTKELTKHYQGNNDTDVFSATWNSVMITFGCCGVNGPEDFKFASVFRLLTLDSEEVPEACCRREPQSRDGVLLSREECLLGRSLFLNKQGCYTVILNTFETYVYLAGALAIGVLAIEEERAHSVSQATGILYQLPASPQAFQSPGTLGATA

SEQ ID NO: 291863 - DNA, 816 bp, Artificial Sequence
  derived and/or modified sequence
tgatggagcaccatggagggcgactgcctgagctgcatgaagtacctgatgttcgtgttcaacttcttcatcttcctgggcggcgcctgcctgctggccatcggcatctgggtgatggtggaccccaccggcttcagagagatcgtggccgccaaccccctgctgctgaccggcgcctacatcctgctggccatgggcggcctgctgttcctgctgggcttcctgggctgctgcggcgccgtgagagagaacaagtgcctgctgctgttcttcttcctgttcatcctgatcatcttcctggccgagctgagcgccgccatcctggccttcatcttcagagagaacctgaccagagagttcttcaccaaggagctgaccaagcactaccagggcaacaacgacaccgacgtgttcagcgccacctggaacagcgtgatgatcaccttcggctgctgcggcgtgaacggccccgaggacttcaagttcgccagcgtgttcagactgctgaccctggacagcgaggaggtgcccgaggcctgctgcagaagagagccccagagcagagacggcgtgctgctgagcagagaggagtgcctgctgggcagaagcctgttcctgaacaagcagggctgctacaccgtgatcctgaacaccttcgagacctacgtgtacctggccggcgccctggccatcggcgtgctggccatcgaggaggagagagcccacagcgtgagccaggccaccggcatcctgtaccagctgcccgccagcccccaggccttccagagccccggcaccctgggcgccaccgcctag

SEQ ID NO: 291864 - DNA, 816 bp, Artificial Sequence
  derived and/or modified sequence
tgatggtccacaatggaaggcgactgtctatcctgtatgaagtacctgatgtttgtgttcaatttctttatttttctggggggggcctgtctcctggcaattgggatctgggtgatggtggatccaacgggcttccgagagattgtagctgcaaaccctctgctgttgaccggcgcatatattttgttggctatgggggggctcctattccttctcggattcctcggctgttgcggcgcggtgagggagaacaagtgcctgctgctcttcttttttctcttcatcttaattattttcctggccgagctctcggcagcaatactcgcgtttatttttcgcgagaatctgacccgtgaattcttcaccaaagagctcactaaacattatcaagggaataacgacaccgacgtgttcagtgccacgtggaattccgtgatgatcacttttggatgctgtggcgtcaacggccccgaggatttcaagtttgcctccgtgttccggctgctgacattggactccgaggaggtgcctgaggcttgctgcagacgcgaaccacagtctagggacggagtactcctgtcccgtgaggagtgcttacttggtcgaagcttatttctgaacaaacaaggttgttataccgtgattctgaacacttttgagacctatgtctacctcgccggagcactagctataggcgtactagcgatcgaggaagagcgagcccatagcgtgtcacaagccactggcattctctaccagcttcctgccagcccacaggcttttcagtcaccaggcactctgggggccactgcgtag

SEQ ID NO: 291865 - DNA, 816 bp, Artificial Sequence
  derived and/or modified sequence
tgatggagcaccatggagggggactgcctgagctgcatgaagtacctgatgtttgtgttcaacttcttcatcttcctgggcggggcctgcctgctggccatcggcatctgggtgatggtggaccccaccggcttccgggagatcgtggccgccaaccccctgctgctgactggagcctacatcctgctggccatgggcggcctgctcttcctgctgggcttcctgggctgctgcggggctgtgcgggagaacaagtgcctgctgctcttcttcttcctgttcatcctgatcatcttcctggccgagctgtctgctgccatcctggccttcatcttccgggagaacctgacccgggagttcttcaccaaggagctgaccaagcactaccagggcaacaatgacacagatgtgttttctgccacctggaacagcgtgatgatcaccttcggctgctgcggcgtgaatggacctgaggacttcaagtttgccagcgtcttccggctgctgaccctggacagcgaggaggtgcctgaggcctgctgccggcgggagccccagagcagagatggagtgctgctgagccgggaggagtgcctgctgggccgcagcctcttcctgaacaagcagggctgctacaccgtcatcctgaacacctttgagacctacgtgtacctggccggggccctggccatcggcgtgctggccatcgaggaggagcgggcccacagcgtgtcccaggccaccggcatcctgtaccagctgcctgccagcccccaggccttccagagccctggcaccctgggcgccacagcctag

SEQ ID NO: 291866 - DNA, 816 bp, Artificial Sequence
  derived and/or modified sequence
tgatggagcaccatggagggcgactgcctgagctgcatgaagtacttgatgttcgtgttcaatttcttcatttttcttggcggggcatgtctcttagccataggaatttgggtcatggtggacccaacgggtttcagagagattgtggctgcaaacccactgttgttgactggggcctacatcttgctggcaatgggcgggctcctattccttttaggcttcctcggctgttgcggtgccgtacgcgaaaataaatgcttgctgctgttcttcttcttgttcattctgatcattttcctggcagagctgagtgcagccatcctggcgtttattttcagagagaacctgacgagggagttcttcactaaagaactaacaaaacattatcaggggaacaacgatacagatgtgttctcagccacatggaactcagtcatgattacctttggctgttgtggagttaacgggcctgaagatttcaagttcgccagcgtcttcaggctgctgaccctggacagcgaggaagtacccgaggcttgctgtagaagggaacctcagtccagagacggagtcttactctctcgcgaggaatgtttattaggcagatcgctgttcctgaacaagcaaggttgttatacagttattctgaacactttcgagacatacgtatacctggctggggctctagctatcggggtgctcgcaattgaagaagagagggcccactccgtgtcgcaggccactggcattctttatcagctaccggcctctcctcaagcttttcagagtccaggaactttaggggcaaccgcgtag

SEQ ID NO: 291867 - DNA, 816 bp, Artificial Sequence
  derived and/or modified sequence
tgatggtctactatggagggtgattgccttagttgcatgaaatatttgatgtttgtttttaacttctttatatttttgggcggagcctgtctccttgcaatcgggatctgggtgatggtggatcccactggattccgggaaattgtcgccgcaaatcccctgttgctcactggggcttacatactgttggcaatgggcggactgctgtttctgttaggattcctcggatgttgcggggcagtgcgggagaacaagtgcctgctgctgttcttttttctcttcatcctgatcatttttttggcagaattgtccgcggcaatcttagctttcattttccgtgaaaatctgactcgagagttcttcactaaggagctcaccaaacactatcagggcaacaatgacacagatgtttttagcgccacttggaactcagtcatgatcacctttgggtgctgcggggtgaatggaccggaagatttcaagtttgcctcagtgttccgccttttgaccttggactctgaggaggtgccggaggcctgttgcagaagagagccccagtctcgagacggggtcctactgtctcgagaggagtgccttctgggacgaagtcttttccttaataaacagggttgctatactgtgattctgaatacattcgagacctatgtgtatctggccggtgccctcgccatcggcgtgcttgcaatcgaagaggagagggcccattccgtttcgcaggcaacgggcatcttgtaccaactgcccgcttcccctcaggccttccagtcacccggaactctaggagcaacagcttag

SEQ ID NO: 291868 - DNA, 4229 bp, Artificial Sequence
  derived and/or modified sequence
agtgtatccagaagctactgtcaggaggacactgtaagagaaccttggcacctctgggcccaaagggaaagacaccagtggaaagaggtgagcatctcctggaccaccctcaagcttcaggtgagctgagcttctaacactaccatcaaagcaactggaaccccttgaatttgatttctggagacgcgagcataatccttttgcagacatctcaacgctggctctccaggtggagcaccatggaaggcgactgtctgagctgcatgaagtatctgatgtttgtattcaatttcttcatatttctgggcggggcctgcctgctggccatcggcatctgggtcatggtggaccccaccggcttccgggagatcgtggctgccaatcctctgctcctcacgggcgcctacatcctcctggccatggggggcctgctctttctgctcggcttcctgggctgctgcggggccgtccgtgagaacaagtgtctgctgctatttttcttcctgttcatcctgatcatcttcctggcagagctctcagcagccatcctggccttcatcttcagggaaaatctcacccgagaattcttcaccaaggagctcaccaagcactaccagggcaataacgacacagacgtcttctctgccacctggaactcggtcatgatcacatttggttgctgcggggtcaacgggcctgaagactttaagtttgcatctgtgtttcgactcctgaccctggatagtgaagaggtgccggaggcctgctgccggagggaaccccaaagtcgggacggggtcctgctgagccgggaggagtgcctcctgggaaggagcctattcctaaacaagcagggctgttacacggtgatcctcaacaccttcgagacctacgtctacttggccggagcccttgccatcggggtactggccatcgagcttttcgccatgatctttgccatgtgcctcttccggggcatccagtagagggtatggcctgaagcctgaagactcgccccacccaccactgcccagcacccagtgtcctcccgtgcccctccccgctgtcctcttggccccaggggagaagatgaggccatcagagatggccaggagaagggccaggggaatagagctatttttttaacaaaacaaaatgaagacaaaaatatggactgatgtatcctcgcctggactcagggcaggtgccgtgggttctccagagaccccagcaactggcccaggatgcaggctgctctagagaccaaaggaacaccaggcccagcgccctctttggtccagccagaccctgggccctctctcctcactgcaccaggacctgatgccaagaaagtgaggatttaggcaacaaggaggcaaaagcaaatctcagagaagtcatcaaagcccaggggctgcacggagattcagctgccatgtctttgaggactcggaacccacagcgcaatccctggtccactggaggatggactgttccccccttcaggccggggccaagagtgagctgctaacacggcatccaagaatggcccagctggtaggatccttgctttccccatctgttggaccaaataatctcaaaggcccagagaggacagtgaccatccacagacacacagcacaggcgtgacagttctgaaaagaagctgagttgtctccaggctgctgtcactgcatccaggactctgtcagctctgctgcccacatgcacccctggcctcagcatcccggttcccccagacaagagagggcaagtcagccaggaactgcctcctccctgctctacagctaagaaaacaccattccatgacttcccaccgcgccctcgctcctacctccccacacctctctctgagtccccaggaacacacagaggtgcacatcacattcccttgtccacactgcccgcctctcccacatgccacccccttccctgtccttccccaactccccagctccaagagtggaagaaatccccaagatcatctgggtctccctctccacacccagaactgaggcttggatatcttcttcaacatccttgccaagacttctccaccctcttgcatacctccagggacagagagcttactacctcccaaggcagcctcctgcctttggactgctctgactttagcatcagcttaatacacagaagaggtttctgtttttctgtggctctgtccatggcatcccacttgcccactctccttcctggagtgttgaggtcacacattgactcccctgagccctcttctctccaggctaaagaatcccgaaggcatcgaggccatttctgctgcaacaaggtttcctgtctcttcactgtccgcacatttcttagtattccctccaggcttgggcagggagactcgcagatgcacacccacaagtattcagttctcaaactctagacgagtgttggcaactggattgcaagatgctcctaccctgatagatcaggggtggctgctggaggctgtgctggggatctgaggtttggtctgggctcagtgggagacggcagtgcaatcctgatgagtgatgtctgccaggcaccgtaagtttgattagtgatgtctgccacgggcagggatggaaggagcagtgtgatgtctgctctcttctctcccctctgtccctcttcaggaagaaagagctcattctgtctcacaagccaccggcatcctgtatcagcttccagcctcccctcaggctttccagtcaccagggacactcggagccacagcctagagccccgtgttccctggcctgtgcgtctgcccccttctgagatgcagccagaagctctgtgcctgctgcaaagattcaggtggaccctcctctaatctcctcctgctgtgcccgccagtccttgccctcccaccaggtctctgagctcagtgttaccaaattcgccctttaacagcttgctctggcaaccccataaatgacacctgaggtccgtagaagctaagctcctgagacccagggggacctgccactggtaccgcggcccagcctggggcctgggggctgcccctcttgaaccacccacatgcttagccccagctttttggaagaggcaaatggctggtctgaggatgacacacaaaaacaaaaacaaaaaacaaaaaacccatgctgggcaggactgaggcaaattgcacagctttatggctctaatccaggggcatcccaggcttctggggcccacagaagtcagagggaggacccaagagaaagggctggtcatgaagggaaatctggctaaggtgggttcaagggcagacacaagactgcccctcagcagctttctacaaatgtgccaaggaaccctcaatcagccctgattcagctcgccagccagccactggccaccctcttaggctggaaagggaagacaggcagtttctgctcctgttggcattcgctcaggctggtagctatttgcaagactgcctgaggccattccttggaggcaaggcaaagaaagctcagcccaaatcaggcttgagcctccctccagagcacagggagaaacagggtttagctggcttggtccagatacaacccacagcaggttctggtggtggctggggttgtgggggaggggtgggcagggatacctctttgtttcttttcaccccgaaatacaacagcccataacagagacttcctcggaccccactaacagggcaaggaacaagaagactacaccgctcatcacaaaccctgcctgtatcgaaagccactttcctgctctgaagctactgcctcttagagaaagggaatagctctttatgggctgggggtgagggcccctccccagggtccctgttaatttctggccttggtgctcaggcctgtccacagcctcccttgtctatgtctctatccatgcttaaggggcccggacaggatttcccaaaccagccgaggccccagcacccgccgtctccccagaagccccctcctccttcccccatgggtcatatgttgaaagtctattttaaaaactatgttccttgccgtagattgcagagctaatttatcacgtttctctcctgtgagaccccccttttatatgatatatccagaggaagttttgtaatataaaacaggacgcccacactgatggttttgcactggtttttgtgaatgtttcttacaaaaagaaaaaggaacaaagaataaatagtgaccgtg

SEQ ID NO: 291869 - DNA, 1184 bp, Artificial Sequence
  derived and/or modified sequence
gtggagcaccatggaaggcgactgtctgagctgcatgaagtatctgatgtttgtattcaatttcttcatatttctgggcggggcctgcctgctggccatcggcatctgggtcatggtggaccccaccggcttccgggagatcgtggctgccaatcctctgctcctcacgggcgcctacatcctcctggccatggggggcctgctctttctgctcggcttcctgggctgctgcggggccgtccgtgagaacaagtgtctgctgctatttttcttcctgttcatcctgatcatcttcctggcagagctctcagcagccatcctggccttcatcttcagggaaaatctcacccgagaattcttcaccaaggagctcaccaagcactaccagggcaataacgacacagacgtcttctctgccacctggaactcggtcatgatcacatttggttgctgcggggtcaacgggcctgaagactttaagtttgcatctgtgtttcgactcctgaccctggatagtgaagaggtgccggaggcctgctgccggagggaaccccaaagtcgggacggggtcctgctgagccgggaggagtgcctcctgggaaggagcctattcctaaacaagcagggctgttacacggtgatcctcaacaccttcgagacctacgtctacttggccggagcccttgccatcggggtactggccatcgaggaagaaagagctcattctgtctcacaagccaccggcatcctgtatcagcttccagcctcccctcaggctttccagtcaccagggacactcggagccacagcctagagccccgtgttccctggcctgtgcgtctgcccccttctgagatgcagccagaagctctgtgcctgctgcaaagattcaggtggaccctcctctaatctcctcctgctgtgcccgccagtccttgccctcccaccaggtctctgagctcagtgttaccaaattcgccctttaacagcttgctctggcaaccccataaatgacacctgaggtccgtagaagctaagctcctgagacccagggggacctgccactggtaccgcggcccagcctggggcctgggggctgcccctcttgaaccacccacatgcttagccccagctttttggaagaggcaaatggctggtctgaggatgacacacaaaaacaaaaa

SEQ ID NO: 291870 - DNA, 3316 bp, Artificial Sequence
  derived and/or modified sequence
cggccccgagccccgagcgagcgccgccgcctcgcgctgcgggtccccggacgcgccgccaccgccgggaaggcagccggcgccgggcaagttgcgagcgcgcccctccgaccaggaaagtttccccccggccgccggcgggatttggcgcggggtccggcagccgccgctggaagagtgtatccagaagctactgtcaggaggacactgtaagagaaccttggcacctctgggcccaaagggaaagacaccagtggaaagaggtgagcatctcctggaccaccctcaagcttcaggtgagctgagcttctaacactaccatcaaagcaactggaaccccttgaatttgatttctggagacgcgagcataatccttttgcagacatctcaacgctggctctccaggtggagcaccatggaaggcgactgtctgagctgcatgaagtatctgatgtttgtattcaatttcttcatatttctgggcggggcctgcctgctggccatcggcatctgggtcatggtggaccccaccggcttccgggagatcgtggctgccaatcctctgctcctcacgggcgcctacatcctcctggccatggggggcctgctctttctgctcggcttcctgggctgctgcggggccgtccgtgagaacaagtgtctgctgctatttttcttcctgttcatcctgatcatcttcctggcagagctctcagcagccatcctggccttcatcttcagggaaaatctcacccgagaattcttcaccaaggagctcaccaagcactaccagggcaataacgacacagacgtcttctctgccacctggaactcggtcatgatcacatttggttgctgcggggtcaacgggcctgaagactttaagtttgcatctgtgtttcgactcctgaccctggatagtgaagaggtgccggaggcctgctgccggagggaaccccaaagtcgggacggggtcctgctgagccgggaggagtgcctcctgggaaggagcctattcctaaacaagcagggctgttacacggtgatcctcaacaccttcgagacctacgtctacttggccggagcccttgccatcggggtactggccatcgagcttttcgccatgatctttgccatgtgcctcttccggggcatccagtagagggtatggcctgaagcctgaagactcgccccacccaccactgcccagcacccagtgtcctcccgtgcccctccccgctgtcctcttggccccaggggagaagatgaggccatcagagatggccaggagaagggccaggggaatagagctatttttttaacaaaacaaaatgaagacaaaaatatggactgatgtatcctcgcctggactcagggcaggtgccgtgggttctccagagaccccagcaactggcccaggatgcaggctgctctagagaccaaaggaacaccaggcccagcgccctctttggtccagccagaccctgggccctctctcctcactgcaccaggacctgatgccaagaaagtgaggatttaggcaacaaggaggcaaaagcaaatctcagagaagtcatcaaagcccaggggctgcacggagattcagctgccatgtctttgaggactcggaacccacagcgcaatccctggtccactggaggatggactgttccccccttcaggccggggccaagagtgagctgctaacacggcatccaagaatggcccagctggtaggatccttgctttccccatctgttggaccaaataatctcaaaggcccagagaggacagtgaccatccacagacacacagcacaggcgtgacagttctgaaaagaagctgagttgtctccaggctgctgtcactgcatccaggactctgtcagctctgctgcccacatgcacccctggcctcagcatcccggttcccccagacaagagagggcaagtcagccaggaactgcctcctccctgctctacagctaagaaaacaccattccatgacttcccaccgcgccctcgctcctacctccccacacctctctctgagtccccaggaacacacagaggtgcacatcacattcccttgtccacactgcccgcctctcccacatgccacccccttccctgtccttccccaactccccagctccaagagtggaagaaatccccaagatcatctgggtctccctctccacacccagaactgaggcttggatatcttcttcaacatccttgccaagacttctccaccctcttgcatacctccagggacagagagcttactacctcccaaggcagcctcctgcctttggactgctctgactttagcatcagcttaatacacagaagaggtttctgtttttctgtggctctgtccatggcatcccacttgcccactctccttcctggagtgttgaggtcacacattgactcccctgagccctcttctctccaggctaaagaatcccgaaggcatcgaggccatttctgctgcaacaaggtttcctgtctcttcactgtccgcacatttcttagtattccctccaggcttgggcagggagactcgcagatgcacacccacaagtattcagttctcaaactctagacgagtgttggcaactggattgcaagatgctcctaccctgatagatcaggggtggctgctggaggctgtgctggggatctgaggtttggtctgggctcagtgggagacggcagtgcaatcctgatgagtgatgtctgccaggcaccgtaagtttgattagtgatgtctgccacgggcagggatggaaggagcagtgtgatgtctgctctcttctctcccctctgtccctcttcaggaagaaagagctcattctgtctcacaagccaccggcatcctgtatcagcttccagcctcccctcaggctttccagtcaccagggacactcggagccacagcctagagccccgtgttccctggcctgtgcgtctgcccccttctgagatgcagccagaagctctgtgcctgctgcaaagattcaggtggaccctcctctaatctcctcctgctgtgcccgccagtccttgccctcccaccaggtctctgagctcagtgttaccaaattcgccctttaacagcttgctctggcaaccccataaatgacacctgaggtccgtagaagctaagctcctgagacccagggggacctgccactggtaccgcggcccagcctggggcctgggggctgcccctcttgaaccacccacatgcttagccccagctttttggaagaggcaaatggctggtctgaggatgacacacaaaaaca

SEQ ID NO: 291871 - DNA, 549 bp, Artificial Sequence
  derived and/or modified sequence
aggcgaggggcagcccgcagaggagacgcgcttctcggcagcaacggcgtctggagccgggaggggcggagagtgtatccagaagctactgtcaggaggacactgtaagagaaccttggcacctctgggcccaaagggaaagacaccagtggaaagaggtgagcatctcctggaccaccctcaagcttcaggtgagctgagcttctaacactaccatcaaagcaactggaaccccttgaatttgatttctggagacgcgagcataatccttttgcagacatctcaacgctggctctccaggtggagcaccatggaaggcgactgtctgagctgcatgaagtatctgatgtttgtattcaatttcttcatatttctgggcggggcctgcctgctggccatcggcatctgggtcatggtggaccccaccggcttccgggagatcgtggctgccaatcctctgctcctcacgggcgcctacatcctcctggccatggggggcctgctctttctgctcggcttcctgggctgctgcggggccgtccgtgagaa

SEQ ID NO: 291872 - DNA, 726 bp, Artificial Sequence
  derived and/or modified sequence
tttcttatctgcaagtcagaggagggtgagttccccaggctttcaacagagtgtatccagaagctactgtcaggaggacactgtaagagaaccttggcacctctgggcccaaagggaaagacaccagtggaaagaggtgagcatctcctggaccaccctcaagcttcaggtgagctgagcttctaacactaccatcaaagcaactggaaccccttgaatttgatttctggagacgcgagcataatccttttgcagacatctcaacgctggctctccaggtggagcaccatggaaggcgactgtctgagctgcatgaagtatctgatgtttgtattcaatttcttcatatttctgggcggggcctgcctgctggccatcggcatctgggtcatggtggaccccaccggcttccgggagatcgtggctgccaatcctctgctcctcacgggcgcctacatcctcctggccatggggggcctgctctttctgctcggcttcctgggctgctgcggggccgtccgtgagaacaagtgtctgctgctatttttcttcctgttcatcctgatcatcttcctggcagagctctcagcagccatcctggccttcatcttcagggaaaatctcacccgagaattcttcaccaaggagctcaccaagcactaccagggcaataacgacacagacgtcttctctgccacctggaactcggtcatgatcacagtgagt

SEQ ID NO: 291873 - protein, 696 aa, Artificial Sequence
  derived and/or modified sequence
MTSTGKDGGAQHAQYVGPYRLEKTLGKGQTGLVKLGVHCVTCQKVAIKIVNREKLSESVLMKVEREIAILKLIEHPHVLKLHDVYENKKYLYLVLEHVSGGELFDYLVKKGRLTPKEARKFFRQIISALDFCHSHSICHRDLKPENLLLDEKNNIRIADFGMASLQVGDSLLETSCGSPHYACPEVIRGEKYDGRKADVWSCGVILFALLVGALPFDDDNLRQLLEKVKRGVFHMPHFIPPDCQSLLRGMIEVDAARRLTLEHIQKHIWYIGGKNEPEPEQPIPRKVQIRSLPSLEDIDPDVLDSMHSLGCFRDRNKLLQDLLSEEENQEKMIYFLLLDRKERYPSQEDEDLPPRNEIDPPRKRVDSPMLNRHGKRRPERKSMEVLSVTDGGSPVPARRAIEMAQHGQSKAMFSKSLDIAEAHPQFSKEDRSRSISGASSGLSTSPLSSPRVTPHPSPRGSPLPTPKGTPVHTPKESPAGTPNPTPPSSPSVGGVPWRARLNSIKNSFLGSPRFHRRKLQVPTPEEMSNLTPESSPELAKKSWFGNFISLEKEEQIFVVIKDKPLSSIKADIVHAFLSIPSLSHSVISQTSFRAEYKATGGPAVFQKPVKFQVDITYTEGGEAQKENGIYSVTFTLLSGPSRRFKRVVETIQAQLLSTHDPPAAQHLSEPPPPAPGLSWGAGLKGQKVATSYESSL

SEQ ID NO: 291874 - protein, 364 aa, Artificial Sequence
  derived and/or modified sequence
MPGCPCPGCGMAGPRLLFLTALALELLERAGGSQPALRSRGTATACRLDNKESESWGALLSGERLDTWICSLLGSLMVGLSGVFPLLVIPLEMGTMLRSEAGAWRLKQLLSFALGGLLGNVFLHLLPEAWAYTCSASPGGEGQSLQQQQQLGLWVIAGILTFLALEKMFLDSKEEGTSQAPNKDPTAAAAALNGGHCLAQPAAEPGLGAVVRSIKVSGYLNLLANTIDNFTHGLAVAASFLVSKKIGLLTTMAILLHEIPHEVGDFAILLRAGFDRWSAAKLQLSTALGGLLGAGFAICTQSPKGVEETAAWVLPFTSGGFLYIALVNVLPDLLEEEDPWRSLQQLLLLCAGIVVMVLFSLFVD

SEQ ID NO: 291875 - protein, 699 aa, Artificial Sequence
  derived and/or modified sequence
MDKFWWHAAWGLCLVPLSLAQIDLNITCRFAGVFHVEKNGRYSISRTEAADLCKAFNSTLPTMAQMEKALSIGFETCRYGFIEGHVVIPRIHPNSICAANNTGVYILTSNTSQYDTYCFNASAPPEEDCTSVTDLPNAFDGPITITIVNRDGTRYVQKGEYRTNPEDIYPSNPTDDDVSSGSSSERSSTSGGYIFYTFSTVHPIPDEDSPWITDSTDRIPATTLMSTSATATETATKRQETWDWFSWLFLPSESKNHLHTTTQMAGTSSNTISAGWEPNEENEDERDRHLSFSGSGIDDDEDFISSTISTTPRAFDHTKQNQDWTQWNPSHSNPEVLLQTTTRMTDVDRNGTTAYEGNWNPEAHPPLIHHEHHEEEETPHSTSTTASAHTSHPMQGRTTPSPEDSSWTDFFNPISHPMGRGHQAGRRMDMDSSHSITLQPTANPNTGLVEDLDRTGPLSMTTQQSNSQSFSTSHEGLEEDKDHPTTSTLTSSNRNDVTGGRRDPNHSEGSTTLLEGYTSHYPHTKESRTFIPVTSAKTGSFGVTAVTVGDSNSNVNRSLSGDQDTFHPSGGSHTTHGSESDGHSHGSQEGGANTTSGPIRTPQIPEWLIILASLLALALILAVCIAVNSRRRCGQKKKLVINSGNGAVEDRKPSGLNGEASKSQEMVHLVNKESSETPDQFMTADETRNLQNVDMKIGV

SEQ ID NO: 291876 - protein, 199 aa, Artificial Sequence
  derived and/or modified sequence
MTMRHNWTPDLSPLWVLLLCAHVVTLLVRATPVSQTTTAATASVRSTKDPCPSQPPVFPAAKQCPALEVTWPEVEVPLNGTLSLSCVACSRFPNFSILYWLGNGSFIEHLPGRLWEGSTSRERGSTGTQLCKALVLEQLTPALHSTNFSCVLVDPEQVVQRHVVLAQLWVRSPRRGLQEQEELCFHMWGGKGGLCQSSL

SEQ ID NO: 291877 - DNA, 600 bp, Artificial Sequence
  derived and/or modified sequence
atgaccatgcggcataattggactccagaccttagcccactctgggtgttactactctgtgcccatgtcgtcaccctgctagtccgggctacaccagtgtcacagaccacaactgcagcaaccgcttccgtcaggtctaccaaagatccctgtccgtcccagcctcccgtgttccccgcagctaagcagtgccctgcgctggaggtcacttggcctgaagtggaagtacctctgaatgggactctgagcctgagttgcgtcgcctgctcccgcttccctaatttttcaatcctgtactggttgggaaacggctccttcattgaacaccttcccggaagactttgggaggggtcaacctcaagggaacgtgggtctaccggaacccaactgtgcaaagcgctggtgctggaacagttgacaccagccctgcatagcaccaacttctcctgcgttctggtggatcccgagcaggttgtacagcgacatgtcgttctcgctcagctgtgggtgagatcccccagacgcggattgcaggaacaggaggagctttgttttcacatgtggggcggaaaagggggactgtgtcagtcttcgctctag

SEQ ID NO: 291878 - DNA, 600 bp, Artificial Sequence
  derived and/or modified sequence
atgacaatgcgacataactggacaccagatctatcacctctgtgggtcctgctactttgtgcccacgtggtcactctgctggtaagagctacccccgtctctcagaccactactgcagctactgcaagtgtgagatctaccaaagacccttgcccaagtcaacccccggtgttcccagcagcgaagcaatgccctgctctggaggtgacctggcccgaggtggaagttcctctgaacggaacgctttctctttcctgtgtggcctgttctagattccccaacttttctatcttatattggcttggcaatggcagcttcatcgagcacttaccaggcagactgtgggaagggagcactagcagagaacgcggctctacaggcacacagctgtgtaaggcattagtactggaacagttaacacccgctctacactcgaccaactttagttgcgtactggtggaccccgagcaggtggtccagcggcacgtcgtgctggctcagctctgggttcgatcgcctagaagggggttgcaggaacaagaagaattgtgtttccatatgtggggtggaaaggggggcctttgtcagtctagcttgtag

SEQ ID NO: 291879 - DNA, 600 bp, Artificial Sequence
  derived and/or modified sequence
atgaccatgcgccacaactggacccctgatctctccccattatgggtcctgctactctgtgctcacgtcgtgacactcctagttagagctacgccagtttcccagaccaccaccgccgccaccgcctctgtgagatccacgaaggacccatgccccagccaacccccggtcttccccgcagccaaacagtgcccagccctggaagtgacttggcctgaggtcgaagtgccattaaacggtacccttagcctgtcctgcgttgcgtgcagccgtttcccaaacttttccattttatactggcttggaaatggtagctttattgaacatctgccagggagactgtgggagggctccacatctcgagaaagaggaagtaccggtactcagctttgcaaagcgcttgtcctggaacagttaactccggcgctacactctacaaacttcagctgtgttctcgtcgatcctgaacaggttgttcagaggcatgtggtcctggcccagttgtgggtgcggtcaccacgtaggggtctgcaagagcaagaggagctgtgtttccatatgtggggaggcaaaggcgggctctgtcaaagtagcctttag

SEQ ID NO: 291880 - DNA, 4080 bp, Artificial Sequence
  derived and/or modified sequence
ctccatggataactgcatgaccctgagagaaaacctccttagatttagcatcctaggttcctcacacgcctcaccctgaatcctggccctcccgcagccccagcgccatttgtcccatcagtgacaagattcatattctgatgtagactctgttgccagagccagtgttgagccagtccgcctcttccccgggaagtgcctgcccttccctcctgttagggttggctctcgagcttgtgtgccagttcctgggttggccgtgagagttctacagacaaggaggaagtgctctcggtgtatttcctgtggtgggttcacacgcagctagacacagctaacttgagtcttggagctcctagagggaagcttctggaaaggaaggctcttcaggacctcttaggagccaggtaggagtctgggactactagtgaacctagacctgtggctctggccagaggggctaggatgagagacagagggtgtgatggtgggtgctgggagatgtagccgaccttggggctggtggctgggggagtgggtagcctgggaaaggccaggatgtggacggactggtatggcattgagcctgaagtggtccaacttggggttccccagtgcctaggaaagttgtccccttgaatgtcagtgtgaaggtgaaggaggaagcagatgcctgttcatatggaaacaaagacctggctgtgaagaggggaggcggacaccaaagtcctgacacttgggcgggacagaattgatctgtgagagactcatctagttcataccctaggtgaccctgggggtggcatgggggtagattagagatcccagtctggtatcctctggagagtaggagtcccaggagctgaaggtttctggccactgaactttggctaaagcagaggtgtcacagctgctcaagattccctggttaaaaagtgaaagtgaaatagagggtcggggcagtgctttcccagaaggattgctcggcatcctgcccttcccagaagcagctctggtgctgaagagagcactgcctccctgtgtgactgggtgagtccatattctctctttgggtctcaattttgccttccctaatgaaggggtaagattggactaggtaagcatcttacaaccatttgtggtcatgagagctggggtggggaaggattgtcacttgacccccccagctctgtttctaagtgctgaaagagctccaggctatgctacgggaggagaagccagctactgaggaaaagccagctactgagaaaaagcgggagtggtttaccattctcctcccccacctttcaccagagaagaggacgttgtcacagataaagagccaggctcaccagctcctgacgcatgcatcatgaccatgagacacaactggacaccagacctcagccctttgtgggtcctgctcctgtgtgcccacgtcgtcactctcctggtcagagccacacctgtctcgcagaccaccacagctgccactgcctcagttagaagcacaaaggacccctgcccctcccagcccccagtgttcccagcagctaagcagtgtccagcattggaagtgacctggccagaggtggaagtgccactgaatggaacgctgagcttatcctgtgtggcctgcagccgcttccccaacttcagcatcctctactggctgggcaatggttccttcattgagcacctcccaggccgactgtgggaggggagcaccagccgggaacgtgggagcacaggtacgcagctgtgcaaggccttggtgctggagcagctgacccctgccctgcacagcaccaacttctcctgtgtgctcgtggaccctgaacaggttgtccagcgtcacgtcgtcctggcccagctctgggtgaggagcccaaggagaggcctccaggaacaggaggagctctgcttccatatgtggggaggaaagggtgggctctgccagagcagcctgtgaactaatgcccagcattcctcaaggtcagccagacaaaaaggaacttaggtcttgggcagaggaggtgtagcctggggcaaagtgatgagatgtccctcctttccttggcctgatccttgtctgccttcacttccctaggctgggctgagggcaaccttgccccccacccaagaagccctgccctccagccacagcagtccacagcagcagggttaagactcagcacagggccagcagcagcacaaccttgaccagagcttgggtcctacctgtctacctggagtgaacagtccctgactgcctgtaggctgcgtggatgcgcaacacaccccctccttctctgctttgggtcccttctctcaccaaattcaaactccattcccacctacctagaaaatcacagcctccttataatgcctcctcctcctgccattctctctccacctatccattagccttcctaacgtcctactcctcacactgctctactgctcagaaaccaccaagactgttgatgccttagccttgcactccagggccctacctgcatttcccacatgactttctggaagcctcccaactattcttgcttttcccagacagctcccactcccatgtctctgctcatttagtcccgtcttcctcaccgccccagcaggggaacgctcaagcctggttgaaatgctgcctcttcagtgaagtcatcctctttcagctctggccgcattctgcagacttcctatcttcgtgctgtatgttttttttttcccccttcactctaatggactgttccagggaagggatgggggcagcagctgcttcggatccacactgtatctgtgtcatccccacatgggtcctcataaaggattattcaatggaggcatcctgacatctgttcatttaggcttcagttccactcccaggaactttgcctgtcccacgagggagtatgggagagagggactgccacacagaagctgaagacaacacctgcttcaggggaacacaggcgcttgaaaaagaaaagagagaacagcccataatgctccccgggagcagaggccactaatggagagtgggaagagcctggaaagatgtggcctcaggaaaagggatgagagaaaggaggtggtatggaagactcagcaggaacaaggtaggcttcaaagagcctatattcctctttttcccacaccgatcaagtcaactcagtactcacgggagaaaaatagactttatttacaagtaataacatttagaaaagatccatccccggcccttaaaaaccttcccatcactccaaatcccaccccagtgcaagtctggggaaggtagggtgtgagctgctgctgaaggctgtcccccaaccccactcctgagacatagggcccatccgtcctgggaaagagcatcctctggcaggtgctcccaccaggtcagacccagtcctggacttcaagagtgagggcccctgctgggcccagccaccaggacagcaggaaccagggcctactcctcttatggtcccttctagatccagaggctaagaggaagactggccaggcccaaggacccagccatcaaaaccagcctcaaatctggttgtgatggagaagtgactttgctttaagaaaaaaggaggcaaggtagggagagcgcccacactgtccatgctccaggccccctgggccagctccgagaaggcgccagtgaaggaccagggaccaggccagggtgcgggcaggcatcactgtctctaggggtttggctactgttggcctgggagctgagagaaggcactgagagggacagtaggcggaggaccaggtgaggtcagcatcggggacacaggtggggccactcactggtactggccctttagtgctttgcctgaaagagacacagtcacatggccagatgagaacttgcgatactagcctgcacccactggctgggaagatctcttcctgctcccacgcccctgtctggatcccctcccttgtgagccccagggttatcagttgctggctgtgcctgagcagctctgggtgctctccatgagaatggggccatctgtcttctctccttggagaggagctaccagg

SEQ ID NO: 291881 - DNA, 600 bp, Artificial Sequence
  derived and/or modified sequence
atgaccatgagacacaactggacccccgacctgagccccctgtgggtgctgctgctgtgcgcccacgtggtgaccctgctggtgagagccacccccgtgagccagaccaccaccgccgccaccgccagcgtgagaagcaccaaggacccctgccccagccagccccccgtgttccccgccgccaagcagtgccccgccctggaggtgacctggcccgaggtggaggtgcccctgaacggcaccctgagcctgagctgcgtggcctgcagcagattccccaacttcagcatcctgtactggctgggcaacggcagcttcatcgagcacctgcccggcagactgtgggagggcagcaccagcagagagagaggcagcaccggcacccagctgtgcaaggccctggtgctggagcagctgacccccgccctgcacagcaccaacttcagctgcgtgctggtggaccccgagcaggtggtgcagagacacgtggtgctggcccagctgtgggtgagaagccccagaagaggcctgcaggagcaggaggagctgtgcttccacatgtggggcggcaagggcggcctgtgccagagcagcctgtag

SEQ ID NO: 291882 - DNA, 600 bp, Artificial Sequence
  derived and/or modified sequence
atgacaatgaggcataattggaccccagatctcagtcccttgtgggttctcctgctctgcgctcacgtggtcactttgctggtgcgcgctacccctgtttcacagaccactacagccgctactgcctctgtccggtcaacaaaagatccttgtccctcacagccgcctgtgttccctgctgccaagcagtgccccgctctagaagtaacctggcccgaagttgaggtgccactgaacgggacgctatcactgtcatgtgtagcttgctcccgattcccaaacttttcgattctatactggttaggaaatggctccttcatagaacatctgccaggtagactatgggaaggcagcaccagcagggaacgggggtctaccggaacacagctttgtaaggctttggtgctcgagcagttgaccccggcactgcacagtacgaactttagctgcgtgcttgtggacccagaacaggttgttcagcggcatgttgtgctggcccagctgtgggtccgctccccacgtcgtggcctgcaagagcaggaggagctgtgtttccacatgtggggcggcaaaggtggcctgtgtcagtcatctctgtag

SEQ ID NO: 291883 - DNA, 600 bp, Artificial Sequence
  derived and/or modified sequence
atgaccatgaggcacaactggaccccagacctgagccccctgtgggtgctgctgctgtgtgcccacgtggtgaccctgctggtgcgggccacccctgtgtcccagaccaccacagctgccacagcctctgtgcgcagcaccaaggacccctgccccagccagccccctgtgtttcctgctgccaagcagtgcccagccctggaggtgacctggccagaggtggaggtgcccctgaatggcaccctgagcctgagctgtgtggcctgcagccgcttccccaacttcagcatcctgtactggctgggcaatggcagcttcatcgagcacctgcccggccgcctgtgggagggcagcaccagccgggagcggggcagcacaggcacccagctgtgcaaggccctggtgctggagcagctgaccccagccctgcacagcaccaacttcagctgtgtgctggtggaccctgagcaggtggtgcagagacatgtggtgctggcccagctgtgggtgcgcagcccccggcggggcctgcaggagcaggaggagctgtgcttccacatgtggggcggcaaaggaggcctgtgccagagcagcctgtag

SEQ ID NO: 291884 - DNA, 600 bp, Artificial Sequence
  derived and/or modified sequence
atgaccatgcggcacaactggacccccgacctgagccccctgtgggtgttactcctctgtgctcacgttgtcacgttgctggtgcgagccactcctgtgtcacagaccactacggccgcgacggctagtgtgaggtccaccaaggacccctgtcctagtcagcctcccgtgttccccgcggctaagcagtgcccggccctcgaagtcacctggcccgaggtggaagtgcccctgaacggcaccctgagcctaagctgcgtggcgtgctcacggttccccaatttttcaatcctctactggctgggtaacgggtcttttatcgagcacctgcctggcaggctgtgggagggatccacgagccgcgagcgagggagcaccggtacgcaactctgtaaagccctggttttggagcagctaactccagccctccattcaacaaatttctcctgcgtgctggtggatcccgaacaggtggtccagcggcatgtagtcctcgcccaattgtgggtgagatccccgcgccggggcctccaggaacaggaagaactttgtttccacatgtggggcggaaaagggggcctgtgccagtcatccctgtag

SEQ ID NO: 291885 - RNA, 600 nt, Artificial Sequence
  derived and/or modified sequence
augacaaugcgacauaacuggacaccagaucuaucaccucuguggguccugcuacuuugugcccacguggucacucugcugguaagagcuacccccgucucucagaccacuacugcagcuacugcaagugugagaucuaccaaagacccuugcccaagucaacccccgguguucccagcagcgaagcaaugcccugcucuggaggugaccuggcccgagguggaaguuccucugaacggaacgcuuucucuuuccuguguggccuguucuagauuccccaacuuuucuaucuuauauuggcuuggcaauggcagcuucaucgagcacuuaccaggcagacugugggaagggagcacuagcagagaacgcggcucuacaggcacacagcuguguaaggcauuaguacuggaacaguuaacacccgcucuacacucgaccaacuuuaguugcguacugguggaccccgagcaggugguccagcggcacgucgugcuggcucagcucuggguucgaucgccuagaaggggguugcaggaacaagaagaauuguguuuccauaugugggguggaaaggggggccuuugucagucuagcuuguag

SEQ ID NO: 291886 - RNA, 600 nt, Artificial Sequence
  derived and/or modified sequence
augaccaugcgccacaacuggaccccugaucucuccccauuauggguccugcuacucugugcucacgucgugacacuccuaguuagagcuacgccaguuucccagaccaccaccgccgccaccgccucugugagauccacgaaggacccaugccccagccaacccccggucuuccccgcagccaaacagugcccagcccuggaagugacuuggccugaggucgaagugccauuaaacgguacccuuagccuguccugcguugcgugcagccguuucccaaacuuuuccauuuuauacuggcuuggaaaugguagcuuuauugaacaucugccagggagacugugggagggcuccacaucucgagaaagaggaaguaccgguacucagcuuugcaaagcgcuuguccuggaacaguuaacuccggcgcuacacucuacaaacuucagcuguguucucgucgauccugaacagguuguucagaggcaugugguccuggcccaguugugggugcggucaccacguaggggucugcaagagcaagaggagcuguguuuccauauguggggaggcaaaggcgggcucugucaaaguagccuuuag

SEQ ID NO: 291887 - DNA, 249 bp, Artificial Sequence
  derived and/or modified sequence
atggatcccggacctaaagggcactgccactgcggaggtcacggccatccgccaggacattgtggtccaccacccggtcatgggcctggcccttgtggacccccacctcatcacggccctggtccctgtgggcctccgccagggcatgggccaggcccatgtggcccaccgccacatcacgggcctggtccatgtggccctccaccgggacatggcccagggcacccgcctcctggcccacaccactag

SEQ ID NO: 291888 - DNA, 1407 bp, Artificial Sequence
  derived and/or modified sequence
atgtggctgtacagaagatactacagcaacgtgtgccagagaaccctgagcttcaccatcttcctgatcctgttcctggccttcatcgagacccccagcagcctgaccagcaccgccgacgtgagatacagagccgccccctgggagcccccctgcggcctgaccgagagcgtggaggtgctgtgcctgctggtgttcgccgccgacctgagcgtgaagggctacctgttcggctgggcccacttccagaagaacctgtggctgctgggctacctggtggtgctggtggtgagcctggtggactggaccgtgagcctgagcctggtgtgccacgagcccctgagaatcagaagactgctgagacccttcttcctgctgcagaacagcagcatgatgaagaagaccctgaagtgcatcagatggagcctgcccgagatggccagcgtgggcctgctgctggccatccacctgtgcctgttcaccatgttcggcatgctgctgttcgccggcggcaagcaggacgacggccaggacagagagagactgacctacttccagaacctgcccgagagcctgaccagcctgctggtgctgctgaccaccgccaacaaccccgacgtgatgatccccgcctacagcaagaacagagcctacgccatcttcttcatcgtgttcaccgtgatcggcagcctgttcctgatgaacctgctgaccgccatcatctacagccagttcagaggctacctgatgaagagcctgcagaccagcctgttcagaagaagactgggcaccagagccgccttcgaggtgctgagcagcatggtgggcgagggcggcgccttcccccaggccaccagaagaggccccagcaccagcctgagattctgcagagcccccagcagcagcagcgccaccaccaccctgaccacctggggcaccagcagcccctggcagacctggtgccccttcgcctgcagctggtgctggatgcagatgtgctgcctgctgagcgtgatgaccagcagctggggcttcagcaccgccagcagcctgtgcaccacctgctggagatgctgcagcagaagcctgccctgggcctgcgagggcacctgccccacccccgccacctgcctgaccggcagcagccccctgagctgctggagacccgagatggtgggcctgctgagcctgtgggacatgaccagaatgctgaacatgctgatcgtgttcagattcctgagaatcatccccagcatgaagctgatggccgtggtggccagcaccgtgctgggcctggtgcagaacatgagagccttcggcggcatcctggtgcccggcccctgccagtggctgggcgccctgtgggagctgagagccgccggcgtgctgggccagcagctgagatag

SEQ ID NO: 291889 - DNA, 1407 bp, Artificial Sequence
  derived and/or modified sequence
atgtggctctacaggagatactacagtaacgtgtgccaacgcaccttgtcgttcaccatcttcctcatcctatttctagctttcatcgagacccccagcagtttaacgagtacagccgatgtgcgatatagagccgcaccctgggaaccaccctgcggcttgacagagagcgtggaagtgctttgtctgctggtgtttgccgccgatttgagtgtgaaaggttacctctttggatgggcccatttccaaaagaatctatggctcctcggttatctggtggttttggtggtttccctggtcgactggacagtctcactgagcctcgtgtgccacgagcccttgcgaatcagacgcttgcttagaccatttttcttgctacagaatagctctatgatgaagaagacattaaaatgcatacgctggtccctaccagaaatggcatccgtcggtctcctcctcgctatccatctgtgtttgttcacaatgtttggaatgctacttttcgcaggtggcaagcaagacgatgggcaggatagggaacgactgacatactttcagaacctgcctgagagcctcacaagcctccttgttctactcacaaccgctaataaccctgacgtgatgatcccagcctacagcaaaaatagggcctacgcaattttcttcatcgtcttcacggttataggctctctcttcctgatgaacctcctgacggccataatctatagccaatttcgtggttatctgatgaagtcactacaaaccagtctgttccgccgtcgactgggcactcgggccgcgttcgaggttctcagcagcatggtgggcgaagggggcgctttccctcaggccacacgcagaggaccgagtacctctctgagattctgtagggctcccagttcctctagtgcgaccaccacactgacgacgtggggaacaagctccccttggcaaacttggtgtccgtttgcctgttcatggtgttggatgcagatgtgttgcctgctctccgtgatgacatcttcctggggattctccaccgccagctcattgtgtaccacgtgctggcgttgctgctctcggtccctgccatgggcatgcgaaggaacatgccccactccggccacctgcctgacaggttccagccccttgagttgctggagaccagagatggtgggattgctctctctctgggacatgacacggatgctgaacatgctgatcgtttttcggttccttcgcatcattcctagcatgaaactcatggccgttgtcgcttctacagtgttgggcctcgtgcaaaacatgcgggcctttgggggcatcctcgtgcctggcccgtgtcagtggttaggggctctatgggaactgagagctgcaggcgtgctgggccaacagcttcggtag

SEQ ID NO: 291890 - DNA, 1407 bp, Artificial Sequence
  derived and/or modified sequence
atgtggctgtaccgccgctactacagcaatgtgtgccagaggaccctgtccttcaccatcttcctgatcctcttcctggccttcatcgagacccccagcagcctgaccagcacagcagatgtgcgctacagagctgccccctgggagcccccctgtggcctgacagaatctgtggaggtgctgtgcctgctggtgtttgctgctgacctgtctgtgaagggctacctgtttggctgggcccacttccagaagaacctgtggctgctgggctacctggtggtgctggtggtgtccctggtggactggacagtgtccctgagcctggtgtgccacgagcccctgcgcatccggcggctgctgcggcccttcttcctgctgcagaacagctccatgatgaagaagaccctgaagtgcatccgctggagcctgcctgagatggcctctgtgggcctgctgctggccatccacctgtgcctcttcaccatgtttggcatgctgctgtttgctgggggcaagcaggatgatggccaggaccgggagcggctgacctacttccagaacctgcctgagagcctgaccagcctgctggtgctgctgaccacagccaacaacccagatgtgatgatcccagcctacagcaagaacagagcctatgccatcttcttcatcgtgttcaccgtcatcggcagcctcttcctgatgaacctgctgacagccatcatctacagccagttccggggctacctgatgaagagcctgcagaccagcctcttcagaagaaggctgggcacccgggccgcctttgaggtgctgagctccatggtgggggagggcggggccttcccccaggccacccggcggggccccagcaccagcctgcgcttctgccgggcccccagcagcagcagcgccaccaccaccctgaccacctggggcaccagcagcccctggcagacctggtgcccctttgcctgctcctggtgctggatgcagatgtgctgcctgctgtctgtgatgaccagctcctggggcttcagcacagccagcagcctgtgcaccacctgctggcgctgctgcagccgcagcctgccctgggcctgtgagggcacctgccccaccccagccacctgcctgaccggcagcagccccctgagctgctggaggcctgagatggtgggcctgctgagcctgtgggacatgaccaggatgctgaacatgctgattgtgttccgcttcctgcgcatcatccccagcatgaagctgatggctgtggtggccagcacagtgctgggcctggtgcagaacatgagggcctttggaggcatcctggtgcccggcccctgccagtggctgggcgccctgtgggagctgcgggccgccggcgtgctgggccagcagctgaggtag

SEQ ID NO: 291891 - DNA, 1407 bp, Artificial Sequence
  derived and/or modified sequence
atgtggctgtaccggcggtactacagcaacgtgtgccagcggaccctaagctttacaattttcctgatcctcttcttagcttttatcgaaactccgagctctcttacctctacggctgacgtgagatacagagcagctccctgggaacctccttgtgggctgactgagagcgtggaggtcttatgcttgctcgtgtttgcagctgatttgagcgtcaaaggctacttgtttggatgggcacacttccagaaaaatctttggctgctgggctacttagttgtgctggtggtaagcctggtggactggacagtctcactgtcactggtgtgccatgaaccccttcggatccgccgtctgctaaggcccttcttccttctgcagaattccagcatgatgaagaagaccctgaaatgcattaggtggagcctccccgaaatggccagcgtgggcctgctgctcgccatacatttgtgcttgtttacaatgttcgggatgctacttttcgccggggggaaacaagacgacggacaagaccgagaacggctcacctacttccagaatctgcccgagagtttaacctcattgctcgtactcctgacaactgctaataaccctgacgtcatgattccagcctacagcaagaatcgcgcttacgccatttttttcatcgtgtttacagtgatcggtagcctgttccttatgaatctgctgaccgctataatctactcccaattcagagggtacctgatgaagtctctacagacgagtctgtttcgacggcgattagggaccagagcagcgttcgaggtcctgtccagcatggttggggaaggaggtgcattccctcaggccacacggcgaggtccttcaaccagcttgagattctgccgggcccccagttcttcctctgctaccaccacactgaccacgtggggaactagcagcccctggcagacatggtgtccattcgcctgtagctggtgctggatgcaaatgtgttgtctcctaagtgtgatgacgtcaagctgggggttttcaaccgcctctagcctgtgtaccacatgctggcggtgctgcagccgtagcctcccctgggcttgcgaaggcacttgtcctaccccggctacttgtttaactgggtcatcaccactttcttgctggcggcccgagatggtgggcctgctttcactctgggatatgacccggatgttaaacatgctgatcgttttccggttcctccggattattccatcaatgaaattgatggcggtggtggctagtacggtactgggcctagtgcaaaacatgagggccttcggggggatcctggtcccggggccctgccaatggctcggcgcattgtgggagctgcgggccgccggagtgttgggacagcagttacgttag

SEQ ID NO: 291892 - DNA, 1407 bp, Artificial Sequence
  derived and/or modified sequence
atgtggctgtacagaagatactactccaatgtctgccagaggaccttatcttttactatttttcttatcctgttcctggctttcatcgaaacccctagcagcctcacgtccacggccgacgtgagataccgagccgctccatgggagccaccatgcgggcttacagaatcagtggaggttctgtgtttattggtgttcgctgcggatctcagcgtgaaggggtacttgttcggatgggctcacttccagaagaatctatggctcttaggctacctggtagttctggtcgtgtcccttgttgactggaccgtgtcattgtcacttgtttgccatgagcccctccgcatccggaggctgttacgccctttctttctgctgcagaattcatccatgatgaaaaaaaccctcaagtgcattagatggtccctcccggagatggcttcggtgggactcttgttggctatacacctctgcctgttcactatgtttggcatgctactgttcgccggaggaaaacaggatgacgggcaagatagggaaagactaacatatttccagaacctgcccgagtccctcaccagtctcctggtcctcctgaccacagcgaataatccagacgtgatgatccctgcctactcgaaaaaccgcgcatacgctatcttcttcatcgttttcacagtgattggatctctcttcctgatgaatcttctgaccgctattatttacagccagttccgtgggtacctgatgaagtcgcttcagacaagcctgttccggaggcggttgggaaccagggctgccttcgaagtgcttagttctatggtgggtgaggggggagccttcccgcaggcaacaagacgcggaccctctacctctctgagattctgccgcgctcccagttcttcttctgcaaccacaacattaacgacctggggaacctctagtccctggcagacctggtgtccattcgcttgctcctggtgctggatgcagatgtgctgcttattgagtgtgatgacaagctcctggggcttttcgactgcatcgtccctgtgtactacctgttggcgctgctgtagccgcagcctgccctgggcttgtgaaggaacgtgtcccacccctgctacatgcttaactggatccagccctttatcctgctggcggcctgagatggtgggcttactgtcgctttgggatatgactaggatgctaaatatgttaattgttttccggtttctgcggattattccctccatgaaacttatggccgtcgtggcatccacagtgctcgggttagttcagaacatgagggctttcggaggtattctcgtacctggcccatgccagtggctgggggctctgtgggagctgcgagcggctggtgtactgggacagcagctgaggtag

SEQ ID NO: 291893 - DNA, 4730 bp, Artificial Sequence
  derived and/or modified sequence
tgccgtgcgcgcgtcagcaaaaacgccagggacggggtctccgcgcctgcgcagtgaagctgggcgccttcggggcttgagcttctgagggtcgggtccagcgcgtgggctgctggatggcggaaccccaggcggagtcggagcccctgctgggcggggcccgcggcggtggcggcgactggccggcggggctgaccacttaccgcagcatccaagtcggccctggtgccgcggccaggtgggacctctgcattgatcaggctgtggtcttcatcgaagatgctattcagtaccgctccatcaaccaccgggtggatgccagctcgatgtggctttaccgacggtattactcgaacgtatgccaacggactttgagcttcaccatcttcttgatcctgtttttggcttttatcgagaccccatcctcactcaccagcacggcggacgtgcgctaccgcgctgctccctgggagccgccctgcggcctgaccgagagtgtcgaggtgctctgcctgctggtctttgcggccgacctctctgtgaagggttacctgttcgggtgggcccatttccagaaaaacctttggctgctgggctacctcgtggtgctggtggtgtctctggtggactggaccgtgtccctgagtctcgtgtgtcatgagcccctgcggatccgccggcttctccgtcccttcttcctgctgcagaactcctctatgatgaagaagaccttgaaatgcatccgctggtcgctgccggaaatggccagcgtcgggctgctgctggccatccacctgtgcctcttcaccatgttcggaatgctgctgttcgctggtgggaagcaggatgatgggcaggacagggagaggctgacctacttccagaacctgcctgagtctctgacttccctcctggtgctgctgaccacggccaacaaccccgatgtgatgattcctgcgtattccaagaaccgggcctatgccatcttcttcatagtcttcactgtgataggaagcctgtttctgatgaacctgctgacagccatcatctacagtcagttccggggctacctgatgaaatctctccagacctcgctgtttcggaggcggctgggaacccgggctgcctttgaagtcctatcctccatggtgggggagggaggagccttccctcaggccacccgccgaggcccgagtaccagtctccgtttctgcagagcgcccagttcctcttcggccactactactttgactacctggggaacctcatcgccctggcaaacctggtgtccatttgcgtgttcctggtgctggatgcagatgtgctgcctgctgagcgtgatgacttcatcctggggattctcaactgcgtcttcattgtgtactacctgttggagatgctgctcaaggtctttgccctgggcctgcgagggtacctgtcctaccccagcaacgtgtttgacgggctcctcaccgttgtcctgctggaggccggagatggtgggcctgctgtcgctgtgggacatgacccgcatgctgaacatgctcatcgtgttccgcttcctgcgtatcatccccagcatgaagctgatggccgtggtggccagtaccgtcctgggcctggtgcagaacatgcgtgcgtttggcgggatcctggtgcctggcccctgccaatggctcggcgccctgtgggagcttcgagcagctggagtactgggccaacaacttcgatgactttgcggctgccctggtcactctgtggaacttgatggtggtgaacaactggcaggtgtttctggatgcatatcggcgctactcaggcccgtggtccaagatctattttgtattgtggtggctggtgtcgtctgtcatctgggtcaacctgtttctggccctgattctggagaacttccttcacaagtgggacccccgcagccacctgcagccccttgctgggaccccagaggccacctaccagatgactgtggagctcctgttcagggatattctggaggagcccggggaggatgagctcacagagaggctgagccagcacccgcacctgtggctgtgcaggtgacgtccgggctgccgtcccagcaggggcggcaggagagagaggctggcctacacaggtgcccgtcatggaagaggcggccatgctgtggccagccaggcaggaagagacctttcctctgacggaccactaagctggggacaggaaccaagtcctttgcgtgtggcccaacaaccatctacagaacagctgctggtgcttcagggaggcgccgtgccctccgctttcttttatagctgcttcagtgagaattccctcgtcgactccacagggacctttcagacaaaaatgcaagaagcagcggcctcccctgtcccctgcagcttccgtggtgcctttgctgccggcagcccttggggaccacaggcctgaccagggcctgcacaggttaaccgtcagacttccggggcattcaggtggggatgctggtggtttgacatggagagaaccttgactgtgttttattatttcatggcttgtatgagtgtgactgggtgtgtttctttagggttctgattgccagttattttcatcaataagtcttgcaaagaatgggattgtcattcttcacttcagcacagttctagtcctgcttctctggagtagggttgttgagtaaggttgcttgggttgtgcattgcacaagggcacatggctgtgaggtgtatcctggcggggggctgtctacctgcagtgaggggcaccttttctgttttgctcaaaggcatgtataagccaatgggtgaccttatttcctgtgtcttcaggtgtgtggcagggggcctggggtggggaggtggggcgagcgagcagtgtgtggaaagccttgttgtcacctgaagcacgccaggtccagattgaccaatggttttctcacttcaggggccaacccacgccccctttctgctgaggtttgggtgccatctagtggtgggatgggacttggttgactacatttaaggtaaggtggacccagcaactcccagaaacaactccggggacaccactccccatcacactccacaccgagcctggtgcccggtctgtgcccgagctcagcgggaccaggaagggatgggccctgccagggttgcccctgcactgtgcattctcgcctgggaggcacaagttctttcatctgcttttccttcagaggtgctgagcccacgccatagcccctgtgggatggtgggggagggggcgacccgaacaacagtgcagtcggtatcgagattggggagaggagcgagtccaaggagaaggtcatgagtttctttttactcgtgttgaataataacaataacaataacaataacaatatggaaaccaccgcaaacttggagaaaagttgtaagcacagtaaagagaagcttccttctgagtcacttgagtggttgccgttctggccctgcaccctctgtgctttgggacggcgtccaacccgcattcatgtcaggagtgagtcgcacgtggctttgtggtcatggcgacttaatccgcctggacggtggctccgtctccctgggcttagacgaccttggcacttctggagataagcccatggctcccaggttgtgttcatgtgacgtttccttgtggtaggttctgggtctgcgtttcgtctaggagtgtcacaggatggacactgcctcctggcaggggctgcccaatgcagttagcctcctgctggtgttctctcttgttgcttggtgaaggtggccctggtcagcttctccactgcccagtgaacgacccctttgtaatgaatgagtggggaggtagtgtgaagcgatgccaatatcccatccctgtcaaactgcctttactttttccttccttccttgctcccacctgtgtggatcctggtcccttcttgtattcagggctgtggtctgttatgacatttactctcaggctcaggtcctgcttgtttggcccgtgggagccccttcttctgccttttgtgttttttttgttatgtacctacagttctttagctgtttctttactttctggtgcaaaaagatgttcaagccttattttatacttgcctgcccctttctctttcatttattggagtgagctgcagctctaagaagacctgttcttttgaatggagagtagcatcaggaaccaggatgtgggtgcgaggcgtgctcctggctgttgcagattgctgcacccgggagctcttagtggacagagctagaggatatgtgcacgtacttccatctctctctctgtctcatctattcacagctgggaatgatactaatacctccgattttagcccagcaccacagggtacgttccagtttttctctctttccatagctgtaaggccctttctgggaatggttctcattctccttaatctattattgggtcagttttcctgcatgtccccagcctcccatcactgccacccactccccacagagatgccctgctcatccgactggggctttgactcccacactgtgtacccctcttgtgtggacgccctgctgccaaaaccttcagcaaacagctttccaaatggaagttgtcactgtcagggcctttacaatcagcaacagcaaaatctacatgctgctgagggtcctgcctcattaagatgcaataaatatgtaagtacataaaaacagcaatag

SEQ ID NO: 291894 - protein, 206 aa, Artificial Sequence
  derived and/or modified sequence
MSGPGTAAVALLPAVLLALLAPWAGRGGAAAPTAPNGTLEAELERRWESLVALSLARLPVAAQPKEAAVQSGAGDYLLGIKRLRRLYCNVGIGFHLQALPDGRIGGAHADTRDSLLELSPVERGVVSIFGVASRFFVAMSSKGKLYGSPFFTDECTFKEILLPNNYNAYESYKYPGMFIALSKNGKTKKGNRVSPTMKVTHFLPRL

SEQ ID NO: 291895 - DNA, 1220 bp, Artificial Sequence
  derived and/or modified sequence
gggagcgggcgagtaggagggggcgccgggctatatatatagcggctcggcctcgggcgggcctggcgctcagggaggcgcgcactgctcctcagagtcccagctccagccgcgcgctttccgcccggctcgccgctccatgcagccggggtagagcccggcgcccgggggccccgtcgcttgcctcccgcacctcctcggttgcgcactcctgcccgaggtcggccgtgcgctcccgcgggacgccacaggcgcagctctgccccccagcttcccgggcgcactgaccgcctgaccgacgcacggccctcgggccgggatgtcggggcccgggacggccgcggtagcgctgctcccggcggtcctgctggccttgctggcgccctgggcgggccgagggggcgccgccgcacccactgcacccaacggcacgctggaggccgagctggagcgccgctgggagagcctggtggcgctctcgttggcgcgcctgccggtggcagcgcagcccaaggaggcggccgtccagagcggcgccggcgactacctgctgggcatcaagcggctgcggcggctctactgcaacgtgggcatcggcttccacctccaggcgctccccgacggccgcatcggcggcgcgcacgcggacacccgcgacagcctgctggagctctcgcccgtggagcggggcgtggtgagcatcttcggcgtggccagccggttcttcgtggccatgagcagcaagggcaagctctatggctcgcccttcttcaccgatgagtgcacgttcaaggagattctccttcccaacaactacaacgcctacgagtcctacaagtaccccggcatgttcatcgccctgagcaagaatgggaagaccaagaaggggaaccgagtgtcgcccaccatgaaggtcacccacttcctccccaggctgtgaccctccagaggacccttgcctcagcctcgggaagcccctgggagggcagtgccgagggtcaccttggtgcactttcttcggatgaagagtttaatgcaagagtaggtgtaagatatttaaattaattatttaaatgtgtatatattgccaccaaattatttatagttctgcgggtgtgttttttaattttctggggggaaaaaaagacaaaacaaaaaaccaactctgacttttctggtgcaacagtggagaatcttaccattggatttctttaacttgt

SEQ ID NO: 291896 - DNA, 621 bp, Artificial Sequence
  derived and/or modified sequence
atgagcggccccggcaccgccgccgtggccctgctgcccgccgtgctgctggccctgctggccccctgggccggcagaggcggcgccgccgcccccaccgcccccaacggcaccctggaggccgagctggagagaagatgggagagcctggtggccctgagcctggccagactgcccgtggccgcccagcccaaggaggccgccgtgcagagcggcgccggcgactacctgctgggcatcaagagactgagaagactgtactgcaacgtgggcatcggcttccacctgcaggccctgcccgacggcagaatcggcggcgcccacgccgacaccagagacagcctgctggagctgagccccgtggagagaggcgtggtgagcatcttcggcgtggccagcagattcttcgtggccatgagcagcaagggcaagctgtacggcagccccttcttcaccgacgagtgcaccttcaaggagatcctgctgcccaacaactacaacgcctacgagagctacaagtaccccggcatgttcatcgccctgagcaagaacggcaagaccaagaagggcaacagagtgagccccaccatgaaggtgacccacttcctgcccagactgtag

SEQ ID NO: 291897 - DNA, 621 bp, Artificial Sequence
  derived and/or modified sequence
atgtcaggtcccggaaccgctgctgtcgccctgcttccggccgtgcttcttgcactgctggccccatgggccggccgaggcggcgcagccgctcccacggcccccaacggcacgctggaggccgaactggaacgtcgctgggagtcgctggtggccctgagcctggccaggctgccagtggccgctcagcccaaagaggctgccgttcagagtggagctggcgactatcttcttggaataaaaaggctccggaggctctactgcaacgtcggcatcggtttccacttgcaggcgcttcctgatggccgaattggcggagcccacgccgatacacgtgacagcctactagagctttcccccgtcgagcgcggggtagtcagtatctttggggtcgcgagtcgatttttcgtggccatgagtagcaaagggaaactgtacggctccccattttttactgacgagtgtacgttcaaggaaattctcttgccgaacaactacaacgcatacgagtcttacaaataccctggtatgtttattgcattatccaagaacggtaagaccaaaaagggcaacagagtatcccccactatgaaagtgacacactttctacctagactgtag

SEQ ID NO: 291898 - DNA, 621 bp, Artificial Sequence
  derived and/or modified sequence
atgagcggccctggaacagctgctgtggccctgctgcctgctgtgctgctggccctgctggccccctgggccggccggggcggggccgccgcccccacagcccccaacggcaccctggaggccgagctggagcggcgctgggagagcctggtggccctgagcctggcccggctgcctgtggccgcccagcccaaggaggccgctgtgcagagcggggccggggactacctgctgggcatcaagaggctgcggcggctgtactgcaatgtgggcatcggcttccacctgcaggccctgcctgatggccgcatcggcggggcccatgctgacacccgggacagcctgctggagctgagccctgtggagcggggcgtggtgtccatctttggagtggccagccgcttctttgtggccatgagcagcaagggcaagctgtatggcagccccttcttcacagatgagtgcaccttcaaggagatcctgctgcccaacaactacaatgcctatgagagctacaagtacccaggcatgtttattgccctgagcaagaatggcaagaccaagaagggcaacagagtgagccccaccatgaaggtgacccacttcctgccccggctgtag

SEQ ID NO: 291899 - DNA, 621 bp, Artificial Sequence
  derived and/or modified sequence
atgagcggccccggcaccgccgccgtggccctgctgcccgccgtgctgctggccttgctagccccctgggctggacggggtggggctgcagcaccaactgcccccaacggaacactggaagccgagttggagcggcgctgggagtctctggtggcattgagtttggcacgactgcctgtggccgcacagccaaaggaggcggccgtccagtcaggtgccggcgattatctgctcgggatcaaacgtctacgccggctgtactgcaacgtggggattggcttccatctgcaggcgctgccagatggtcgcatcggcggagcacacgcagatacccgcgacagcctgcttgaactctcacccgtcgagcgcggggtggtttctatcttcggtgttgcttcacgcttcttcgtcgccatgtcgagtaaggggaaactttacggcagtccatttttcacagatgaatgcacatttaaagagatccttcttcccaataattacaacgcctatgaatcatacaagtatccaggcatgttcatagctctctctaaaaatggcaaaacgaagaagggcaaccgcgtgtctccgactatgaaggtcactcacttcctacccagactgtag

SEQ ID NO: 291900 - DNA, 621 bp, Artificial Sequence
  derived and/or modified sequence
atgtccggtcctggcacagctgcagtagcactgttaccggctgtactgcttgccctgcttgccccttgggctggtagggggggtgctgccgctcccaccgcaccaaacgggacactcgaggcagagctcgaacgcagatgggaaagcctagtggctctgtctcttgcccgtttacccgtggcggcacagcccaaagaggccgctgtgcagtcaggggctggggactatttactgggcatcaaacgtctacggcgactgtattgcaacgttggaatcgggttccatctgcaggctcttccagatggcagaataggtggagcccacgctgacacacgggacagcttgctggaactgagcccggtcgagcgaggagtggtgtctatctttggggtggctagccggtttttcgtcgctatgtccagcaaaggcaagctatatggaagccctttttttacagacgaatgcacttttaaagaaatccttctgccgaacaattataatgcatacgagtcgtataagtatccaggaatgtttatcgctctctcaaagaacggcaaaaccaagaagggcaaccgcgtttccccaaccatgaaagtcactcactttttgcctaggctctag

SEQ ID NO: 291901 - DNA, 621 bp, Artificial Sequence
  derived and/or modified sequence
atgtcagggcccggaacggccgccgtcgctctgctgcccgcagtactcctcgcgctcttagccccttgggctgggagaggcggggccgcagcaccaaccgcaccgaatggaacgctggaggccgagctagaacgccgttgggagtcacttgtggccttgtcccttgcaagattaccagtcgcagctcagcctaaagaagcagcggttcagtccggcgccggagactacctgcttggaattaaaagactgcgaagactgtactgtaatgtagggatcggatttcacctgcaggctctgcctgacgggcgaatcggaggggcccatgctgacacaagggatagtctcctggaactgtctcctgtcgaaaggggcgtggtttccattttcggtgtagcttccagattctttgtggcaatgtcctcgaaaggaaagctctacggcagccccttttttacagatgagtgtacatttaaagaaatattgctgccaaacaattataatgcttacgaatcatacaagtacccaggtatgtttatcgctttatccaagaatggcaagacaaagaaaggaaaccgtgtctcccccactatgaaggtaacccacttcctgcccagattatag

SEQ ID NO: 291902 - DNA, 621 bp, Artificial Sequence
  derived and/or modified sequence
atgagcggaccaggcacagcggccgtagcactgctaccagccgtcttactcgctctgctggcaccctgggctggaagaggaggcgcagccgccccgaccgcacccaatggcactttggaagcggagctggagaggcgatgggagtccctggtggcgctgtccctggctcgactgccggttgctgcacaaccaaaagaggctgctgttcagagcggggcaggagactacttactcggcatcaagaggctaaggaggttgtactgcaacgtgggcattgggtttcatttgcaggccttaccggatggacgtataggcggcgcgcacgctgacactagagacagcctgttggagctgagccccgtggaacgaggagtggtgtccatcttcggagtggcgagtcgatttttcgttgcaatgagttctaaaggaaaattgtacgggtcacctttctttacagatgaatgcaccttcaaagaaattcttctgccaaacaactataacgcctatgaatcttacaagtatccagggatgttcatagccctcagcaagaatgggaagactaagaaagggaatcgtgtatcccctaccatgaaagtcacacatttcctccctcggctttag

SEQ ID NO: 291903 - RNA, 621 nt, Artificial Sequence
  derived and/or modified sequence
augucagggcccggaacggccgccgucgcucugcugcccgcaguacuccucgcgcucuuagccccuugggcugggagaggcggggccgcagcaccaaccgcaccgaauggaacgcuggaggccgagcuagaacgccguugggagucacuuguggccuugucccuugcaagauuaccagucgcagcucagccuaaagaagcagcgguucaguccggcgccggagacuaccugcuuggaauuaaaagacugcgaagacuguacuguaauguagggaucggauuucaccugcaggcucugccugacgggcgaaucggaggggcccaugcugacacaagggauagucuccuggaacugucuccugucgaaaggggcgugguuuccauuuucgguguagcuuccagauucuuuguggcaauguccucgaaaggaaagcucuacggcagccccuuuuuuacagaugaguguacauuuaaagaaauauugcugccaaacaauuauaaugcuuacgaaucauacaaguacccagguauguuuaucgcuuuauccaagaauggcaagacaaagaaaggaaaccgugucucccccacuaugaagguaacccacuuccugcccagauuauag

SEQ ID NO: 291904 - RNA, 621 nt, Artificial Sequence
  derived and/or modified sequence
augagcggaccaggcacagcggccguagcacugcuaccagccgucuuacucgcucugcuggcacccugggcuggaagaggaggcgcagccgccccgaccgcacccaauggcacuuuggaagcggagcuggagaggcgaugggagucccugguggcgcugucccuggcucgacugccgguugcugcacaaccaaaagaggcugcuguucagagcggggcaggagacuacuuacucggcaucaagaggcuaaggagguuguacugcaacgugggcauuggguuucauuugcaggccuuaccggauggacguauaggcggcgcgcacgcugacacuagagacagccuguuggagcugagccccguggaacgaggagugguguccaucuucggaguggcgagucgauuuuucguugcaaugaguucuaaaggaaaauuguacgggucaccuuucuuuacagaugaaugcaccuucaaagaaauucuucugccaaacaacuauaacgccuaugaaucuuacaaguauccagggauguucauagcccucagcaagaaugggaagacuaagaaagggaaucguguauccccuaccaugaaagucacacauuuccucccucggcuuuag

SEQ ID NO: 291905 - DNA, 499 bp, Artificial Sequence
  derived and/or modified sequence
tgacagcaaaggacaggccaccaggagccaagagcatcttcatggcaaggactacttccagcaacccagtctcctgccatgtccgaccccatcacgctgaacgtcggggggaagctctatacaacctcactggcgaccctgaccagcttccctgactccatgctaggcgccatgttcagcgggaagatgcccaccaagagggacagccagggcaactgcttcattgaccgtgacggcaaagtgttccgctatatcctcaacttcctgcggacctcccaccttgacctgcctgaggacttccaggagatggggctgctccgcagggaggccgacttctaccaggtgcagcccctgattgaggccctgcaggagaaggaagtggagctctccaaggccgagaagaatgccatgctcaacatcacactgaaccagcgtgtgcagacggtccacttcactgtgcgcgaggcaccccagatctacagcctctcctcttccagca

SEQ ID NO: 291906 - DNA, 726 bp, Artificial Sequence
  derived and/or modified sequence
agagcgagggcaggaggtgggtgcggcacggccggggtcgcggggctcggggactaccggcgaggatgcagaggagaaggaatgaattccagctgagagacctggccgatgcatgggatttgtcttcaaggtccaggcagaggggatggcagatgccaaattgcagaagtcgaagagggcccagtatggttggtctgtaaagactacttccagcaacccagtctcctgccatgtccgaccccatcacgctgaacgtcggggggaagctctatacaacctcactggcgaccctgaccagcttccctgactccatgctaggcgccatgttcagcgggaagatgcccaccaagagggacagccagggcaactgcttcattgaccgtgacggcaaagtgttccgctatatcctcaacttcctgcggacctcccaccttgacctgcctgaggacttccaggagatggggctgctccgcagggaggccgacttctaccaggtgcagcccctgattgaggccctgcaggagaaggaagtggagctctccaaggccgagaagaatgccatgctcaacatcacactgaaccagcgtgtgcagacggtccacttcactgtgcgcgaggcaccccagatctacagcctctcctcttccagcatggaggtcttcaacgccaacatcttcagcacctcctgcctcttcctcaagctccttggctctaagctcttctact

SEQ ID NO: 291907 - DNA, 538 bp, Artificial Sequence
  derived and/or modified sequence
aaagctgcgctggccgctcgcggagggagaggctgcagagcgagggcaggagacaaatgaccgggagccatgacgtcatcgggggcgcaggaaagcaggtgctctgctgcttttgcaagcagagaaataagagtttgggcacctacccaggggtcccagggaatgccctgtggctcctgacctcccccgcctgtaatgctctgagcacttcagcagtaatgcatggaagagataagggtctgtgacccatggaactgtccaagtcctctctgacacccgcttcttttcctgccgtgaaggctggagttctgtggcgtaatcacggctcactgcagcctcaacctcccagactcaagcgatcctcccacctcagcctcccaagtagttgggactacaggactacttccagcaacccagtctcctgccatgtccgaccccatcacgctgaacgtcggggggaagctctatacaacctcactggcgaccctgaccagcttccctgactccatgctaggcgccatgttcagcgggaagatgc

SEQ ID NO: 291908 - DNA, 559 bp, Artificial Sequence
  derived and/or modified sequence
aaagctgcgctggccgctcgcggagggagaggctgcagagcgagggcaggagacaaatgaccgggagccatgacgtcatcgggggcgcaggaaagcaggtgctctgctgcttttgcaagcagagaaataagagtttgggcacctacccaggggtcccagggaatgccctgtggctcctgacctcccccgcctgtaatgctctgagcacttcagcagtaatgcatggaagagataagggtctgtgacccatggaactgtccaagtcctctctgacacccgcttcttttcctgccgtgaaggactacttccagcaacccagtctcctgccatgtccgaccccatcacgctgaacgtcggggggaagctctatacaacctcactggcgaccctgaccagcttccctgactccatgctaggcgccatgttcagcgggaagatgcccaccaagagggacagccagggcaactgcttcattgaccgtgacggcaaagtgttccgctatatcctcaacttcctgcggacctcccaccttgacctgcctgaggacttccaggagatg

SEQ ID NO: 291909 - protein, 140 aa, Artificial Sequence
  derived and/or modified sequence
MSDPITLNVGGKLYTTSLATLTSFPDSMLGAMFSGKMPTKRDSQGNCFIDRDGKVFRYILNFLRTSHLDLPEDFQEMGLLRREADFYQVQPLIEALQEKEVELSKAEKNAMLNITLNQRVQTVHFTVREAPQIYSLSSSS

SEQ ID NO: 291910 - protein, 165 aa, Artificial Sequence
  derived and/or modified sequence
MSDPITLNVGGKLYTTSLATLTSFPDSMLGAMFSGKMPTKRDSQGNCFIDRDGKVFRYILNFLRTSHLDLPEDFQEMGLLRREADFYQVQPLIEALQEKEVELSKAEKNAMLNITLNQRVQTVHFTVREAPQIYSLSSSSMEVFNANIFSTSCLFLKLLGSKLFY

SEQ ID NO: 291911 - protein, 116 aa, Artificial Sequence
  derived and/or modified sequence
MSDPITLNVGGKLYTTSLATLTSFPDSMLGAMFSGKMPTKRDSQGNCFIDRDGKVFRYILNFLRTSHLDLPEDFQEMGLLRREADFYQVQPLIEALQEKEVELSKAEKNAMLNITL

SEQ ID NO: 291912 - DNA, 783 bp, Artificial Sequence
  derived and/or modified sequence
atgagcgaccccatcaccctgaacgtgggcggcaagctgtacaccaccagcctggccaccctgaccagcttccccgacagcatgctgggcgccatgttcagcggcaagatgcccaccaagagagacagccagggcaactgcttcatcgacagagacggcaaggtgttcagatacatcctgaacttcctgagaaccagccacctggacctgcccgaggacttccaggagatgggcctgctgagaagagaggccgacttctaccaggtgcagcccctgatcgaggccctgcaggagaaggaggtggagctgagcaaggccgagaagaacgccatgctgaacatcaccctgaaccagagagtgcagaccgtgcacttcaccgtgagagaggccccccagatctacagcctgagcagcagcagcatggaggtgttcaacgccaacatcttcagcaccagctgcctgttcctgaagctgctgggcagcaagctgttctactgcagcaacggcaacctgagcagcatcaccagccacctgcaggaccccaaccacctgaccctggactgggtggccaacgtggagggcctgcccgaggaggagtacaccaagcagaacctgaagagactgtgggtggtgcccgccaacaagcagatcaacagcttccaggtgttcgtggaggaggtgctgaagatcgccctgagcgacggcttctgcatcgacagcagccacccccacgccctggacttcatgaacaacaagatcatcagactgatcagatacagatag

SEQ ID NO: 291913 - DNA, 423 bp, Artificial Sequence
  derived and/or modified sequence
atgagcgaccccatcaccctgaacgtgggcggcaagctgtacaccaccagcctggccaccctgaccagcttccccgacagcatgctgggcgccatgttcagcggcaagatgcccaccaagagagacagccagggcaactgcttcatcgacagagacggcaaggtgttcagatacatcctgaacttcctgagaaccagccacctggacctgcccgaggacttccaggagatgggcctgctgagaagagaggccgacttctaccaggtgcagcccctgatcgaggccctgcaggagaaggaggtggagctgagcaaggccgagaagaacgccatgctgaacatcaccctgaaccagagagtgcagaccgtgcacttcaccgtgagagaggccccccagatctacagcctgagcagcagcagctag

SEQ ID NO: 291914 - DNA, 783 bp, Artificial Sequence
  derived and/or modified sequence
atgtccgaccctattacactgaacgtcgggggaaagttgtacacaacctccctggcaacccttacatctttcccagactccatgcttggcgcaatgttctctggcaagatgccaaccaagcgagattctcagggcaattgcttcatcgatcgggacggaaaggtcttccggtatattctgaattttctcagaacctctcatttggatcttcctgaagactttcaagagatgggactcttgcgaagggaagcagacttctatcaggtccaaccattaatcgaggccctccaagagaaggaagtcgagctgtctaaagcagagaaaaacgcaatgcttaacattactttaaatcagcgggtgcaaacggtgcacttcactgtgcgcgaagcaccccagatttattcactgtccagttcgtctatggaagtgttcaatgccaacattttcagtacgtcatgtctgttcctaaaactgttgggatccaaattattctattgcagcaatggtaacttgagttctattacaagccatctccaggatccaaaccatttaactcttgattgggtggctaacgtggaaggcctgccggaggaggaatacactaaacaaaacctgaaacgcctgtgggtcgttcctgccaataaacagattaacagcttccaggtgttcgtggaagaagtcctcaagatcgcgttgagtgacgggttttgtattgacagctcgcatccgcacgctctggacttcatgaacaataagattattaggctcatacgataccgatag

SEQ ID NO: 291915 - DNA, 423 bp, Artificial Sequence
  derived and/or modified sequence
atgtctgatcccatcaccttgaacgttggaggtaaattatatacaaccagcttggcgacgctgactagctttcccgactcgatgcttggcgccatgttttccgggaagatgcccacaaagagagatagccagggaaactgcttcatagatcgcgatggcaaagtcttcaggtacatattgaatttcctgaggactagccacttggatctcccagaagatttccaggaaatggggctgctacgaagagaggcagacttttaccaggtgcagcctttaatcgaggcccttcaggagaaggaagtggaactcagcaaggccgaaaagaacgcgatgctcaatatcaccctcaaccagagggtacaaactgtacacttcactgtacgggaggctccgcagatctacagtctgtctagtagtagttag

SEQ ID NO: 291916 - DNA, 783 bp, Artificial Sequence
  derived and/or modified sequence
atgtctgaccccatcaccctgaatgtgggcggcaagctgtacaccaccagcctggccaccctgaccagcttcccagacagcatgctgggcgccatgttcagcggcaagatgcccaccaagagggacagccagggcaactgcttcatcgacagagatggcaaggtgttccgctacatcctgaacttcctgcggaccagccacctggacctgcctgaggacttccaggagatgggcctgctgcggcgggaggccgacttctaccaggtgcagcccctgattgaggccctgcaggagaaggaggtggagctgagcaaggccgagaagaatgccatgctgaacatcaccctgaaccagagggtgcagacagtgcacttcaccgtgcgggaggccccccagatctacagcctgagcagcagctccatggaggtgttcaatgccaacatcttcagcaccagctgcctcttcctgaagctgctgggcagcaagctgttctactgcagcaatggaaacctgagcagcatcaccagccacctgcaggaccccaaccacctgaccctggactgggtggccaacgtggagggcctgcctgaggaggagtacaccaagcagaacctgaagaggctgtgggtggtgcctgccaacaagcagatcaacagcttccaggtgtttgtggaggaggtgctgaagatcgccctgagtgatggcttctgcatcgacagcagccacccccacgccctggacttcatgaacaacaagatcatccgcctcatccgctacagatag

SEQ ID NO: 291917 - DNA, 423 bp, Artificial Sequence
  derived and/or modified sequence
atgtctgaccccatcaccctgaatgtgggcggcaagctgtacaccaccagcctggccaccctgaccagcttcccagacagcatgctgggcgccatgttcagcggcaagatgcccaccaagagggacagccagggcaactgcttcatcgacagagatggcaaggtgttccgctacatcctgaacttcctgcggaccagccacctggacctgcctgaggacttccaggagatgggcctgctgcggcgggaggccgacttctaccaggtgcagcccctgattgaggccctgcaggagaaggaggtggagctgagcaaggccgagaagaatgccatgctgaacatcaccctgaaccagagggtgcagacagtgcacttcaccgtgcgggaggccccccagatctacagcctgagcagcagcagctag

SEQ ID NO: 291918 - DNA, 783 bp, Artificial Sequence
  derived and/or modified sequence
atgagcgaccccatcaccctgaacgtgggcggcaagctgtacaccacgtctctggcaacactgacgagttttcccgattccatgctgggagctatgttttctggcaagatgccaaccaaaagggattcccaaggcaattgcttcatcgatagggatggaaaggtttttcggtatattctgaacttcctacggacgagccacctcgacttgcctgaagattttcaggagatggggttactgcgccgcgaggcggatttctaccaggttcaacccctcattgaggcactgcaggaaaaggaggtggaactgagtaaagccgaaaagaacgcaatgctgaatatcactctgaaccaacgcgttcagacagtgcatttcactgtgcgagaagcaccacaaatctactcattgtcgagtagctcgatggaggttttcaatgctaacattttttcaacttcttgtctcttcctgaagctcctcggttccaagctgttctattgctctaacgggaacctctcttctatcaccagtcatttgcaagacccgaaccacttgactcttgactgggtggccaacgtcgaaggtcttcctgaggaggagtataccaaacagaacctgaaacggttgtgggtggtgccggcaaacaagcagattaactcgttccaggtctttgtggaagaagtgttaaagatagctctgtccgatggtttctgcatcgattctagtcaccctcacgcactggacttcatgaacaacaaaatcattagactcatacggtaccggtag

SEQ ID NO: 291919 - DNA, 423 bp, Artificial Sequence
  derived and/or modified sequence
atgagcgaccccatcaccctgaacgtgggcggcaagctgtacaccacaagcttggctacattgacctcttttccagattccatgttaggcgccatgttttcaggcaaaatgccaaccaaaagggacagccagggcaattgcttcatagatcgggatggcaaagtgttccggtatattcttaacttcttaaggacgtctcacctcgatctgccagaagattttcaggagatggggcttttacgtcgcgaggcagatttctatcaggtccagccactgattgaggccctccaggagaaggaagtggagctgtcaaaggccgagaaaaatgcgatgctgaacattacactgaatcagcgagtgcagacggtacattttactgttcgcgaagccccccagatatactctctgtcgtcatccagttag

SEQ ID NO: 291920 - DNA, 783 bp, Artificial Sequence
  derived and/or modified sequence
atgagtgaccctatcactctgaatgtaggaggtaagctgtacaccacctcgcttgccactttgacctcctttcctgactctatgctcggggctatgttctccggaaagatgccaacaaaacgcgattcccagggcaattgttttattgaccgcgacggcaaagtgtttaggtatatcctgaacttcctacggacttcccacctggacctccctgaggattttcaagaaatgggcctgttaaggcgggaagccgacttctatcaagtccaaccactgattgaggcccttcaggagaaagaggttgagctgagtaaagccgaaaaaaatgcaatgctgaacatcaccctgaaccagcgcgtacaaacagttcattttacggtccgggaagccccacagatctacagtttatccagctcatccatggaagtgttcaacgcaaatatattctccacttcttgcctttttctcaaattgcttggaagtaagttgttctattgctccaacggcaatctcagctctatcacctctcacctgcaggatcccaaccacctgaccttggattgggtggccaatgtcgaaggtctgccagaggaggaatacactaagcagaatttaaaaaggctgtgggtggtaccagcaaataaacagattaacagttttcaggttttcgtcgaggaggtcctcaaaattgctctgagcgacggcttttgcatcgactcttcccatccacacgccttggatttcatgaataataagattatccggctaattcgataccgttag

SEQ ID NO: 291921 - DNA, 423 bp, Artificial Sequence
  derived and/or modified sequence
atgagcgaccccattacccttaatgtcggaggtaagttatataccacatctctcgctactctgacctcattccccgacagtatgctcggtgccatgttcagcggcaaaatgccgactaaacgggatagccaggggaactgcttcatagatcgtgacggaaaagtcttccgttatattctcaatttcttgaggacttcacatcttgatctgccggaggactttcaggaaatgggcctgttgcgacgggaggctgatttctatcaggtccagcctctgattgaagcgctgcaagagaaagaggtagaacttagtaaggccgagaaaaatgcaatgctgaacatcaccctgaatcagcgggtccagactgtccatttcacggtgagagaggccccacagatttattccttaagttcgagttcatag

SEQ ID NO: 291922 - DNA, 498 bp, Artificial Sequence
  derived and/or modified sequence
atgagcgaccccatcaccctgaacgtgggcggcaagctgtacaccaccagcctggccaccctgaccagcttccccgacagcatgctgggcgccatgttcagcggcaagatgcccaccaagagagacagccagggcaactgcttcatcgacagagacggcaaggtgttcagatacatcctgaacttcctgagaaccagccacctggacctgcccgaggacttccaggagatgggcctgctgagaagagaggccgacttctaccaggtgcagcccctgatcgaggccctgcaggagaaggaggtggagctgagcaaggccgagaagaacgccatgctgaacatcaccctgaaccagagagtgcagaccgtgcacttcaccgtgagagaggccccccagatctacagcctgagcagcagcagcatggaggtgttcaacgccaacatcttcagcaccagctgcctgttcctgaagctgctgggcagcaagctgttctactag

SEQ ID NO: 291923 - DNA, 114 bp, Artificial Sequence
  derived and/or modified sequence
atgagcgaccccatcaccctgaacgtgggcggcaagctgtacaccaccagcctggccaccctgaccagcttccccgacagcatgctgggcgccatgttcagcggcaagatgtag

SEQ ID NO: 291924 - DNA, 351 bp, Artificial Sequence
  derived and/or modified sequence
atgagcgaccccatcaccctgaacgtgggcggcaagctgtacaccaccagcctggccaccctgaccagcttccccgacagcatgctgggcgccatgttcagcggcaagatgcccaccaagagagacagccagggcaactgcttcatcgacagagacggcaaggtgttcagatacatcctgaacttcctgagaaccagccacctggacctgcccgaggacttccaggagatgggcctgctgagaagagaggccgacttctaccaggtgcagcccctgatcgaggccctgcaggagaaggaggtggagctgagcaaggccgagaagaacgccatgctgaacatcaccctgtag

SEQ ID NO: 291925 - DNA, 216 bp, Artificial Sequence
  derived and/or modified sequence
atgagcgaccccatcaccctgaacgtgggcggcaagctgtacaccaccagcctggccaccctgaccagcttccccgacagcatgctgggcgccatgttcagcggcaagatgcccaccaagagagacagccagggcaactgcttcatcgacagagacggcaaggtgttcagatacatcctgaacttcctgagaaccagccacctggacctgccctag

SEQ ID NO: 291926 - DNA, 498 bp, Artificial Sequence
  derived and/or modified sequence
atgtcagaccctatcactctcaatgtggggggaaagctttatactacctcactggctactctgacttctttccctgactctatgctgggagccatgttttctggtaagatgcccactaaaagggattctcaggggaactgtttcatcgacagggatggaaaggtttttagatatatcttgaatttcctgaggacttcacacctggacctccccgaggattttcaggagatgggtttgctgcgcagggaggccgacttttaccaggttcaacctttaattgaagcactgcaggagaaggaagtggaactgagtaaagccgagaaaaatgccatgctaaatatcacactcaatcagcgcgtacagaccgtgcactttacggtgagagaggctccacagatttatagtctgagcagctcttccatggaggtgtttaacgcgaatatcttttctacttcctgcctgttcctgaagttgctggggtcaaagttattttactag

SEQ ID NO: 291927 - DNA, 114 bp, Artificial Sequence
  derived and/or modified sequence
atgagtgatccgattaccttgaatgtaggcggtaagctgtacacgacaagcctcgcaactctcacttcattcccagattctatgttgggagctatgttcagtggcaaaatgtag

SEQ ID NO: 291928 - DNA, 351 bp, Artificial Sequence
  derived and/or modified sequence
atgtcagatccaattaccttgaatgttgggggcaagctgtacacaactagccttgcaaccctgacgagctttcctgactcaatgctaggggcgatgttttctgggaagatgccaaccaaacgagattcacagggcaactgcttcattgacagggacgggaaagttttcagatacatcttgaacttccttcgaacctcccatctggacttgcccgaggacttccaggagatgggactcttgagaagagaggctgacttttatcaggtgcagcccctgatcgaggcactgcaggagaaggaggtagaattgagtaaggccgagaaaaatgcgatgctgaacattaccctatag

SEQ ID NO: 291929 - DNA, 216 bp, Artificial Sequence
  derived and/or modified sequence
atgtccgacccgatcacgctgaacgttggtgggaaattgtatacaaccagcttagccactctcacgtcctttcctgattcaatgttaggagcaatgttcagtggaaaaatgcccacaaagcgcgactcacaggggaattgctttattgatcgggatggcaaggtgtttcgctacatcctgaacttcctccgcacctcccatttggacttaccatag

SEQ ID NO: 291930 - DNA, 498 bp, Artificial Sequence
  derived and/or modified sequence
atgtctgaccccatcaccctgaatgtgggcggcaagctgtacaccaccagcctggccaccctgaccagcttcccagacagcatgctgggcgccatgttcagcggcaagatgcccaccaagagggacagccagggcaactgcttcatcgacagagatggcaaggtgttccgctacatcctgaacttcctgcggaccagccacctggacctgcctgaggacttccaggagatgggcctgctgcggcgggaggccgacttctaccaggtgcagcccctgattgaggccctgcaggagaaggaggtggagctgagcaaggccgagaagaatgccatgctgaacatcaccctgaaccagagggtgcagacagtgcacttcaccgtgcgggaggccccccagatctacagcctgagcagcagctccatggaggtgttcaatgccaacatcttcagcaccagctgcctcttcctgaagctgctgggcagcaagctgttctactag

SEQ ID NO: 291931 - DNA, 114 bp, Artificial Sequence
  derived and/or modified sequence
atgtctgaccccatcaccctgaatgtgggcggcaagctgtacaccaccagcctggccaccctgaccagcttcccagacagcatgctgggcgccatgttcagcggcaagatgtag

SEQ ID NO: 291932 - DNA, 351 bp, Artificial Sequence
  derived and/or modified sequence
atgtctgaccccatcaccctgaatgtgggcggcaagctgtacaccaccagcctggccaccctgaccagcttcccagacagcatgctgggcgccatgttcagcggcaagatgcccaccaagagggacagccagggcaactgcttcatcgacagagatggcaaggtgttccgctacatcctgaacttcctgcggaccagccacctggacctgcctgaggacttccaggagatgggcctgctgcggcgggaggccgacttctaccaggtgcagcccctgattgaggccctgcaggagaaggaggtggagctgagcaaggccgagaagaatgccatgctgaacatcaccctgtag

SEQ ID NO: 291933 - DNA, 216 bp, Artificial Sequence
  derived and/or modified sequence
atgtctgaccccatcaccctgaatgtgggcggcaagctgtacaccaccagcctggccaccctgaccagcttcccagacagcatgctgggcgccatgttcagcggcaagatgcccaccaagagggacagccagggcaactgcttcatcgacagagatggcaaggtgttccgctacatcctgaacttcctgcggaccagccacctggacctgccctag

SEQ ID NO: 291934 - DNA, 498 bp, Artificial Sequence
  derived and/or modified sequence
atgagcgaccccatcaccctgaacgtgggcggcaagctgtacaccacatcattggccacactgacctccttccccgattccatgctgggcgccatgttctccggaaagatgccgacaaagagagattcacagggaaattgtttcatcgacagagatggcaaagtcttccggtacatcctgaactttctgaggacatcgcatctggacttgccagaggattttcaggagatgggccttctcaggagagaagctgatttctatcaggtgcaacctctgatcgaggctttgcaggagaaagaggtggagctaagcaaggcagaaaagaatgccatgctgaacataaccctgaatcagcgcgtgcaaaccgttcatttcaccgtgcgagaggccccccagatatattccctgtcatcctccagtatggaagtgttcaatgctaacattttcagcacatcatgtctgtttctaaaactgctggggagcaaactgttttactag

SEQ ID NO: 291935 - DNA, 114 bp, Artificial Sequence
  derived and/or modified sequence
atgagcgaccccatcaccctgaacgtgggcggcaagctgtacaccacatccctagccacccttacaagcttcccagactccatgctcggggccatgttttctgggaagatgtag

SEQ ID NO: 291936 - DNA, 351 bp, Artificial Sequence
  derived and/or modified sequence
atgagcgaccccatcaccctgaacgtgggcggcaagctgtacaccacaagcttggcaacacttacttctttcccggattctatgttaggggccatgttctccgggaagatgcccactaagcgcgacagccagggcaactgtttcatcgatcgcgacggtaaggtgttccgctatatcctcaacttccttagaacctcccacctcgacttgccagaggactttcaggagatgggattgcttcgcagagaggcagatttctaccaagtgcagcctctgattgaggcccttcaagagaaggaagtggaactgagcaaagccgaaaagaacgcaatgctcaatatcaccctctag

SEQ ID NO: 291937 - DNA, 216 bp, Artificial Sequence
  derived and/or modified sequence
atgagcgaccccatcaccctgaacgtgggcggcaagctgtacaccacctccctggctaccctgacgtctttccctgacagtatgctgggggctatgttttctgggaagatgccgaccaagagagattcacaggggaactgttttattgatcgagacgggaaggtgttcaggtacatcctgaacttcctacgcacaagtcatctggatcttccttag

SEQ ID NO: 291938 - DNA, 498 bp, Artificial Sequence
  derived and/or modified sequence
atgagtgacccaattacactgaacgttggcggaaagctgtatactacgagccttgccactcttacctccttccctgacagtatgctgggggcaatgttcagcggcaaaatgcccaccaaaagagactcccagggtaactgctttattgatagggatggcaaagtgtttagatatattctaaacttcctcaggacgagccacctggatctcccagaagatttccaggaaatgggcttgctccggagggaggctgacttctatcaggtccagccactcatcgaggccttgcaggaaaaggaagttgagctgtcaaaagctgaaaagaacgccatgctcaatatcactctgaatcagcgtgtgcagacggtgcactttacggtccgagaggcccctcagatctatagcctgtcatcctctagcatggaggtgtttaacgccaatatcttttccacatcctgcttatttctgaaactacttggaagtaaactgttttactag

SEQ ID NO: 291939 - DNA, 114 bp, Artificial Sequence
  derived and/or modified sequence
atgagtgacccgattacgctcaatgtaggtgggaagctttatactacctccctggcaaccttgacgtcttttcctgatagcatgttgggagctatgttctccggaaagatgtag

SEQ ID NO: 291940 - DNA, 351 bp, Artificial Sequence
  derived and/or modified sequence
atgtcggatccaattacgctcaacgtggggggaaaactgtatacgacatcactggcaacactgactagctttcccgactcgatgttgggagccatgttctctggtaaaatgcccactaagagggactcacagggcaattgttttatagatagggacggaaaagttttccgctatattttaaactttcttagaactagtcaccttgacctgcccgaggactttcaggaaatggggctactgcgacgagaagcagatttctatcaggtccagcccctgatcgaggcgttgcaggaaaaggaagtcgaactgtcgaaggcggagaagaatgcgatgttgaatatcactctttag

SEQ ID NO: 291941 - DNA, 216 bp, Artificial Sequence
  derived and/or modified sequence
atgtccgatcccataaccctaaacgtaggcggtaagctgtataccacctcactagctactttgactagtttccccgatagtatgctgggcgctatgttctctggtaagatgccgaccaagcgcgatagtcaaggcaactgtttcattgaccgagatggaaaggtgtttcgttatattctgaacttcttgcgtacctcacatttggacctcccatag

SEQ ID NO: 291942 - protein, 1388 aa, Artificial Sequence
  derived and/or modified sequence
MRLGFLRLQALHRSRKLHQQYRLARQRIIQFQARCRAYLVRKAFRHRLWAVLTVQAYARGMIARRLHQRLRAEYLWRLEAEKMRLAEEEKLRKEMSAKKAKEEAERKHQERLAQLAREDAERELKEKEAARRKKELLEQMERARHEPVNHSDMVDKMFGFLGTSGGLPGQEGQAPSGFEDLERGRREMVEEDLDAALPLPDEDEEDLSEYKFAKFAATYFQGTTTHSYTRRPLKQPLLYHDDEGDQLAALAVWITILRFMGDLPEPKYHTAMSDGSEKIPVMTKIYETLGKKTYKRELQALQGEGEAQLPEGQKKSSVRHKLVHLTLKKKSKLTEEVTKRLHDGESTVQGNSMLEDRPTSNLEKLHFIIGNGILRPALRDEIYCQISKQLTHNPSKSSYARGWILVSLCVGCFAPSEKFVKYLRNFIHGGPPGYAPYCEERLRRTFVNGTRTQPPSWLELQATKSKKPIMLPVTFMDGTTKTLLTDSATTAKELCNALADKISLKDRFGFSLYIALFDKVSSLGSGSDHVMDAISQCEQYAKEQGAQERNAPWRLFFRKEVFTPWHSPSEDNVATNLIYQQVVRGVKFGEYRCEKEDDLAELASQQYFVDYGSEMILERLLNLVPTYIPDREITPLKTLEKWAQLAIAAHKKGIYAQRRTDAQKVKEDVVSYARFKWPLLFSRFYEAYKFSGPSLPKNDVIVAVNWTGVYFVDEQEQVLLELSFPEIMAVSSSRGAKTTAPSFTLATIKGDEYTFTSSNAEDIRDLVVTFLEGLRKRSKYVVALQDNPNPAGEESGFLSFAKGDLIILDHDTGEQVMNSGWANGINERTKQRGDFPTDSVYVMPTVTMPPREIVALVTMTPDQRQDVVRLLQLRTAEPEVRAKPYTLEEFSYDYFRPPPKHTLSRVMVSKARGKDRLWSHTREPLKQALLKKLLGSEELSQEACLAFIAVLKYMGDYPSKRTRSVNELTDQIFEGPLKAEPLKDEAYVQILKQLTDNHIRYSEERGWELLWLCTGLFPPSNILLPHVQRFLQSRKHCPLAIDCLQRLQKALRNGSRKYPPHLVEVEAIQHKTTQIFHKVYFPDDTDEAFEVESSTKAKDFCQNIATRLLLKSSEGFSLFVKIADKVLSVPENDFFFDFVRHLTDWIKKARPIKDGIVPSLTYQVFFMKKLWTTTVPGKDPMADSIFHYYQELPKYLRGYHKCTREEVLQLGALIYRVKFEEDKSYFPSIPKLLRELVPQDLIRQVSPDDWKRSIVAYFNKHAGKSKEEAKLAFLKLIFKWPTFGSAFFEVKQTTEPNFPEILLIAINKYGVSLIDPKTKDILTTHPFTKISNWSSGNTYFHITIGNLVRGSKLLCETSLGYKMDDLLTSYISQMLTAMSKQRGSRSGK

SEQ ID NO: 291943 - DNA, 4167 bp, Artificial Sequence
  derived and/or modified sequence
atgagattgggttttctgcggctgcaggccctgcatcgtagtaggaaactgcaccaacagtaccgtctggcacgacagagaattatacagttccaggccagatgtcgggcgtacttggtccgcaaggcgttccgccaccggttatgggccgtcctcaccgttcaagcctatgctagaggtatgatagcccgccgtctgcaccagcggctgagggctgagtatctttggcggctcgaggcagagaaaatgaggctcgcggaggaagagaaactccgaaaggagatgtctgccaagaaagctaaagaggaagctgaaaggaagcatcaggagagactggcccagttggcacgagaagacgccgaaagggagttgaaagaaaaggaggctgcccgacgtaagaaagagcttctcgaacaaatggaaagggcacggcatgaaccagtaaatcactctgatatggttgacaaaatgtttggatttctgggcactagcggaggcctgccgggccaggaggggcaggctccctcggggttcgaggaccttgagcgagggcgccgtgagatggtagaagaagacttagacgccgcgctgcctctccctgacgaggacgaagaggacctgtctgaatacaaattcgctaaattcgccgcaacctactttcagggtaccacaactcatagttacactcgacgacctttgaagcaaccactgctctaccacgatgacgagggggaccagttggccgctctggccgtatggattaccattttgaggttcatgggggacctgccagagcccaagtatcacaccgcaatgtccgatggttccgaaaagattcccgtgatgacaaagatctacgaaaccctgggaaagaaaacgtacaagcgcgagctgcaagccctgcagggggagggagaggcccaattgcctgagggtcagaagaagtcttctgtcagacataagctagttcacctaacgctgaaaaagaagagcaagcttactgaagaggtgactaagcgcttgcacgatggtgagtccacggtacaggggaattccatgctagaggatcgccctactagtaacctggagaagctccactttattatcggcaatgggatcctgagacctgcacttcgagacgagatttactgccagatctctaagcagttgacgcacaacccctctaagtcaagctatgcacggggatggatccttgtctcgctgtgcgtgggatgcttcgcacccagcgagaaatttgtgaaatacttgcgcaattttattcatggaggcccaccagggtacgctccatattgcgaagaaaggctgagacgcaccttcgtgaatggcaccagaacgcaacccccttcttggctggaactccaggcaaccaaatccaagaagccaattatgctgccagtaaccttcatggatgggaccaccaaaaccctcctaactgactctgccacaacagctaaggagctctgtaatgcccttgcggataagatatctctcaaggatcggttcgggttcagcctatatatcgctctgttcgacaaggtctcctcactggggtcaggatcggaccacgttatggacgccatttctcagtgtgaacaatacgcaaaggagcagggcgcacaggaaagaaatgctccctggagactgtttttccgcaaggaagttttcacgccatggcactcaccctcagaggataacgtggcgacaaacctcatctatcagcaggttgtgaggggggttaaattcggggaatacaggtgcgagaaagaagacgacttggctgaactggccagtcagcaatatttcgttgactacggctccgagatgatactggagagactcctaaatctcgtgcctacctacatcccagacagagagataacgcctctcaaaaccctggaaaaatgggcacagttggcaattgccgcacacaagaagggaatctatgcgcagagacgaactgacgcgcagaaggttaaggaagacgtcgtcagctatgcccgtttcaagtggcccctgcttttctcccgattctatgaagcttacaaattcagcggcccctccctgccgaaaaacgacgtgatagtggccgtgaactggaccggggtttatttcgtagacgagcaggagcaggtgctactggagctgtctttccctgagataatggccgtgtccagttcacggggagccaaaacaactgctccatcatttaccttagccactataaaaggagatgaatacactttcacatcctccaatgctgaagatattagggacctggtggtgacctttttggaggggctccggaaacgttcaaaatatgtcgtagctttacaggacaatcctaatcctgccggcgaagagtctggtttcttatccttcgccaagggcgatctgattattctggaccacgatactggcgagcaggttatgaattctggttgggccaacggcattaacgaacgtactaaacaacgcggagacttccctacagacagcgtatatgttatgcctacggtaaccatgccccctagagaaattgtggccctggtcacaatgactcctgaccaaagacaggatgtcgttagactgctgcagctacgcaccgcagagcccgaggtacgggccaagccgtatacattggaggagttttcttacgattattttaggccaccccccaagcacactctgtctcgcgtgatggtaagtaaggcccggggcaaggaccgcctctggagccacacaagggaacccctcaagcaagcactgctgaaaaagctgttgggctccgaagaactttcacaagaagcctgccttgcattcattgctgtcctgaagtacatgggcgattaccctagcaagaggacccgttcagttaacgaattgacagatcagatttttgaaggtccactgaaggcagaaccacttaaagatgaggcttatgttcagatcctcaaacaattgaccgataatcatatcagatacagtgaggagaggggatgggagctgctgtggctgtgcaccgggctcttccccccttcaaatatattacttccacatgtgcaacgcttcttgcagtctaggaagcattgccccctggccatcgattgtctgcagagattgcaaaaggcgctgcgcaatggtagcagaaagtatcccccccacttagtcgaggtggaagccattcagcacaaaacaacacagatcttccacaaagtatactttccagacgacacggacgaagcatttgaagtggagagctcaacaaaagctaaggacttttgccagaatattgcaacgcggctcttactcaagagtagtgaaggcttcagtctatttgtgaagattgctgataaagtgttgagcgttcccgaaaacgacttctttttcgactttgtccggcacttgaccgactggattaaaaaagcgcgacctatcaaggacggaattgtgccctcgctcacttaccaagtgtttttcatgaaaaaactttggaccaccactgtccctggaaaggatccaatggcagatagtatcttccactattatcaagaacttcccaagtacctgcggggctatcacaagtgcactagagaagaggttctgcagttaggcgccctgatttaccgcgtaaaattcgaagaggataaaagctatttcccttctatccccaaactactgcgggaattagttccccaagatttaatcagacaggtcagcccagatgactggaaacggtcgatcgtggcttatttcaacaagcacgccggaaagtccaaagaggaggcgaagctagcgtttctgaaactaatttttaagtggcctacctttggatccgcattcttcgaggtgaagcaaacaacagaacccaactttccagagattcttctgattgccataaacaaatatggcgtgtcacttattgatccaaaaaccaaagatatcctgactacacatccatttaccaagatatctaactggagcagcggcaacacatacttccatattaccatcggtaatctggtgcggggatcgaagttactatgcgagacaagtctgggttataagatggacgatttgctgacttcttatatcagtcagatgttgaccgccatgtccaaacaacgcgggtcacggagcggcaaatag

SEQ ID NO: 291944 - DNA, 4167 bp, Artificial Sequence
  derived and/or modified sequence
atgaggctgggcttcctgcggctgcaggccctgcacaggagcaggaagctgcaccagcagtaccgcctggcccggcagaggatcatccagttccaggcccgctgccgggcctacctggtgaggaaggccttccgccaccggctgtgggccgtgctgactgtgcaggcctatgcccggggcatgattgcccggcggctgcaccagaggctgcgggcagagtacctgtggaggctggaggccgagaagatgaggctggccgaggaggagaagctgaggaaggagatgtctgccaagaaggccaaggaggaggccgagaggaagcaccaggagcggctggcccagctggcccgggaggatgctgagcgggagctgaaggagaaggaggccgcccggaggaagaaggagctgctggagcagatggagcgggcccggcatgagcctgtgaaccacagcgacatggtggacaagatgtttggcttcctgggcaccagcggcggcctgcccggccaggagggccaggcccccagcggctttgaggacctggagcggggcagaagagagatggtggaggaggacctggatgctgccctgcccctgcctgatgaagatgaggaggacctgtctgagtacaagtttgccaagtttgctgccacctacttccagggcaccaccacccacagctacacccggcggcccctgaagcagcccctgctgtaccatgatgatgaaggagaccagctggccgccctggccgtgtggatcaccatcctgcgcttcatgggagacctgcctgagcccaagtaccacacagccatgtctgatggcagcgagaagatccctgtgatgaccaagatctatgagaccctgggcaagaagacctacaagcgggagctgcaggccctgcagggcgagggggaggcccagctgcctgagggccagaagaagagctctgtgcgccacaagctggtgcacctgaccctgaagaagaagagcaagctgacagaggaggtgaccaagaggctgcatgatggagagagcacagtgcagggcaacagcatgctggaggaccggcccaccagcaacctggagaagctgcacttcatcattggaaatggcatcctgcggcctgccctgagagatgagatctactgccagatcagcaagcagctgacccacaaccccagcaagagcagctatgcccggggctggatcctggtgtccctgtgtgtgggctgctttgcccccagcgagaagtttgtgaagtacctgaggaacttcatccacggcggccccccaggctacgccccctactgtgaggagcggctgcggaggacctttgtgaatggcaccaggacccagccccccagctggctggagctgcaggccaccaagagcaagaagcccatcatgctgcctgtgaccttcatggatggcaccaccaagaccctgctgacagattctgccaccacagccaaggagctgtgcaatgccctggccgacaagatcagcctgaaggaccgcttcggcttcagcctgtacatcgccctgtttgacaaggtgagcagcctgggcagcggcagtgaccacgtgatggatgccatcagccagtgtgagcagtatgccaaggagcagggcgcccaggagagaaatgccccctggaggctcttcttcaggaaggaggtgttcaccccctggcacagccccagcgaggacaacgtggccaccaacctgatctaccagcaggtggtgcggggcgtgaagtttggagagtaccgctgtgagaaggaggatgacctggccgagctggccagccagcagtactttgtggactatggcagcgagatgatcctggagcggctgctgaacctggtgcccacctacatcccagaccgggagatcacccccctgaagaccctggagaagtgggcccagctggccatcgccgcccacaagaagggcatctatgcccagaggagaacagatgcccagaaggtgaaggaggatgtggtgtcctatgcccgcttcaagtggcccctgctcttcagccgcttctatgaggcctacaagttcagcggccccagcctgcccaagaatgatgtgattgtggccgtgaactggacaggagtgtactttgtggatgagcaggagcaggtgctgctggagctgtccttccctgagatcatggctgtgagcagcagcagaggagccaagaccacagcccccagcttcaccctggccaccatcaagggagatgagtacaccttcaccagcagcaatgctgaggacatccgggacctggtggtgaccttcctggagggcctgaggaagaggagcaaatatgtggtggccctgcaggacaaccccaacccagctggggaggagagcggcttcctgagctttgccaagggggacctgatcatcctggaccatgacaccggggagcaggtgatgaacagcggctgggccaacggcatcaatgaaagaaccaagcagagaggagacttccccacagattctgtgtatgtgatgcccaccgtgaccatgccaccccgggagatcgtggccctggtgaccatgaccccagaccagaggcaggatgtggtgcggctgctgcagctgaggacagctgagcctgaggtgcgggccaagccctacaccctggaggagttctcctatgactacttccggcccccacccaagcacaccctgagccgggtgatggtgtccaaggcccggggcaaggaccggctgtggagccacacccgggagcccctgaagcaggccctgctgaagaagctgctgggcagcgaggagctgagccaggaggcctgcctggccttcatcgctgtgctgaagtacatgggagactaccccagcaagaggaccaggtctgtgaatgagctgacagaccagatctttgagggccccctgaaggccgagcccctgaaggatgaggcctacgtgcagatcctgaagcagctgacagacaaccacatccgctacagcgaggagcggggctgggagctgctgtggctgtgcaccggcctcttcccccccagcaacatcctgctgccccacgtgcagcgcttcctgcagagcaggaagcactgccccctggccatcgactgcctgcagaggctgcagaaggccctgagaaatggcagcaggaagtacccaccccacctggtggaggtggaggccatccagcacaagaccacccagatcttccacaaggtgtacttcccagatgacacagatgaggcctttgaggtggagagcagcaccaaggccaaggacttctgccagaacatcgccacccggctgctgctgaagagcagcgagggcttcagcctgtttgtgaagattgctgacaaggtgctgtctgtgcctgaaaatgacttcttctttgattttgtgcgccacctgacagactggatcaagaaggcccggcccatcaaggatggcatcgtgcccagcctgacctaccaggtgttcttcatgaagaagctgtggaccaccaccgtgcctgggaaggaccccatggctgacagcatcttccactactaccaggagctgcccaagtacctgcggggctaccacaagtgcacccgggaggaggtgctgcagctgggcgccctgatctacagagtgaagtttgaggaggacaagagctacttccccagcatccccaagctgctgcgggagctggtgccccaggacctgatccggcaggtgtccccagatgactggaagaggagcatcgtggcctacttcaacaagcacgccggcaagagcaaggaggaggccaagctggccttcctgaagctgatcttcaagtggcccacctttggaagtgccttctttgaggtgaagcagaccacagagcccaacttccctgagatcctgctgattgccatcaacaagtatggagtgtccctgattgaccccaagaccaaggacatcctgaccacccaccccttcaccaagatcagcaactggagcagcggcaacacctacttccacatcaccatcggcaacctggtgcggggcagcaagctgctgtgtgagaccagcctgggctacaagatggatgacctgctgaccagctacatcagccagatgctgacagccatgagcaagcagaggggcagccgcagcggcaagtag

SEQ ID NO: 291945 - DNA, 7106 bp, Artificial Sequence
  derived and/or modified sequence
cacagagagacggcgaggaagggaaagacccagagggacgcctagaacgagacttggagccagacagaggaagaggggacgtgtgtttgcagactggctgggcccgtgacccagcttcctgagtcctccgtgcaggtggcagctgtaccaggctggcaggtcactgagagtgggcagctgggccccagaactgtgcctggcccagtgggcagcaggagctcctgacttgggaccatggtgattcttcagcaggagaaaagctgggacttgccccacgttacacagccacactgaggcatgtgtcgtgtcacaaacgagatcttccattcaagggggaccatgtgtggatggacctgagattggggcaggagttcgacgtgcccatcggggcggtggtgaagctctgcgactctgggcaggtccaggtggtggatgatgaagacaatgaacactggatctctccgcagaacgcaacgcacatcaagcctatgcaccccacgtcggtccacggcgtggaggacatgatccgcctgggggacctcaacgaggcgggcatcttgcgcaacctgcttatccgctaccgggaccacctcatctacacgtatacgggctccatcctggtggctgtgaacccctaccagctgctctccatctactcgccagagcacatccgccagtataccaacaagaagattggggagatgcccccccacatctttgccattgctgacaactgctacttcaacatgaaacgcaacagccgagaccagtgctgcatcatcagtggggaatctggggccgggaagacggagagcacaaagctgatcctgcagttcctggcagccatcagtgggcagcactcgtggattgagcagcaggtcttggaggccacccccattctggaagcatttgggaatgccaagaccatccgcaatgacaactcaagccgtttcggaaagtacatcgacatccacttcaacaagcggggcgccatcgagggcgcgaagattgagcagtacctgctggaaaagtcacgtgtctgtcgccaggccctggatgaaaggaactaccacgtgttctactgcatgctggagggtatgagtgaggatcagaagaagaagctgggcttgggccaggcctctgactacaactacttggccatgggtaactgcataacctgtgagggccgggtggacagccaggagtacgccaacatccgctccgccatgaaggtgctcatgttcactgacaccgagaactgggagatctcgaagctcctggctgccatcctgcacctgggcaacctgcagtatgaggcacgcacatttgaaaacctggatgcctgtgaggttctcttctccccatcgctggccacagctgcatccctgcttgaggtgaaccccccagacctgatgagctgcctgactagccgcaccctcatcacccgcggggagacggtgtccaccccactgagcagggaacaggcactggacgtgcgcgacgccttcgtaaaggggatctacgggcggctgttcgtgtggattgtggacaagatcaacgcagcaatttacaagcctccctcccaggatgtgaagaactctcgcaggtccatcggcctcctggacatctttgggtttgagaactttgctgtgaacagctttgagcagctctgcatcaacttcgccaatgagcacctgcagcagttctttgtgcggcacgtgttcaagctggagcaggaggaatatgacctggagagcattgactggctgcacatcgagttcactgacaaccaggatgccctggacatgattgccaacaagcccatgaacatcatctccctcatcgatgaggagagcaagttccccaagggcacagacaccaccatgttacacaagctgaactcccagcacaagctcaacgccaactacatcccccccaagaacaaccatgagacccagtttggcatcaaccattttgcaggcatcgtctactatgagacccaaggcttcctggagaagaaccgagacaccctgcatggggacattatccagctggtccactcctccaggaacaagttcatcaagcagatcttccaggccgatgtcgccatgggcgccgagaccaggaagcgctcgcccacacttagcagccagttcaagcggtcactggagctgctgatgcgcacgctgggtgcctgccagcccttctttgtgcgatgcatcaagcccaatgagttcaagaagcccatgctgttcgaccggcacctgtgcgtgcgccagctgcggtactcaggaatgatggagaccatccgaatccgccgagctggctaccccatccgctacagcttcgtagagtttgtggagcggtaccgtgtgctgctgccaggtgtgaagccggcctacaagcagggcgacctccgcgggacttgccagcgcatggctgaggctgtgctgggcacccacgatgactggcagataggcaaaaccaagatctttctgaaggaccaccatgacatgctgctggaagtggagcgggacaaagccatcaccgacagagtcatcctccttcagaaagtcatccggggattcaaagacaggtctaactttctgaagctgaagaacgctgccacactgatccagaggcactggcggggtcacaactgtaggaagaactacgggctgatgcgtctgggcttcctgcggctgcaggccctgcaccgctcccggaagctgcaccagcagtaccgcctggcccgccagcgcatcatccagttccaggcccgctgccgcgcctatctggtgcgcaaggccttccgccaccgcctctgggctgtgctcaccgtgcaggcctatgcccggggcatgatcgcccgcaggctgcaccaacgcctcagggctgagtatctgtggcgcctcgaggctgagaaaatgcggctggcggaggaagagaagcttcggaaggagatgagcgccaagaaggccaaggaggaggccgagcgcaagcatcaggagcgcctggcccagctggctcgtgaggacgctgagcgggagctgaaggagaaggaggccgctcggcggaagaaggagctcctggagcagatggaaagggcccgccatgagcctgtcaatcactcagacatggtggacaagatgtttggcttcctggggacttcaggtggcctgccaggccaggagggccaggcacctagtggctttgaggacctggagcgagggcggagggagatggtggaggaggacctggatgcagccctgcccctgcctgacgaggatgaggaggacctctctgagtataaatttgccaagttcgcggccacctacttccaggggacaaccacgcactcctacacccggcggccactcaaacagccactgctctaccatgacgacgagggtgaccagctggcagccctggcggtctggatcaccatcctccgcttcatgggggacctccctgagcccaagtaccacacagccatgagtgatggcagtgagaagatccctgtgatgaccaagatttatgagaccctgggcaagaagacgtacaagagggagctgcaggccctgcagggcgagggcgaggcccagctccccgagggccagaagaagagcagtgtgaggcacaagctggtgcatttgactctgaaaaagaagtccaagctcacagaggaggtgaccaagaggctgcatgacggggagtccacagtgcagggcaacagcatgctggaggaccggcccacctccaacctggagaagctgcacttcatcatcggcaatggcatcctgcggccagcactccgggacgagatctactgccagatcagcaagcagctgacccacaacccctccaagagcagctatgcccggggctggattctcgtgtctctctgcgtgggctgtttcgccccctccgagaagtttgtcaagtacctgcggaacttcatccacgggggcccgcccggctacgccccgtactgtgaggagcgcctgagaaggacctttgtcaatgggacacggacacagccgcccagctggctggagctgcaggccaccaagtccaagaagccaatcatgttgcccgtgacattcatggatgggaccaccaagaccctgctgacggactcggcaaccacggccaaggagctctgcaacgcgctggccgacaagatctctctcaaggaccggttcgggttctccctctacattgccctgtttgacaaggtgtcctccctgggcagcggcagtgaccacgtcatggacgccatctcccagtgcgagcagtacgccaaggagcagggcgcccaggagcgcaacgccccctggaggctcttcttccgcaaagaggtcttcacgccctggcacagcccctccgaggacaacgtggccaccaacctcatctaccagcaggtggtgcgaggagtcaagtttggggagtacaggtgtgagaaggaggacgacctggctgagctggcctcccagcagtactttgtagactatggctctgagatgatcctggagcgcctcctgaacctcgtgcccacctacatccccgaccgcgagatcacgcccctgaagacgctggagaagtgggcccagctggccatcgccgcccacaagaaggggatttatgcccagaggagaactgatgcccagaaggtcaaagaggatgtggtcagttatgcccgcttcaagtggcccttgctcttctccaggttttatgaagcctacaaattctcaggccccagtctccccaagaacgacgtcatcgtggccgtcaactggacgggtgtgtactttgtggatgagcaggagcaggtacttctggagctgtccttcccagagatcatggccgtgtccagcagcaggggagcgaaaacgacggcccccagcttcacgctggccaccatcaagggggacgaatacaccttcacctccagcaatgctgaggacattcgtgacctggtggtcaccttcctagaggggctccggaagagatctaagtatgttgtggccctgcaggataaccccaaccccgcaggcgaggagtcaggcttcctcagctttgccaagggagacctcatcatcctggaccatgacacgggcgagcaggtcatgaactcgggctgggccaacggcatcaatgagaggaccaagcagcgtggggacttccccaccgacagtgtgtacgtcatgcccactgtcaccatgccaccgcgggagattgtggccctggtcaccatgactcccgatcagaggcaggacgttgtccggctcttgcagctgcgaacggcggagcccgaggtgcgtgccaagccctacacgctggaggagttttcctatgactacttcaggcccccacccaagcacacgctgagccgtgtcatggtgtccaaggcccgaggcaaggaccggctgtggagccacacgcgggaaccgctcaagcaggcgctgctcaagaagctcctgggcagtgaggagctctcgcaggaggcctgcctggccttcattgctgtgctcaagtacatgggcgactacccgtccaagaggacacgctccgtcaacgagctcaccgaccagatctttgagggtcccctgaaagccgagcccctgaaggacgaggcatatgtgcagatcctgaagcagctgaccgacaaccacatcaggtacagcgaggagcggggttgggagctgctctggctgtgcacgggccttttcccacccagcaacatcctcctgccccacgtgcagcgcttcctgcagtcccgaaagcactgcccactcgccatcgactgcctgcaacggctccagaaagccctgagaaacgggtcccggaagtaccctccgcacctggtggaggtggaggccatccagcacaagaccacccagattttccacaaagtctacttccctgatgacactgacgaggccttcgaagtggagtccagcaccaaggccaaggacttctgccagaacatcgccaccaggctgctcctcaagtcctcagagggattcagcctctttgtcaaaattgcagacaaggtcctcagcgttcctgagaatgacttcttctttgactttgttcgacacttgacagactggataaagaaagctcggcccatcaaggacggaattgtgccctcactcacctaccaggtgttcttcatgaagaagctgtggaccaccacggtgccagggaaggatcccatggccgattccatcttccactattaccaggagttgcccaagtatctccgaggctaccacaagtgcacgcgggaggaggtgctgcagctgggggcgctgatctacagggtcaagttcgaggaggacaagtcctacttccccagcatccccaagctgctgcgggagctggtgccccaggaccttatccggcaggtctcacctgatgactggaagcggtccatcgtcgcctacttcaacaagcacgcagggaagtccaaggaggaggccaagctggccttcctgaagctcatcttcaagtggcccacctttggctcagccttcttcgaggtgaagcaaactacggagccaaacttccctgagatcctcctaattgccatcaacaagtatggggtcagcctcatcgatcccaaaacgaaggatatcctcaccactcatcccttcaccaagatctccaactggagcagcggcaacacctacttccacatcaccattgggaacttggtgcgcgggagcaaactgctctgcgagacgtcactgggctacaagatggatgacctcctgacttcctacattagccagatgctcacagccatgagcaaacagcggggctccaggagcggcaagtgaacagtcacggggaggtgctggttccatgcctgctctcgaggcagcagtgggttcaggcccatcagctacccctgcagctggggaagacttatgccatcccggcagcgaggctgggctggccagccaccactgactataccaactgggcctctgatgttcttccagtgaggcatctctctgggatgcagaacttccctccatccacccctctggcacctgggttggtctaatcctagtttgctgtggccttcccggttg

SEQ ID NO: 291946 - DNA, 4167 bp, Artificial Sequence
  derived and/or modified sequence
atgcggctgggcttcctgcggctgcaggccctgcaccggagccggaaactgcatcagcagtacaggctcgcacgacagagaataattcaattccaggctcgctgtagggcctacctggttcggaaggcatttcgtcataggctctgggccgtcttgaccgtccaggcttacgcgcggggcatgattgctaggcggctccaccagcggctcagggccgagtatctatggcgtctcgaggctgagaaaatgcgcctggccgaggaggagaaactgcgcaaagagatgtccgccaaaaaagcaaaagaagaggccgaacgcaagcatcaagagcgcctggctcaactggcacgcgaagatgcagaacgggaactgaaagagaaggaggccgcccggagaaagaaagagctgttggaacaaatggaacgggcccgtcatgagccagtgaatcactcagacatggtagataaaatgtttggcttcctcggcaccagcggaggccttcctggtcaagaaggtcaagccccatccggctttgaagacctcgagcgcggcagaagagagatggttgaagaagatcttgacgccgctctccctctgcccgatgaggatgaagaagatctttccgaatataagtttgccaagtttgctgcaacctattttcagggtacaaccactcacagctataccaggaggccactgaaacaacccctcctgtaccacgatgatgaaggtgatcagttggctgctctcgcagtgtggataacaatccttcgtttcatgggcgatttgcccgaacccaagtaccataccgccatgtctgatggctctgagaaaattcccgtaatgaccaagatctatgaaacactaggtaagaagacgtacaagcgggagctccaggcgttgcagggagaaggcgaagcccaactccccgaaggccagaagaaaagtagcgtgcgtcataaacttgttcacctcaccctcaaaaagaaatcgaagctcacggaggaagtcactaagcgccttcacgatggtgagtccaccgtccagggcaatagtatgctcgaagatcggccaacgtctaacttagagaaactgcacttcatcatcggaaacgggattttgaggcccgctctgcgagacgaaatctattgccagatttcaaaacaactgacccataacccgtcgaaatcctcctatgcacgtggatggatcctcgtctcactgtgcgttggctgtttcgcgcccagcgagaagttcgtaaaatacctccgcaactttatccacggaggccccccagggtacgcgccttactgtgaagagaggctccgccggacctttgtcaacggcacgcggacccagcctccctcttggcttgagcttcaagctaccaaatccaaaaagccaatcatgctccccgttactttcatggatgggaccacaaaaacccttctaacagattccgccactacagccaaggagctttgtaacgccttagccgataaaatctctctgaaagataggtttggattcagtctgtatatcgcactcttcgacaaagtgagtagcctcggatccggaagcgatcacgtcatggacgccatcagccagtgtgaacagtatgcaaaagaacaaggggcccaggaacgcaatgcaccgtggcggctgttttttcgtaaggaggtctttacgccctggcactccccatccgaggacaatgtagctacaaatctgatttaccagcaggtggtgcggggagtgaagtttggagagtaccgctgtgagaaggaggatgatctggccgagttggcaagccaacagtacttcgttgattacgggagcgaaatgatcctggaaaggctgctcaacctagtgcccacctacatccctgatagagaaataactccgctgaagaccctcgagaaatgggcacaactagcaattgccgcgcacaagaagggcatatacgctcaacgcaggactgacgctcaaaaagtgaaggaagatgtcgtgagttacgccagatttaagtggcctctgctgttctctagattctatgaggcctataagtttagtggtccctcactccccaaaaatgacgtcatcgtggctgtgaattggactggcgtgtacttcgtggatgagcaagagcaggtgctgcttgaattgtcgttccctgagatcatggctgtatctagcagccggggggccaagacaaccgcgccgtcttttaccctggccactataaaaggggacgagtacacattcacaagtagcaatgctgaggacatccgcgatctggtggtgacgtttcttgagggtctgaggaagcgctctaaatatgtagtcgccctgcaagataatccaaatcccgctggggaggaaagtggattcctctccttcgccaagggcgatttaatcattctggaccatgatacaggtgagcaagttatgaactctggatgggctaatggaattaacgaaagaaccaagcagcggggcgacttcccaacagattcggtatatgtcatgccaactgttacaatgccaccacgcgagatagtcgcattggttaccatgacacctgaccagcgtcaggacgtggtgagactgctccagctgaggactgcagagcctgaggtgcgcgctaagccttacactctcgaggagttttcttatgactattttcgtcctccccccaaacacacactgtcccgcgtgatggtatccaaagccagaggcaaggaccgactgtggtcgcacaccagagagcccctgaaacaggcactcttaaagaagctcctggggagtgaggagctatcccaggaggcttgcctggcctttatcgcggtgttgaaatacatgggtgattatccaagcaaaaggactcggtcagttaacgaactgaccgaccaaatttttgaggggcccctgaaggccgaaccacttaaagatgaagcatatgtacagatactgaagcaactgactgacaatcatatcagatatagcgaggaaaggggatgggaactactgtggctctgtaccgggttattcccaccaagtaacatcctactcccccatgttcaacgctttttgcaatcacggaagcactgtcccctcgccatagactgtttgcaaagacttcaaaaggctctgagaaacggctcacggaagtaccctccacacctggttgaagtggaggccatccagcacaagacaactcagattttccacaaagtctactttcctgatgacactgacgaagccttcgaagtcgaaagcagcacgaaagccaaagacttctgtcaaaacattgccacacggctgttattaaagtcgtccgaagggttttctttgtttgtgaagatcgccgacaaagtgctttctgtccccgagaatgactttttctttgattttgttaggcatctgacggattggatcaagaaagctaggcccatcaaagatggaatagtgccctctttgacttatcaggtgttctttatgaagaagctatggaccaccacggtgcctggcaaggatcccatggccgatagcatctttcattattatcaggagctccccaaatacctccgaggctaccataaatgcacccgcgaggaggtgctgcagttgggagctctgatataccgagtgaagtttgaggaagacaaaagctattttccttctatccctaaactattacgagaactcgttccccaggacctgattcgtcaggtgagtcctgacgattggaaaaggagtattgtggcttattttaacaaacatgcgggtaagagcaaagaggaagccaaattggccttcctcaaactcatcttcaaatggccaacctttggtagtgctttctttgaagtaaagcagacgaccgagccgaattttccagaaattctgcttatcgccatcaataagtacggagtgagtctgatagatcccaagacaaaagatattctgacaacacatccgttcaccaaaatctccaattggagcagcggaaatacttactttcatatcaccattggcaacctagttcggggtagtaagctgctgtgcgagacaagcctaggttacaagatggacgatttgctgactagctacatcagtcagatgctaaccgcaatgagcaagcagagggggtccaggtcaggaaaatag

SEQ ID NO: 291947 - DNA, 4167 bp, Artificial Sequence
  derived and/or modified sequence
atgagactcgggttcttgcgcttgcaggctttgcacagatcacgcaaactccatcagcagtaccgcctagctcgacagagaattatccagttccaggcgagatgcagggcatacctggtgagaaaagcattcagacaccgattgtgggccgtgctgaccgtgcaggcgtacgcacggggtatgatcgctaggagactgcaccagaggctacgcgctgaatacctctggaggctggaggctgaaaaaatgaggctggccgaggaagagaaactgcggaaggagatgtcagctaagaaagcaaaggaagaggccgagcgcaagcaccaggagcggcttgctcaactcgcccgagaggatgccgaacgagagctcaaagagaaagaggctgcaagaaggaagaaagagttacttgaacaaatggagagagcacggcacgaacctgtcaatcatagcgacatggtcgataaaatgttcggcttcctggggacgagtggcggactgcctgggcaggaaggccaagcacccagcggctttgaggacctggagcggggtagaagggagatggtggaggaggatttagatgcagcactcccccttccggacgaagatgaagaggacctgagtgagtataagttcgctaagttcgctgccacatattttcagggaacaacaacacattcttatacgcggcgacccctgaagcagcctctgttgtaccacgacgacgaaggcgaccaattagctgccctggcagtgtggattacaattctgcgatttatgggagatttgccagagccaaaataccatacagcaatgtcagacggttccgagaaaattcctgtcatgaccaaaatttatgagaccctgggcaagaagacctacaaacgggagctgcaggccttgcaaggagaaggtgaggcacagttgccagaggggcagaagaagtctagcgtccggcacaaactggtgcaccttacccttaagaaaaagtcaaagctaactgaagaagtgaccaaacggctccacgacggagagagtaccgtccagggaaactccatgctcgaagaccgacccacatcgaacctcgagaagctccattttattataggcaacggcatactccgcccagctctccgcgacgagatctattgccagatctctaaacagctcacccataaccccagtaagagctcttacgctaggggatggatcttagtaagtctttgtgtgggatgctttgccccttctgaaaagtttgtgaagtatctgcgcaattttatccatgggggtccccctggctatgctccctattgcgaggagcgcttaaggaggacttttgtgaacggcaccaggactcaacctccttcatggctggaattgcaggccacgaaatccaagaaaccaattatgttgcctgttactttcatggatggcaccaccaagaccctcctcacggacagcgcgaccacagccaaagagctgtgcaatgccttggccgataagatctcactaaaagataggtttggatttagtctgtacattgccttattcgacaaggtgtcttcgctaggttccggctcggaccatgtcatggatgctatctcacagtgtgagcagtacgctaaggagcagggagcacaggagaggaatgccccttggaggttgttctttcgcaaagaagtcttcactccgtggcactctcctagcgaggataacgtggccacgaatcttatttaccagcaggtcgtgcggggagtgaaatttggagaataccggtgcgagaaagaagatgacctcgcagaactggcttcgcagcaatattttgttgattacgggagcgagatgatactcgaacggctcttgaacctggtgcctacctacattcctgatagggagattacgccgctcaagactttggaaaaatgggcccagctggctatcgcagcacataagaaaggaatctacgcccagcggcgtaccgatgctcagaaggtgaaagaggacgtcgtctcatacgccaggtttaaatggcccctcctattttcaagattctacgaggcctataagttctctggaccttcactgccgaaaaatgacgtcatcgtggccgtaaactggaccggagtgtattttgtggatgaacaggagcaggtgctgctcgaactgtcattcccagaaattatggccgtgagtagtagcagaggggctaaaaccacagctccttcttttacgctcgcaactattaaaggagatgagtataccttcacatcttctaatgcagaagacattagagatctagttgtgacttttctcgaggggctgcggaagagatctaaatacgtcgtcgccctgcaggacaatccaaaccctgctggagaggaatccgggtttttgtccttcgccaagggggatctgatcatcctggaccacgatacaggcgagcaagtgatgaattctggatgggccaatgggattaatgaacggacaaagcagcggggagactttcctactgactccgtgtacgtcatgcccacagtgacaatgccacctcgggaaatcgtggccctagtgactatgacacctgatcaacgccaggacgtcgtgaggctgcttcagcttcgaacggcagagccagaagtcagagcgaagccctacaccctagaagagtttagctatgattatttccgccctcctccaaagcataccctgtcacgggttatggtgagtaaggcccgaggaaaggatcgactgtggagccacacacgcgagccccttaagcaggcactattaaagaaactcctgggctcagaggagctctctcaggaggcctgcctcgccttcattgcagtgctgaaatatatgggcgactacccaagtaagaggacacggagtgttaatgagctgacagaccaaatcttcgaagggccactgaaggccgaacccttaaaggacgaggcctacgtacaaatactgaagcagctaacagacaaccacataagatatagcgaggaacgtggatgggagctgctgtggctttgcactggcctgtttccaccttctaacatacttctgccccacgttcagcgctttcttcagtctcgaaagcattgtcccctcgcgatcgactgtcttcagaggctgcagaaagccctgcgaaacggtagccgaaaataccctccgcaccttgtagaggtcgaagcaatacagcataaaacgacacaaatttttcataaggtgtacttcccagacgacaccgacgaggccttcgaagttgaatcatcaacgaaggccaaggatttctgtcagaatattgcaactcggctcctcctcaaaagttcggaaggattctccttatttgtcaagatagctgacaaagtcctgtcagtgccggagaacgatttctttttcgatttcgtgaggcatctaaccgactggatcaagaaagctcgaccgataaaggacggcatagtcccgagcctgacttaccaggtattttttatgaaaaagctgtggactacgacggtcccgggtaaggatcccatggccgatagtattttccattattatcaggagctgcccaagtatcttcggggttatcacaagtgcacgcgggaagaggtgctccagctcggcgctttgatctatcgggtgaagtttgaagaggataagtcttacttccccagcatcccaaagctgctcagagagcttgtgccccaggatctgatccggcaggtgtctccggatgactggaaaaggagtattgttgcctacttcaataagcatgcaggtaaatctaaagaagaggccaagctagcttttctgaagctgatctttaagtggccaaccttcggctcagcgttctttgaggtgaagcaaaccactgaacccaattttcctgaaattttgctcatcgccattaataaatacggcgtgagtctgattgacccaaaaactaaggacattctcaccacgcacccttttactaaaattagtaactggtcgtctgggaatacctacttccatataactatcggcaatctagtaaggggatcgaaacttctctgcgagacttcactcgggtacaagatggatgacctgctgacttcctacatctcccagatgctgaccgctatgagtaagcagcgaggcagtcgtagcggaaaatag

SEQ ID NO: 291948 - DNA, 4167 bp, Artificial Sequence
  derived and/or modified sequence
atgagactgggcttcctgagactgcaggccctgcacagaagcagaaagctgcaccagcagtacagactggccagacagagaatcatccagttccaggccagatgcagagcctacctggtgagaaaggccttcagacacagactgtgggccgtgctgaccgtgcaggcctacgccagaggcatgatcgccagaagactgcaccagagactgagagccgagtacctgtggagactggaggccgagaagatgagactggccgaggaggagaagctgagaaaggagatgagcgccaagaaggccaaggaggaggccgagagaaagcaccaggagagactggcccagctggccagagaggacgccgagagagagctgaaggagaaggaggccgccagaagaaagaaggagctgctggagcagatggagagagccagacacgagcccgtgaaccacagcgacatggtggacaagatgttcggcttcctgggcaccagcggcggcctgcccggccaggagggccaggcccccagcggcttcgaggacctggagagaggcagaagagagatggtggaggaggacctggacgccgccctgcccctgcccgacgaggacgaggaggacctgagcgagtacaagttcgccaagttcgccgccacctacttccagggcaccaccacccacagctacaccagaagacccctgaagcagcccctgctgtaccacgacgacgagggcgaccagctggccgccctggccgtgtggatcaccatcctgagattcatgggcgacctgcccgagcccaagtaccacaccgccatgagcgacggcagcgagaagatccccgtgatgaccaagatctacgagaccctgggcaagaagacctacaagagagagctgcaggccctgcagggcgagggcgaggcccagctgcccgagggccagaagaagagcagcgtgagacacaagctggtgcacctgaccctgaagaagaagagcaagctgaccgaggaggtgaccaagagactgcacgacggcgagagcaccgtgcagggcaacagcatgctggaggacagacccaccagcaacctggagaagctgcacttcatcatcggcaacggcatcctgagacccgccctgagagacgagatctactgccagatcagcaagcagctgacccacaaccccagcaagagcagctacgccagaggctggatcctggtgagcctgtgcgtgggctgcttcgcccccagcgagaagttcgtgaagtacctgagaaacttcatccacggcggcccccccggctacgccccctactgcgaggagagactgagaagaaccttcgtgaacggcaccagaacccagccccccagctggctggagctgcaggccaccaagagcaagaagcccatcatgctgcccgtgaccttcatggacggcaccaccaagaccctgctgaccgacagcgccaccaccgccaaggagctgtgcaacgccctggccgacaagatcagcctgaaggacagattcggcttcagcctgtacatcgccctgttcgacaaggtgagcagcctgggcagcggcagcgaccacgtgatggacgccatcagccagtgcgagcagtacgccaaggagcagggcgcccaggagagaaacgccccctggagactgttcttcagaaaggaggtgttcaccccctggcacagccccagcgaggacaacgtggccaccaacctgatctaccagcaggtggtgagaggcgtgaagttcggcgagtacagatgcgagaaggaggacgacctggccgagctggccagccagcagtacttcgtggactacggcagcgagatgatcctggagagactgctgaacctggtgcccacctacatccccgacagagagatcacccccctgaagaccctggagaagtgggcccagctggccatcgccgcccacaagaagggcatctacgcccagagaagaaccgacgcccagaaggtgaaggaggacgtggtgagctacgccagattcaagtggcccctgctgttcagcagattctacgaggcctacaagttcagcggccccagcctgcccaagaacgacgtgatcgtggccgtgaactggaccggcgtgtacttcgtggacgagcaggagcaggtgctgctggagctgagcttccccgagatcatggccgtgagcagcagcagaggcgccaagaccaccgcccccagcttcaccctggccaccatcaagggcgacgagtacaccttcaccagcagcaacgccgaggacatcagagacctggtggtgaccttcctggagggcctgagaaagagaagcaagtacgtggtggccctgcaggacaaccccaaccccgccggcgaggagagcggcttcctgagcttcgccaagggcgacctgatcatcctggaccacgacaccggcgagcaggtgatgaacagcggctgggccaacggcatcaacgagagaaccaagcagagaggcgacttccccaccgacagcgtgtacgtgatgcccaccgtgaccatgccccccagagagatcgtggccctggtgaccatgacccccgaccagagacaggacgtggtgagactgctgcagctgagaaccgccgagcccgaggtgagagccaagccctacaccctggaggagttcagctacgactacttcagacccccccccaagcacaccctgagcagagtgatggtgagcaaggccagaggcaaggacagactgtggagccacaccagagagcccctgaagcaggccctgctgaagaagctgctgggcagcgaggagctgagccaggaggcctgcctggccttcatcgccgtgctgaagtacatgggcgactaccccagcaagagaaccagaagcgtgaacgagctgaccgaccagatcttcgagggccccctgaaggccgagcccctgaaggacgaggcctacgtgcagatcctgaagcagctgaccgacaaccacatcagatacagcgaggagagaggctgggagctgctgtggctgtgcaccggcctgttcccccccagcaacatcctgctgccccacgtgcagagattcctgcagagcagaaagcactgccccctggccatcgactgcctgcagagactgcagaaggccctgagaaacggcagcagaaagtaccccccccacctggtggaggtggaggccatccagcacaagaccacccagatcttccacaaggtgtacttccccgacgacaccgacgaggccttcgaggtggagagcagcaccaaggccaaggacttctgccagaacatcgccaccagactgctgctgaagagcagcgagggcttcagcctgttcgtgaagatcgccgacaaggtgctgagcgtgcccgagaacgacttcttcttcgacttcgtgagacacctgaccgactggatcaagaaggccagacccatcaaggacggcatcgtgcccagcctgacctaccaggtgttcttcatgaagaagctgtggaccaccaccgtgcccggcaaggaccccatggccgacagcatcttccactactaccaggagctgcccaagtacctgagaggctaccacaagtgcaccagagaggaggtgctgcagctgggcgccctgatctacagagtgaagttcgaggaggacaagagctacttccccagcatccccaagctgctgagagagctggtgccccaggacctgatcagacaggtgagccccgacgactggaagagaagcatcgtggcctacttcaacaagcacgccggcaagagcaaggaggaggccaagctggccttcctgaagctgatcttcaagtggcccaccttcggcagcgccttcttcgaggtgaagcagaccaccgagcccaacttccccgagatcctgctgatcgccatcaacaagtacggcgtgagcctgatcgaccccaagaccaaggacatcctgaccacccaccccttcaccaagatcagcaactggagcagcggcaacacctacttccacatcaccatcggcaacctggtgagaggcagcaagctgctgtgcgagaccagcctgggctacaagatggacgacctgctgaccagctacatcagccagatgctgaccgccatgagcaagcagagaggcagcagaagcggcaagtag

SEQ ID NO: 291949 - protein, 105 aa, Artificial Sequence
  derived and/or modified sequence
MLQTSNYSLVLSLQFLLLSYDLFVNSFSELLQKTPVIQLVLFIIQDIAVLFNIIIIFLMFFNTFVFQAGLVNLLFHKFKGTIILTAVYFALSISLHVWVMVRVAV

SEQ ID NO: 291950 - DNA, 2839 bp, Artificial Sequence
  derived and/or modified sequence
aaagccggcttccggaagccgggacgatgtccgcatgacaaccgacgttggagtttggaggtgcttgccttagagcaagggaaacagctctcattcaaaggaactagaagcctctccctcagtggtagggagacagccaggagcggttttctgggaactgtgggatgtgcccttgggggcccgagaaaacagaaggaagatgctccagaccagtaactacagcctggtgctctctctgcagttcctgctgctgtcctatgacctctttgtcaattccttctcagaactgctccaaaagactcctgtcatccagcttgtgctcttcatcatccaggatattgcagtcctcttcaacatcatcatcattttcctcatgttcttcaacaccttcgtcttccaggctggcctggtcaacctcctattccataagttcaaagggaccatcatcctgacagctgtgtactttgccctcagcatctcccttcatgtctgggtcatggtaagagtggcagtctgaattctttttttaatttttattttaaatagaggtggggtcttactttgttaccaaggctggtctcaaactcctgagctcaagcaattctcctgcttctgcctcccaagctcaagcaattctcctgcttctgcctcccaaagtgctggaattacaggcatgagtcactgtgcccggcctgaactctgaattcctgaatcgctaaagggctaggaataacttttcttttcttttcttttctttttttttttttttgagacagagtctcgctctgtcgcctggctggagtgcagtggcgtgatctcagctcactgcaacctccgcttcctgggttcaagcaattctcctccctcagtctcctgagtacctgggattacaggcacgcaccaccacgcccagctaatttttgtgtttttagtagagactgggtttcaccatgttggccgggatggtctcaatctcttgacctcgtgatcctcctgcctcggcctctgaagtgctaggattacaggcgtgagctactgcgcccggccactgggatatcttttctctgggaacccagcttcattctttgacatctcacacaatccttcgtagagaacaggtgaaatgaaagtggtttgggttggagccctgggcatgtgagagtttcataaggtactcttgaccaaccttatgtgttgaaaaacagccttgtccaagagtcaggggactcttccagaacattcaattcacctttgccccaaacaggcctaccagggctaaaacaggtagttgaatgtgtctcatcattagctatttgggcaggtggatgttgatacaggttattcttaggcatcagtgccccatggctaatgctgtaggcagtggatgtttttggaagtagccaagcaggattgctgcttgcccttgagtgctccatgccgtctgccaagctcccatcactttaactaggagaaccggcctccaggatccctccctttggttctaacataggcctcagatcagatccagtgtctgtggtttcagatttcttctgcttcacaaattcttccagctctttgagtatcttgtatatttctcatgtactcaattcaattgaactctaaaacctcagggttctctagttgtcacttcattattaaagccactttcacacctgaaccccctgttaggttgtgcttgtgattccacagaaagaagtagaggtcccaggaaagaagcaaagcaacaccagagtctccgggtgcttcctgaagaggattctgtgccctggttcctggagccaaaataggtcctggctttgtactataaaagccgttaatctcattaaaccctgagtacaccaaagtctttatctgacaggagctgagccagcgatttttcaaggcaagacagtgaccagctgaactcctgagataatgaatatatcatttctccttggcaaaggttatggaattaaagagaataaataacttagttcatacttcctccctcaaagttaaaagatattccctttgcagcgaaaaatggagctttgaggctccttcgagaaacgctccttggggttgtagaaaggaggaagaggttagcatgattttaaagcaactggcatctctgcagctaaccaagttggagacattagggcttcttgtggccattaacttttgtgtatctcacatctccttcagaacttacgctggaaaaactccaacagcttcatatggacagatggacttcaaatgctgtttgtattccagagactaggtaaggaccagagcaaggtcaggcctctctcaggtcccacatgtgtctctttcagtgagggccttgatgctggcttcccagacctgtcccagctggcttgggatggttgtgacagccacaccaggaacaggagggattactgcccctgcccttgctagaagactatgggaaatgaggaggcagggctgcccagcctcattaggttctgttctttttgtttgtttgtttgtttgtttgtttgtttttgagacagtcttgctctgtcgcccaggctggagtgctgtggcgctatctcaggctcactgcaagctccgcctcccgggttcacaccattctcctgcctcagcctccggagtagctgggactacaggcgcccgccaccacgcccagctaattttttgtgtatttttagtagagacagggtttcaccgtgttagccaggatggtctcgatctctgacctcatgatccgcctgcctctgcctcctaaagtgctgggattacaggcgtgagccaccacgcctggccaggttctgttcttaacctgaaatgatactca

SEQ ID NO: 291951 - protein, 840 aa, Artificial Sequence
  derived and/or modified sequence
MDYHEDDKRFRREEYEGNLLEAGLELERDEDTKIHGVGFVKIHAPWNVLCREAEFLKLKMPTKKMYHINETRGLLKKINSVLQKITDPIQPKVAEHRPQTMKRLSYPFSREKQHLFDLSDKDSFFDSKTRSTIVYEILKRTTCTKAKYSMGITSLLANGVYAAAYPLHDGDYNGENVEFNDRKLLYEEWARYGVFYKYQPIDLVRKYFGEKIGLYFAWLGVYTQMLIPASIVGIIVFLYGCATMDENIPSMEMCDQRHNITMCPLCDKTCSYWKMSSACATARASHLFDNPATVFFSVFMALWAATFMEHWKRKQMRLNYRWDLTGFEEEEDHPRAEYEARVLEKSLKKESRNKETDKVKLTWRDRFPAYLTNLVSIIFMIAVTFAIVLGVIIYRISMAAALAMNSSPSVRSNIRVTVTATAVIINLVVIILLDEVYGCIARWLTKIEVPKTEKSFEERLIFKAFLLKFVNSYTPIFYVAFFKGRFVGRPGDYVYIFRSFRMEECAPGGCLMELCIQLSIIMLGKQLIQNNLFEIGIPKMKKLIRYLKLKQQSPPDHEECVKRKQRYEVDYNLEPFAGLTPEYMEMIIQFGFVTLFVASFPLAPLFALLNNIIEIRLDAKKFVTELRRPVAVRAKDIGIWYNILRGIGKLAVIINAFVISFTSDFIPRLVYLYMYSKNGTMHGFVNHTLSSFNVSDFQNGTAPNDPLDLGYEVQICRYKDYREPPWSENKYDISKDFWAVLAARLAFVIVFQNLVMFMSDFVDWVIPDIPKDISQQIHKEKVLMVELFMREEQDKQQLLETWMEKERQKDEPPCNHHNTKACPDSLGSPAPSHAYHGGVL

SEQ ID NO: 291952 - DNA, 2523 bp, Artificial Sequence
  derived and/or modified sequence
atggactaccacgaagatgacaaaaggttcaggagagaggagtacgagggtaacttacttgaggctgggttggagctggagcgggacgaggacactaagattcatggggtcggctttgtgaaaatccatgccccctggaacgtgttatgtagggaggccgagtttttgaagttgaagatgcccactaaaaaaatgtaccacattaatgaaaccagaggcctgctaaagaaaattaacagcgtgctgcagaaaatcacggatcctatccagcctaaagtcgctgaacataggcctcagaccatgaaacgactctcctacccttttagtcgcgaaaaacagcacctgttcgatctgagtgataaagattctttcttcgactcaaagacacgctcaaccatcgtttacgagatcctaaagagaacgacttgtactaaggccaaatactccatgggcattacaagcctgctggcaaatggagtgtatgctgccgcctatccgctgcacgatggcgattataatggagaaaatgtggagttcaatgatcgcaagctgctctacgaagaatgggcgaggtacggggttttctataagtaccagcccatcgacctggtcaggaaatatttcggggagaagataggactctactttgcttggctcggagtttatacgcaaatgcttataccagccagcatcgtcggcataatcgttttcttatatggctgcgcaactatggatgagaatattccttctatggagatgtgtgatcagaggcacaacattaccatgtgtcctttgtgtgataaaacctgctcctattggaagatgagctcagcttgtgctaccgcacgggcttctcacctgtttgataatcccgctactgtgtttttctcagtctttatggccctgtgggccgccacctttatggagcattggaaaagaaagcagatgagattgaattaccgttgggatctcactggtttcgaagaggaggaggaccaccctagggcagagtacgaggcccgcgtcctggagaagagtctcaagaaagagtctcggaataaagaaacggacaaagtgaagcttacatggagagacaggttccctgcgtacctgacgaatttggtgtccatcatttttatgatcgccgtcacctttgcgatcgtgttgggagttattatctaccgcatttccatggccgcagctctggcgatgaactccagcccttcagttcggagcaatataagagtgaccgtgaccgccacagctgttatcattaatttagtggtcattatcctgctggacgaggtttatggctgcatcgcccgatggctaaccaagatcgaggttcccaaaacagagaaaagcttcgaggagaggctgatctttaaggctttcctgctgaaatttgtgaactcatacacccccatattctatgttgccttcttcaaaggtcggttcgtgggccggcccggagattacgtttacatttttcgctcttttaggatggaggaatgtgccccaggggggtgcctcatggaactgtgtatccagctgtccataatcatgcttggcaagcaactgattcagaacaatctgtttgaaataggtatccccaagatgaaaaaactaattcgttatttgaagctcaagcagcagtcacccccagaccacgaagaatgtgtgaagagaaagcaacggtatgaagttgactataacctggagccattcgcgggcttaactcctgagtacatggagatgattattcagtttggatttgtaactttgttcgtagctagctttcccctggccccactgttcgcccttctcaacaacattatagaaataagactggacgctaaaaaatttgtcaccgagttacgccggccagtggctgtcagggccaaagacataggcatctggtacaatatcctcagaggcattggaaaactggcagttattatcaacgcctttgtaatttcttttacaagtgattttattccgcggctcgtttacctgtacatgtatagcaagaatggcaccatgcacggttttgtgaaccacactcttagtagctttaacgtgtccgacttccaaaatggcactgctccgaacgatcctctcgatcttggttacgaggttcaaatatgtcggtataaagattacagggaaccaccatggagtgaaaacaagtacgatatcagcaaggacttttgggctgttctcgctgcccggcttgcgtttgttatcgtgtttcaaaatctcgtcatgttcatgagtgatttcgtggattgggttatcccagacatacccaaagacatttctcagcagatccataaagagaaagtgctgatggtggagctgtttatgagggaggagcaggacaaacaacaactactggaaacctggatggaaaaagagagacagaaggacgagcccccgtgcaatcatcacaacaccaaggcttgtcctgattcccttggttcacctgccccatcacacgcttatcatgggggcgttctctag

SEQ ID NO: 291953 - DNA, 2523 bp, Artificial Sequence
  derived and/or modified sequence
atggattatcacgaggacgataaacggttccgtagagaggaatatgagggcaacctcctggaagcgggattggagctagaaagggatgaggacactaaaatccatggtgtcggctttgtcaaaatccacgctccttggaatgttttatgtagagaggcggaattcctgaagttgaaaatgcctacaaagaaaatgtaccatattaacgagactcgtgggctgctcaagaaaattaatagcgtgctgcagaaaatcactgaccctatccagcctaaagtggccgaacacaggccccagacgatgaagcggctgtcttacccattcagtcgtgagaagcagcatctttttgatctgtccgataaggacagtttctttgattccaaaacgcggagcactatagtttacgagattttgaaaagaacaacctgcaccaaggcaaagtacagcatggggataaccagcctcctggcgaacggtgtttacgctgccgcatacccactacacgacggtgactacaacggcgagaatgtggaatttaacgacagaaagctattgtacgaagaatgggccaggtacggcgtcttttataagtaccagcctattgacctagtcagaaagtatttcggtgaaaagataggtctttacttcgcctggctcggggtatatacccaaatgcttattccagctagcatcgtgggaattattgtgtttctttatggctgtgctaccatggacgagaacattcctagcatggagatgtgcgaccaaaggcataatataacaatgtgcccgctgtgtgacaagacatgtagctattggaaaatgagtagcgcctgcgcaaccgcacgcgcctctcacctattcgacaaccccgctacagtgttctttagcgtgtttatggccctatgggccgcaaccttcatggagcactggaagcggaagcagatgcggctgaattacaggtgggacttgacaggcttcgaggaggaggaggatcacccacgtgccgaatacgaggcgcgggtcctggagaaatcattaaaaaaagaatcacggaacaaagagaccgataaggtcaagcttacatggagagatagattcccagcctacttaacgaatttagtcagtattattttcatgatcgcggtaacgtttgccatcgtgcttggggtgatcatatatcggatttcaatggcagctgccctggctatgaatagctccccttccgttcggtccaatatccgtgtgactgtcacagccactgccgtcattatcaatcttgtagttataattttactggacgaagtttacgggtgcatcgccagatggctcaccaagattgaagtgccaaagaccgagaagtcattcgaggaaagactcatcttcaaagctttcctcctgaagttcgttaacagctacactcccatcttctacgtggctttcttcaaaggtcgctttgtaggtcgacccggggactacgtgtacatcttccgcagtttcagaatggaagaatgcgccccaggaggctgtctgatggagctgtgcatacagttgtctatcataatgctggggaaacagctaatccagaataacttgtttgagattggaattccaaagatgaaaaagctgattagatacttgaaactgaagcagcagtccccacccgaccacgaggagtgcgtaaaaagaaagcagcggtacgaggtggactacaatctcgaaccatttgctggactgactcctgaatacatggaaatgatcatccagttcgggttcgttaccctttttgtagcctcctttcctctggcgcccctcttcgccctactcaacaacatcatcgagataagactcgacgcaaaaaagttcgtgactgaactgagacgcccagttgcagtgcgcgccaaggacattggaatttggtacaatattctacgcgggatcggaaagctggccgttattattaacgccttcgtcatcagtttcacaagcgattttattcctcggctcgtgtacctgtacatgtactccaaaaacgggactatgcacggatttgtcaatcacacactgagcagctttaacgtcagtgattttcagaatggaacagcacctaatgaccctctggatctgggatatgaggtccagatctgtaggtacaaagactacagagagcccccatggagtgagaataaatacgacattagcaaagatttctgggccgtcttggccgctcgactcgccttcgtcatcgtgttccaaaatctcgttatgttcatgtcagattttgtagactgggtcattcctgacatcccaaaagacataagtcagcagattcataaggagaaggttcttatggtggaactgtttatgagggaagagcaagacaaacaacagcttctagagacctggatggagaaggagagacagaaggatgagccaccctgcaatcaccacaacactaaggcttgtcctgactcactcggctctcccgcaccaagtcacgcataccacgggggagttttgtag

SEQ ID NO: 291954 - DNA, 942 bp, Artificial Sequence
  derived and/or modified sequence
atgcttgatgccgcatcaaaggcgagggaggctcctgaggcagctcccggatgggatgacccgcagggagaagggcggagaggcaggggcgaaggcctgagttgggccgtggggccccatccagaccctggggtgctgatgcagggggaggtttggtcaggacgctttagtcacgctgttatccaatttggatttgtgaccttgttcgtggccagcttccccctggcaccactgttcgcactcctcaacaacatcattgagattcgcctggatgcaaaaaaattcgtgacggaacttcggagacctgtcgcggtccgggccaaagatattggaatctggtataacatcctaagggggatcggaaaattagccgtgatcattaatgcattcgtgatatcattcaccagtgactttatccccaggttggtctacctctacatgtatagtaaaaacgggactatgcacgggttcgtaaaccatacactgtcttcattcaatgtgtctgactttcagaacgggaccgcgcctaatgatcccctcgacctgggctacgaagttcaaatttgcagatataaggattaccgcgaaccaccgtggtccgagaacaaatatgacatttccaaagacttctgggcagtgcttgccgcgcgactggctttcgtgattgtgtttcaaaatctcgtgatgttcatgtctgattttgttgactgggtgatcccagacattcctaaagacattagccagcagatacacaaagagaaagtactgatggtggagctctttatgcgagaggaacaggacaaacagcagctgctagaaacatggatggaaaaagagaggcagaaggacgaacctccctgtaaccatcacaacaccaaagcctgcccggattccctcgggagcccggctccttcgcatgcttaccacggaggtgtactctag

SEQ ID NO: 291955 - DNA, 2523 bp, Artificial Sequence
  derived and/or modified sequence
atggactaccatgaagatgacaagcgcttcagaagagaggagtatgagggcaacctgctggaggccggcctggagctggagagagatgaggacaccaagatccatggagtgggctttgtgaagatccacgccccctggaatgtgctgtgccgggaggccgagttcctgaagctgaagatgcccaccaagaagatgtaccacatcaatgagacccggggcctgctgaagaagatcaacagcgtgctgcagaagatcacagaccccatccagcccaaggtggccgagcaccggccccagaccatgaagaggctgagctaccccttcagccgggagaagcagcacctgtttgacctgagtgacaaggacagcttctttgacagcaagaccaggagcaccatcgtgtatgagatcctgaagaggaccacctgcaccaaggccaagtacagcatgggcatcaccagcctgctggccaacggggtgtatgctgctgcctaccccctgcatgatggagactacaatggagaaaatgtggagttcaatgacaggaagctgctgtatgaggagtgggcccgctatggagtcttctacaagtaccagcccatcgacctggtgaggaagtactttggagagaagattggcctgtactttgcctggctgggcgtgtacacccagatgctgatcccagccagcatcgtgggcatcatcgtgttcctgtatggctgtgccaccatggatgagaacatccccagcatggagatgtgtgaccagaggcacaacatcaccatgtgccccctgtgtgacaagacctgcagctactggaagatgagcagcgcctgtgccacagcccgggccagccacctgtttgacaacccagccaccgtcttcttctctgtgttcatggccctgtgggccgccaccttcatggagcactggaagaggaagcagatgaggctgaactaccgctgggacctgactggatttgaggaggaggaggaccaccccagggcagaatatgaggcccgggtgctggagaagagcctgaagaaggagagcaggaacaaggagacagacaaggtgaagctgacctggagggaccgcttccctgcctacctgaccaacctggtgtccatcatcttcatgattgctgtgacctttgccatcgtgctgggcgtcatcatctaccgcatctccatggccgccgccctggccatgaacagcagccccagcgtgcgcagcaacatccgggtgacagtgacagccacagctgtgatcatcaacctggtggtgatcatcctgctggatgaggtgtatggctgcatcgcccgctggctgaccaagattgaggtgcccaagacagagaagagctttgaggagcggctcatcttcaaggccttcctgctgaagtttgtgaacagctacacccccatcttctacgtggccttcttcaagggccgctttgtgggccggcctggggactatgtgtacatcttccgctccttcaggatggaggagtgtgcccctgggggctgcctgatggagctgtgcatccagctgagcatcatcatgctgggcaagcagctgatccagaacaacctgtttgaaattggcatccccaagatgaagaagctgatccgctacctgaagctgaagcagcagagccccccagaccatgaagaatgtgtgaagaggaagcagagatatgaggtggactacaacctggagccctttgctggcctgaccccagagtacatggagatgatcatccagtttggatttgtgaccctgtttgtggccagcttccccctggcccccctgtttgccctgctgaacaacatcatcgagatccggctggatgccaagaagtttgtgacagagctgcggcggcctgtggccgtgcgggccaaggacatcggcatctggtacaacatcctgcggggcatcggcaagctggccgtcatcatcaatgcctttgtgatctccttcaccagtgacttcatcccccggctggtgtacctgtacatgtacagcaagaatggcaccatgcacggctttgtgaaccacaccctgagcagcttcaacgtgtctgacttccagaatggaacagccccaaatgaccccctggacctgggctatgaggtgcagatctgccgctacaaggactaccgggagcccccctggagcgagaacaagtatgacatcagcaaggacttctgggccgtgctggccgcccggctggcctttgtgattgtgttccagaacctggtgatgttcatgtctgactttgtggactgggtgatcccagacatccccaaggacatcagccagcagatccacaaggagaaggtgctgatggtggagctgttcatgagggaggagcaggacaagcagcagctgctggagacctggatggagaaggagcggcagaaggatgagcccccctgcaaccaccacaacaccaaggcctgcccagacagcctgggcagccctgcccccagccacgcctaccacggcggcgtgctgtag

SEQ ID NO: 291956 - DNA, 942 bp, Artificial Sequence
  derived and/or modified sequence
atgctggatgctgccagcaaggcccgggaggcccctgaggccgcccctggctgggatgacccccagggcgagggccggcggggccgcggggagggcctgtcctgggccgtgggcccccacccagaccccggggtgctgatgcagggcgaggtgtggagcggccgcttcagccatgctgtgatccagtttggatttgtgaccctgtttgtggccagcttccccctggcccccctgtttgccctgctgaacaacatcatcgagatccggctggatgccaagaagtttgtgacagagctgcggcggcctgtggccgtgcgggccaaggacatcggcatctggtacaacatcctgcggggcatcggcaagctggccgtcatcatcaatgccttcgtcatctccttcaccagtgacttcatcccccggctggtgtacctgtacatgtacagcaagaatggcaccatgcacggctttgtgaaccacaccctgagcagcttcaacgtgtctgacttccagaatggaacagccccaaatgaccccctggacctgggctatgaggtgcagatctgccgctacaaggactaccgggagcccccctggagcgagaacaagtatgacatcagcaaggacttctgggccgtgctggccgcccggctggccttcgtcatcgtgttccagaacctggtgatgttcatgtctgactttgtggactgggtgatcccagacatccccaaggacatcagccagcagatccacaaggagaaggtgctgatggtggagctgttcatgagggaggagcaggacaagcagcagctgctggagacctggatggagaaggagcggcagaaggatgagcccccctgcaaccaccacaacaccaaggcctgcccagacagcctgggcagccctgcccccagccacgcctaccatggaggagtgctgtag

SEQ ID NO: 291957 - DNA, 2523 bp, Artificial Sequence
  derived and/or modified sequence
atggactaccacgaggacgacaagcggttccggcgggaggagtacgaaggcaacctgctcgaagctggcttggaattagaaagagacgaagacacaaagattcatggggtgggttttgtgaagattcatgccccctggaacgttctgtgtcgagaggctgagttcctgaagcttaaaatgccaaccaaaaagatgtatcacatcaacgaaacacgcgggcttcttaagaagatcaattctgtcctccagaagatcaccgaccccatccagcctaaagtcgcggagcaccggccccaaactatgaaacggctgtcctacccctttagccgggagaagcagcatttattcgatctcagtgacaaggactccttcttcgactccaagactcggtctaccattgtgtatgaaatcctcaagcggacaacatgcacgaaagcaaagtactctatgggcatcacaagcctgttggcaaatggagtatacgctgctgcatatcctctccatgacggtgattataacggcgagaacgtagagtttaacgatcgtaagctactgtacgaagagtgggctcgatatggcgtgttctacaagtaccagcctattgacctcgtacggaagtactttggagaaaagattggtctgtatttcgcttggctgggagtgtacacacagatgctaattccggcctcaatcgtgggaatcattgtcttcttgtatggctgcgccactatggacgagaatattccttctatggagatgtgcgaccaaaggcacaacattactatgtgccctctgtgtgacaaaacatgcagctattggaaaatgagttccgcctgtgcaacggccagggccagtcacttgttcgacaatcctgcaaccgtgttcttcagtgtgttcatggctctgtgggctgccacatttatggaacactggaagcgcaagcagatgcgcctcaactaccgatgggacttaaccggtttcgaagaggaggaggatcatccccgtgctgagtacgaagcccgtgtgttggaaaagtcacttaagaaggaaagccgcaataaagaaacagataaagtcaagcttacatggagggataggttcccagcgtacttgacaaatctggtgtccattattttcatgattgcggtcacatttgctatagtgcttggagtgatcatttaccgcattagtatggccgccgctctggctatgaactcttctccaagcgtcaggtccaacattagagttactgtcactgcaacagccgtgataatcaatcttgtggttatcatcctgctcgacgaagtgtatggatgtattgcaaggtggctgaccaagatcgaggtacccaagacagaaaagagcttcgaggaaagactcatttttaaagcgttcctcctgaaatttgtgaacagttatacccccatcttttacgtggcgttcttcaaaggtaggttcgtgggaagaccaggagactatgtgtacatctttaggtcgttccggatggaggagtgcgccccaggggggtgtttgatggagctatgcatccaactctccattatcatgctcgggaaacagctgatccaaaacaatctctttgagatcggaatccctaaaatgaagaagctcatcaggtacctcaaactgaaacagcagtcaccacctgaccatgaggaatgcgtcaagaggaaacagaggtatgaagttgattataacctggagccgtttgccggtctgacgcccgagtatatggaaatgatcatccagttcggattcgtgacgttgttcgtcgcctccttccctctggccccattatttgctcttctaaacaacataatcgagataagactggatgccaagaagtttgtgacagagttgagacgtcccgttgccgtcagggcaaaggatatcggaatttggtataacatccttcggggcattggcaagcttgccgtgatcattaatgccttcgtgatcagcttcacaagcgattttatcccgcggctggtgtatctttatatgtattccaaaaatggcacaatgcacggctttgttaaccatacattgagttcctttaatgtcagcgatttccagaatggcactgctcccaatgatccacttgatctcggctacgaggttcagatctgcagatataaggattacagggaaccaccatggtccgaaaacaaatatgacatctctaaggatttttgggccgtgctcgccgcacgactggcattcgttatcgtcttccagaatctggtgatgttcatgtcagactttgttgactgggtcataccagacatacccaaggacatctcacaacagatccataaggagaaggtactgatggtcgagctgttcatgagagaagaacaagacaaacaacagctgctggagacttggatggagaaagaaagacagaaagatgaaccaccgtgtaatcatcacaacaccaaggcgtgcccagacagcctcgggtcacctgcgccatcgcatgcctatcatggcggcgtgctctag

SEQ ID NO: 291958 - DNA, 2523 bp, Artificial Sequence
  derived and/or modified sequence
atggactaccacgaggacgacaagcggttccggcgggaggagtacgaagggaatctcttggaagcaggcctagaactcgaacgcgatgaggatactaaaatacacggggtgggattcgtgaaaatccacgccccctggaatgtcctgtgtcgggaagctgagtttttgaagctgaaaatgcctacgaaaaagatgtatcatattaacgagacacgcggactgctgaaaaagattaatagcgtcctccagaagattactgaccccatccagccgaaggtggccgaacacagaccccaaaccatgaagcggctgagttaccctttcagccgcgaaaagcagcacctgtttgacctgagcgacaaggactctttctttgattccaagacgagatctactatcgtatatgagatcctcaaacgcacaacgtgcaccaaagctaagtacagcatgggcatcacgtctctcttggccaatggggtctacgctgcagcttaccctctgcatgacggcgactataacggcgagaacgtcgaattcaatgatagaaagctcctgtatgaggagtgggctaggtatggagtcttctataagtatcagcctattgacctggtgcgtaagtattttggcgagaaaattggactatactttgcttggctgggcgtatacactcagatgctcatcccagcgtcgatcgttggcataatagtgtttctctatggatgcgcaactatggatgagaacattccttccatggagatgtgcgatcagcggcataatatcacaatgtgtcctctttgcgacaagacctgcagctattggaaaatgagcagcgcctgcgcgacggcccgggcttcccacctcttcgataacccagccaccgtgttcttctccgtatttatggcactctgggcggccaccttcatggaacattggaagcggaaacagatgcgcctcaactataggtgggacctgacaggcttcgaggaagaagaagaccatccccgtgccgaatacgaggcccgcgtcttggaaaagagtctgaaaaaggaatctaggaataaggagaccgacaaagtgaagctaacttggagagaccggtttccagcatacctaacgaatctagtgtccattattttcatgattgcagtgacatttgccatcgttctcggggtcatcatctacaggatttccatggctgcggctctggctatgaactcgtcaccgtcagttcgctccaacatcagggtcactgtcaccgctacagccgtgatcataaacctggtggtcatcatcctgctggatgaggtttacggttgcattgcccggtggctaacgaaaatcgaggtgcctaagaccgaaaagagcttcgaggaaagattgattttcaaggccttcctgctgaaatttgttaatagctataccccaatcttttatgtggccttttttaagggccgatttgtgggccgacctggagattatgtttatatcttcaggtccttccgtatggaagaatgcgcgccgggaggctgtttgatggaactttgtatccagttgtcaattattatgttaggaaaacagctgattcagaacaatctgttcgagataggcattcctaagatgaagaagctgataaggtatctcaaactaaaacagcaatctccacctgaccacgaggaatgtgtcaagcgaaagcagcgctacgaggtggattataaccttgaacctttcgccgggttaacccctgagtatatggagatgattatccagttcggtttcgtaaccctcttcgtcgcgtcttttcctttggcacctttgtttgcactgctgaataacataatagagattagacttgacgcaaagaaattcgtgacagaacttcggaggccggtcgctgtccgagcgaaggacatcgggatatggtacaatatcctccgaggcattggaaaactagctgtcataattaatgcctttgtgatctcctttacatctgatttcatacccagactagtatacttgtacatgtattccaagaacggaactatgcatgggtttgtgaaccataccctgagttctttcaacgtgagtgatttccagaacggaactgcccccaacgaccccctggacctcggatacgaagttcagatctgccggtacaaagactatagggagccaccctggagcgaaaataagtatgatattagtaaggatttttgggccgtgctggccgctcgcctggcattcgtcatcgtctttcagaacctcgtgatgttcatgagcgacttcgtggattgggtaatccccgacataccaaaagacatctcacaacaaattcacaaggagaaagttctgatggtcgaattgtttatgcgggaagagcaagacaagcaacaactgttggagacctggatggaaaaggagagacagaaggacgagccaccttgcaaccaccataacacaaaggcctgccctgattcattaggaagccctgccccatcccacgcataccacggaggcgtgctgtag

SEQ ID NO: 291959 - DNA, 942 bp, Artificial Sequence
  derived and/or modified sequence
atgctggacgccgccagcaaggcccgggaggcccccgaggccgccccaggttgggacgaccctcaaggggaggggcgacgggggagaggagaaggtctcagttgggcagtgggaccccaccccgatccaggcgttcttatgcagggcgaagtctggagtggcagattctcacatgccgttatccagttcgggttcgtaacattgtttgttgcgagttttcccctcgctccccttttcgccttactcaataacatcattgagatccgactggacgctaagaaatttgtgacagagctcagacgcccagtagccgtccgtgctaaagacattgggatctggtacaacatcctgcggggcatcggcaagctcgcagttattattaatgcgtttgtgatcagcttcacatctgacttcattccacgcttagtgtacctgtatatgtacagcaagaacggcactatgcatggctttgttaaccatactctttcctctttcaatgtgagtgacttccaaaatggcaccgctccaaacgatcccctggacttgggatacgaagtccagatatgtagatataaagactacagggagcccccttggagcgagaacaaatacgacatttccaaagacttctgggctgtcctggcagcaaggctggcctttgtgattgtgtttcagaacctggtgatgttcatgagtgatttcgtagattgggtgataccagatattccaaaggatattagtcagcagattcataaggaaaaggtactgatggtcgaactgttcatgagggaggaacaagataagcaacagttgctggaaacttggatggagaaagagagacagaaagacgagcccccctgtaatcaccacaacaccaaggcatgtcccgattccctgggctcgcctgccccatcccacgcctatcatgggggcgtgctgtag

SEQ ID NO: 291960 - DNA, 2465 bp, Artificial Sequence
  derived and/or modified sequence
atgctggatgcagcatccaaagccagagaagccccagaggcagctcccgggtgggatgatccccagggggagggccgcaggggcagaggcgagggactgtcctgggcagtgggtccccacccggatccaggagtcctgatgcaaggggaagtttggtctggaagattcagccatgcagtcatccagtttggcttcgtcaccctgtttgtcgcctccttccccctggccccactgtttgcgctgctgaacaacatcatcgagatccgcctggacgccaaaaagtttgtcactgagctccgaaggccggtagctgtcagagccaaagacatcggaatctggtacaatatcctcagaggcattgggaagcttgctgtcatcatcaatgccttcgtgatctccttcacgtctgacttcatcccgcgcctggtgtacctctacatgtacagtaagaacgggaccatgcacggcttcgtcaaccacaccctctcctccttcaacgtcagtgacttccagaacggcacggcccccaatgaccccctggacctgggctacgaggtgcagatctgcaggtataaagactaccgagagccgccgtggtcggaaaacaagtacgacatctccaaggacttctgggccgtcctggcagcccggctggcgtttgtcatcgtcttccagaacctggtcatgttcatgagcgactttgtggactgggtcatcccggacatccccaaggacatcagccagcagatccacaaggagaaggtgctcatggtggagctgttcatgcgggaggagcaagacaagcagcagctgctggaaacctggatggagaaggagcggcagaaggacgagccgccgtgcaaccaccacaacaccaaagcctgcccagacagcctcggcagcccagcccccagccatgcctaccacgggggcgtcctgtagctatgccagcggggctgggcaggccagccgggcatcctgaccgatgggcaccctctcccagggcaggcggcttcccgctcccaccagggcccggtgggtcctgggttttctgcaaacatggaggaccactttctgataggacattttcctttcttctttctgttttctttcccttgtttttgcacaaagccattatgcagggaatattttttaatctgtagtattcaagatgaatcaaaatgatggctggtaatacggcaataaggtagcaaaggcaggtgctttgcagaaagaatgcttggaaacttgagtctccctagaggtgaaaagtgagcagaggcccgtagaaaccctcctctgaatcctcctaattccttaagatagatgcaaaatggtaagccgaggcatcgcgcaaaagctggtgcgatgcttcagggaaaatggaaaacccacgcaagaataatgattgattccggttccaaaaggtgtcacctacctgtttcagaaaagttagactttccatcgccttttccttccatcagttgagtggctgagagagaagtgcctcatccctgagccacacagggggcgtgggagcatcccagttatccctggaaagctagaaggggacagaggtgtccctgattaagcaggaaacagcacccttggcgtccccagcaggctccccactgtcagccacacacctgcccccatcacaccaagccgacctcagagttgttcatcttccttatgggacaaaaccggttgaccagaaaatgggcagagagagatgacctcggaagcatttccacagatggtgtcagggtttcaagaagtcttagggcttccaggggtcccctggaagctttagaatatttatgggttttttttcaaatatcaattatatggtagattgaggattttttttctgtagctcaaaggtggagggagtttattagttaaccaaatatcgttgagaggaatttaaaatactgttactaccaaagatttttattaataaaggcttatattttggtaacacttctctatatttttactcacaggaatgtcactgttggacaattattttaaaagtgtataaaaccaagtctcataaatgatatgagtgatctaaatttgcagcaatgatactaaacaactctctgaaatttctcaagcaccaagagaaacatcattttagcaaaggccaggaggaaaaatagaaataaatttgtcttgaagatctcattgatgtgatgttacattccctttaatctgccaactgtggtcaaagttcataggtgtcgtacatttccattatttgctaaaatcatgcaatctgatgcttctcttttctcttgtacagtaagtagtttgaagtgggttttgtatataaatactgtattaaaaattaggcaattaccaaaaatccttttatggaaaccatttttttaaaaagtgaatgtacacaaatccacagaggactgtggctggacattcatctaaataaatttgaatatacg

SEQ ID NO: 291961 - DNA, 2523 bp, Artificial Sequence
  derived and/or modified sequence
atggattatcacgaagacgataagaggtttcggcgagaggagtacgaggggaacctactggaggcaggactcgaattagagcgtgatgaggacactaagatacatggcgtgggcttcgtcaaaatccatgcaccatggaacgtactatgcagagaagccgagttcttgaagttaaagatgccaactaaaaaaatgtaccacataaacgaaactcggggtttattaaaaaaaattaattccgttctccagaagatcaccgaccctatccagcccaaagttgccgagcacagaccacagactatgaaacgcttgtcttaccccttttctagagagaagcagcatctgtttgatttgtctgataaagattcttttttcgactcgaaaacaaggtctacaattgtgtatgagatactcaaacgcaccacttgcactaaggctaaatactctatgggtattacatccctgctcgcaaatggcgtgtatgctgctgcctacccactccatgatggggactacaatggcgagaacgtggagttcaacgaccgcaagcttctttatgaggaatgggcgagatacggagtgttttacaagtaccagccaatcgacctcgtgagaaaatactttggggagaagattgggttgtacttcgcctggctgggtgtatacacacagatgctgatccctgcgtcgatagtggggatcatcgtctttttgtacggatgtgccactatggatgaaaacattcccagtatggagatgtgcgaccaaagacacaacatcactatgtgcccactctgtgataagacctgtagctactggaaaatgtcaagcgcctgcgccacggccagggctagccatctgttcgacaatcccgcaactgtatttttctctgtatttatggctctgtgggcggctaccttcatggaacattggaaaagaaagcaaatgcgcttgaattatcggtgggacctgacaggattcgaggaggaggaagatcaccccagggctgagtatgaggcccgtgtgttagaaaaaagcctaaagaaggaatctaggaacaaagaaaccgacaaagtgaagttgacatggcgtgaccgcttccccgcatacctgactaaccttgtgtcaatcatttttatgatcgccgtgacattcgcaattgtactcggcgtgatcatttacaggatctctatggctgctgctctcgccatgaattctagccccagtgtgcgatccaacatcagagtgaccgtgacagcaacggcagtcattattaacctggtagtcatcatactactcgacgaggtatacggatgcattgctcgttggctcactaaaatagaagtacccaagactgagaagagtttcgaggagaggcttatcttcaaggcttttctgctcaaattcgtgaactcctatacgccgattttctatgtcgcattttttaaggggcgattcgtgggccgtccgggtgactacgtgtatattttccgcagctttcggatggaggaatgcgccccagggggatgtcttatggagctctgcatccagctcagcataatcatgctcggaaaacagctaatccagaataacctatttgaaatcggaataccaaaaatgaaaaagctgatcagatatttaaaacttaagcaacagtcgcctcctgatcatgaagagtgtgttaaaaggaaacagagatacgaagtggactacaatttagagcccttcgccggactgacgccagagtacatggaaatgatcattcaattcggttttgtgaccctattcgtcgcttccttccccctggccccactgtttgccctgcttaacaatataatcgagattaggttggatgcaaaaaaattcgtcacggaactcaggaggccagtggccgtgcgggctaaggatattggcatttggtacaacattctgcgtggcatcggcaagctcgccgtgatcataaacgcatttgttatcagcttcacatctgattttatcccaaggctcgtctatttgtacatgtattctaaaaacggaaccatgcatgggttcgtaaaccacaccctgagcagcttcaacgtgagtgactttcaaaacggtacggctccaaacgaccctctcgatttgggatatgaggtgcagatctgcagatataaagactaccgggaacccccatggtctgagaataaatatgatatcagcaaggacttttgggctgtactggcagctcgcctcgcatttgtcatagtgttccagaatctggtcatgtttatgtctgatttcgttgattgggtgatcccggacatccctaaggatatctcacagcagatccacaaagagaaagtgttaatggtggaactgttcatgcgggaggagcaggataaacagcagctgctcgaaacctggatggagaaggagcgccagaaggacgagcccccatgcaaccaccataatacaaaggcatgtccggactcgctaggctcccccgctcccagtcacgcgtaccatggcggtgtgctttag

SEQ ID NO: 291962 - DNA, 2523 bp, Artificial Sequence
  derived and/or modified sequence
atggactaccacgaagatgacaaaaggtttagaagggaggagtatgagggcaatctcctagaagccggtctcgaactggagcgcgacgaggatacgaagattcatggcgttggatttgttaaaattcacgcgccatggaacgtattatgtcgagaggcggaatttctgaaactcaagatgcctaccaaaaaaatgtaccatataaatgaaacccgtggccttctgaaaaaaatcaattctgtgctacagaaaataaccgatccgattcagcccaaagtggctgaacaccggccacagaccatgaagaggctttcttatcctttctcaagagaaaaacaacacctcttcgatctctcagacaaggatagcttctttgattctaagactaggtcaactatcgtctacgagatccttaagcggaccacctgcaccaaggcaaagtatagcatgggaatcaccagcctattggccaacggagtctacgcagcagcatatcctctacatgatggcgactataacggtgaaaacgtggagttcaatgacaggaagctcctgtacgaggagtgggccagatatggggtcttttataaataccagcctattgatctcgttagaaagtacttcggcgagaagatagggctgtacttcgcatggctgggcgtgtacacacagatgctgatccctgccagcatcgtgggaatcatcgtcttcctgtacggctgcgcgaccatggacgaaaacatcccttcaatggaaatgtgtgaccaacggcataacatcacaatgtgtcctctgtgtgataagacatgttcatattggaagatgtcctctgcctgcgccaccgccagagccagccatctttttgataatcccgcaaccgtgtttttcagtgtgtttatggccctgtgggcagcaacttttatggaacactggaaaaggaaacagatgaggctgaattatcgctgggatctcaccggcttcgaagaggaggaagatcacccccgtgccgagtatgaagctcgcgtcctggaaaaatccctgaagaaggaaagtagaaacaaggagaccgataaggtgaaactgacctggagggatcgatttcctgcatatcttaccaatttggtgtcaatcatattcatgattgccgttactttcgccattgtcctcggtgttattatctacagaattagcatggccgctgccttggccatgaattctagtccttcagtccgatccaatattcgtgtcacggtcactgcgacggcggttatcattaatctggtggtgattatactcctagacgaagtgtacgggtgtatagccaggtggctgacaaagatcgaggttcccaagaccgaaaaatcattcgaagagagactgatcttcaaagcttttctcttaaaattcgtcaacagctatactcccatattttatgtggcctttttcaagggcaggttcgtcggccgtcccggtgactatgtgtacatcttcagaagctttcgtatggaggaatgcgctccaggcggatgtctgatggagctgtgtattcagctttcgattataatgcttggaaaacagcttatccaaaataacctgttcgagatcggtattcccaagatgaagaaactgatcaggtacctcaaacttaagcagcagtctcctcccgatcacgaggaatgcgtaaagagaaagcaaaggtatgaagtcgactataatctggaacctttcgctggcctcaccccagaatacatggagatgatcatacagttcggattcgtcactctgtttgtggcctcatttccgttggcgccactgtttgcccttcttaacaatattatcgagatcagactggatgctaagaagttcgtaacagaactgcggcgaccagtggccgttcgcgcaaaagacatcgggatttggtacaatatactgcgtggcattgggaagttggccgttatcatcaacgctttcgttatttcttttacttcagactttatcccccgtcttgtctacctgtatatgtattcaaaaaacggcaccatgcacggttttgtcaaccatacgctctcctcattcaacgtgtcagatttccaaaatggaacagctcccaatgacccactagacctaggatatgaggtgcaaatctgtaggtacaaggactatagagagcccccatggtcggaaaataagtacgacatcagcaaggatttctgggccgtgctggctgccagactcgccttcgtgatcgtctttcaaaaccttgtgatgttcatgtctgattttgtggactgggtcatccctgatattcctaaggatatttcacagcagattcacaaggaaaaagtgctgatggttgagctgttcatgagggaagagcaagacaagcaacaactgttggaaacgtggatggaaaaggagagacagaaggacgagcccccatgcaatcaccacaacacaaaggcctgtccagactcactgggctctcctgccccatcgcacgcctatcatggaggcgtactgtag

SEQ ID NO: 291963 - DNA, 942 bp, Artificial Sequence
  derived and/or modified sequence
atgctagatgccgcaagtaaagcacgggaggctcccgaggccgctcctggctgggatgacccccagggcgagggtcgtcggggacggggagaaggtttgagttgggctgttggtcctcatcctgatcctggggtgttgatgcagggagaggtgtggagtggacggtttagtcatgccgtgatccagttcgggtttgtcacgctgttcgtggcctccttcccactcgctccacttttcgctctcctgaacaatattatagagatccggctcgacgcaaaaaagtttgtgaccgagcttagacgccctgtagctgtccgggctaaggacattggtatctggtacaatattcttcggggaattggcaagctggccgtgatcattaacgcttttgtcatctcctttacttctgactttatacctcggctggtctacctctatatgtattccaagaacgggacaatgcacggcttcgtgaatcacaccctatcaagtttcaacgtgtccgacttccaaaatggaacagcccctaacgatccattggacctggggtatgaggtccaaatctgtagatacaaggactaccgggagcccccatggtcggagaacaaatacgatataagcaaagacttttgggccgtcttagcagcccgactggcatttgtaattgtttttcagaatctggtaatgttcatgtcagattttgtagattgggtgatcccagacataccaaaagatattagtcagcagatccacaaggaaaaggtgttgatggtggagctattcatgcgcgaggagcaggacaaacagcagctgctcgaaacatggatggagaaagagagacaaaaagacgagccaccttgcaatcaccacaacactaaggcttgccctgacagcctgggctcccctgccccaagccatgcctaccacggtggtgtgttatag

SEQ ID NO: 291964 - DNA, 2523 bp, Artificial Sequence
  derived and/or modified sequence
atggactaccacgaggacgacaagagattcagaagagaggagtacgagggcaacctgctggaggccggcctggagctggagagagacgaggacaccaagatccacggcgtgggcttcgtgaagatccacgccccctggaacgtgctgtgcagagaggccgagttcctgaagctgaagatgcccaccaagaagatgtaccacatcaacgagaccagaggcctgctgaagaagatcaacagcgtgctgcagaagatcaccgaccccatccagcccaaggtggccgagcacagaccccagaccatgaagagactgagctaccccttcagcagagagaagcagcacctgttcgacctgagcgacaaggacagcttcttcgacagcaagaccagaagcaccatcgtgtacgagatcctgaagagaaccacctgcaccaaggccaagtacagcatgggcatcaccagcctgctggccaacggcgtgtacgccgccgcctaccccctgcacgacggcgactacaacggcgagaacgtggagttcaacgacagaaagctgctgtacgaggagtgggccagatacggcgtgttctacaagtaccagcccatcgacctggtgagaaagtacttcggcgagaagatcggcctgtacttcgcctggctgggcgtgtacacccagatgctgatccccgccagcatcgtgggcatcatcgtgttcctgtacggctgcgccaccatggacgagaacatccccagcatggagatgtgcgaccagagacacaacatcaccatgtgccccctgtgcgacaagacctgcagctactggaagatgagcagcgcctgcgccaccgccagagccagccacctgttcgacaaccccgccaccgtgttcttcagcgtgttcatggccctgtgggccgccaccttcatggagcactggaagagaaagcagatgagactgaactacagatgggacctgaccggcttcgaggaggaggaggaccaccccagagccgagtacgaggccagagtgctggagaagagcctgaagaaggagagcagaaacaaggagaccgacaaggtgaagctgacctggagagacagattccccgcctacctgaccaacctggtgagcatcatcttcatgatcgccgtgaccttcgccatcgtgctgggcgtgatcatctacagaatcagcatggccgccgccctggccatgaacagcagccccagcgtgagaagcaacatcagagtgaccgtgaccgccaccgccgtgatcatcaacctggtggtgatcatcctgctggacgaggtgtacggctgcatcgccagatggctgaccaagatcgaggtgcccaagaccgagaagagcttcgaggagagactgatcttcaaggccttcctgctgaagttcgtgaacagctacacccccatcttctacgtggccttcttcaagggcagattcgtgggcagacccggcgactacgtgtacatcttcagaagcttcagaatggaggagtgcgcccccggcggctgcctgatggagctgtgcatccagctgagcatcatcatgctgggcaagcagctgatccagaacaacctgttcgagatcggcatccccaagatgaagaagctgatcagatacctgaagctgaagcagcagagcccccccgaccacgaggagtgcgtgaagagaaagcagagatacgaggtggactacaacctggagcccttcgccggcctgacccccgagtacatggagatgatcatccagttcggcttcgtgaccctgttcgtggccagcttccccctggcccccctgttcgccctgctgaacaacatcatcgagatcagactggacgccaagaagttcgtgaccgagctgagaagacccgtggccgtgagagccaaggacatcggcatctggtacaacatcctgagaggcatcggcaagctggccgtgatcatcaacgccttcgtgatcagcttcaccagcgacttcatccccagactggtgtacctgtacatgtacagcaagaacggcaccatgcacggcttcgtgaaccacaccctgagcagcttcaacgtgagcgacttccagaacggcaccgcccccaacgaccccctggacctgggctacgaggtgcagatctgcagatacaaggactacagagagcccccctggagcgagaacaagtacgacatcagcaaggacttctgggccgtgctggccgccagactggccttcgtgatcgtgttccagaacctggtgatgttcatgagcgacttcgtggactgggtgatccccgacatccccaaggacatcagccagcagatccacaaggagaaggtgctgatggtggagctgttcatgagagaggagcaggacaagcagcagctgctggagacctggatggagaaggagagacagaaggacgagcccccctgcaaccaccacaacaccaaggcctgccccgacagcctgggcagccccgcccccagccacgcctaccacggcggcgtgctgtag

SEQ ID NO: 291965 - DNA, 942 bp, Artificial Sequence
  derived and/or modified sequence
atgctggacgccgccagcaaggccagagaggcccccgaggccgcccccggctgggacgacccccagggcgagggcagaagaggcagaggcgagggcctgagctgggccgtgggcccccaccccgaccccggcgtgctgatgcagggcgaggtgtggagcggcagattcagccacgccgtgatccagttcggcttcgtgaccctgttcgtggccagcttccccctggcccccctgttcgccctgctgaacaacatcatcgagatcagactggacgccaagaagttcgtgaccgagctgagaagacccgtggccgtgagagccaaggacatcggcatctggtacaacatcctgagaggcatcggcaagctggccgtgatcatcaacgccttcgtgatcagcttcaccagcgacttcatccccagactggtgtacctgtacatgtacagcaagaacggcaccatgcacggcttcgtgaaccacaccctgagcagcttcaacgtgagcgacttccagaacggcaccgcccccaacgaccccctggacctgggctacgaggtgcagatctgcagatacaaggactacagagagcccccctggagcgagaacaagtacgacatcagcaaggacttctgggccgtgctggccgccagactggccttcgtgatcgtgttccagaacctggtgatgttcatgagcgacttcgtggactgggtgatccccgacatccccaaggacatcagccagcagatccacaaggagaaggtgctgatggtggagctgttcatgagagaggagcaggacaagcagcagctgctggagacctggatggagaaggagagacagaaggacgagcccccctgcaaccaccacaacaccaaggcctgccccgacagcctgggcagccccgcccccagccacgcctaccacggcggcgtgctgtag

SEQ ID NO: 291966 - protein, 186 aa, Artificial Sequence
  derived and/or modified sequence
MFWKFDLHSSSHIDTLLEREDVTLKELMDEEDVLQECKAQNRKLIEFLLKAECLEDLVSFIIEEPPQDMDEKIRYKYPNISCELLTSDVSQMNDRLGEDESLLMKLYSFLLNDSPLNPLLASFFSKVLSILISRKPEQIVDFLKKKHDFVDLIIKHIGTSAIMDLLLRLLTCIEPPQPRQDVLNWL

SEQ ID NO: 291967 - DNA, 747 bp, Artificial Sequence
  derived and/or modified sequence
atgaacgacagactgggcgaggacgagagcctgctgatgaagctgtacagcttcctgctgaacgacagccccctgaaccccctgctggccagcttcttcagcaaggtgctgagcatcctgatcagcagaaagcccgagcagatcgtggacttcctgaagaagaagcacgacttcgtggacctgatcatcaagcacatcggcaccagcgccatcatggacctgctgctgagactgctgacctgcatcgagcccccccagcccagacaggacgtgctgaactggctgaacgaggagaagatcatccagagactggtggagatcgtgcaccccagccaggaggaggacagacacagcaacgccagccagagcctgtgcgagatcgtgagactgagcagagaccagatgctgcagatccagaacagcaccgagcccgacctgctgctggccagcggcctgcccgacctgaacggcgtgggccccagaggcctgctggtggacaacatgctgtggagcagactggtggtgagcttcgccagccacggccagggcctggcccccctggtggcccacgtggccagcgtggtgtggacctggtggctgctgcaccccaccgtggccagcgtggtgtggacctggtggctgctgcaccccacccagggcaacagcgtgctgctgcaccccaccgactgctgggagagagccagcggcaccttcctgtggggcatcatcctgttctgcctgagctag

SEQ ID NO: 291968 - DNA, 228 bp, Artificial Sequence
  derived and/or modified sequence
atgttctggaagttcgacctgcacagcagcagccacatcgacaccctgctggagagagaggacgtgaccctgaaggagctgatggacgaggaggacgtgctgcaggagtgcaaggcccagaacagaaagctgatcgagttcctgctgaaggccgagtgcctggaggacctggtgagcttcatcatcgaggagcccccccaggacatggacgagaagatcagatactag

SEQ ID NO: 291969 - DNA, 561 bp, Artificial Sequence
  derived and/or modified sequence
atgttctggaagttcgacctgcacagcagcagccacatcgacaccctgctggagagagaggacgtgaccctgaaggagctgatggacgaggaggacgtgctgcaggagtgcaaggcccagaacagaaagctgatcgagttcctgctgaaggccgagtgcctggaggacctggtgagcttcatcatcgaggagcccccccaggacatggacgagaagatcagatacaagtaccccaacatcagctgcgagctgctgaccagcgacgtgagccagatgaacgacagactgggcgaggacgagagcctgctgatgaagctgtacagcttcctgctgaacgacagccccctgaaccccctgctggccagcttcttcagcaaggtgctgagcatcctgatcagcagaaagcccgagcagatcgtggacttcctgaagaagaagcacgacttcgtggacctgatcatcaagcacatcggcaccagcgccatcatggacctgctgctgagactgctgacctgcatcgagcccccccagcccagacaggacgtgctgaactggctgtag

SEQ ID NO: 291970 - DNA, 747 bp, Artificial Sequence
  derived and/or modified sequence
atgaatgaccggctgggggaggatgaatctctgctcatgaagctgtactccttcctgttgaacgatagccctctaaatccactactcgcgtcttttttttccaaggtgttaagcattctcatcagccgtaaacccgaacaaatcgtggattttctcaagaagaagcacgacttcgttgacctaataatcaagcatattggcacgtcagcaatcatggatctgctactgcgattattgacatgtatcgaaccaccccagcctcgccaggacgtactgaattggctcaacgaggagaagatcatccaaagactggtcgaaattgttcatccatcccaggaggaagatcggcactccaatgcctcccagtccctttgcgagattgtgcggctttcccgtgaccaaatgctgcaaattcaaaactctacagaacctgacttgctgctggcttcaggactgcccgaccttaacggtgtgggcccccggggactactggtcgacaacatgctgtggtctcgcctggtggtgtcattcgcaagccacggccagggcctggcgccactggtcgcccacgtggcctctgtagtctggacgtggtggctccttcacccaaccgttgcttccgttgtctggacttggtggctgttgcatcccacccaggggaactctgttctgctccatccaacagattgttgggagagggctagcggtacatttctatggggtataattctcttctgtctgagctag

SEQ ID NO: 291971 - DNA, 228 bp, Artificial Sequence
  derived and/or modified sequence
atgttttggaagttcgatttgcattccagtagtcatatcgacactctgctggagcgcgaggatgtgacactgaaggagttgatggacgaggaggatgtgctacaagagtgcaaagcccaaaatcgcaagttaattgaattcctactaaaggctgagtgtctggaagatcttgtgagcttcatcatcgaggagcctccccaagacatggacgaaaaaattcggtattag

SEQ ID NO: 291972 - DNA, 561 bp, Artificial Sequence
  derived and/or modified sequence
atgttttggaaattcgatctacattcctctagccacattgacaccctgctcgagcgggaagacgtcacattgaaggagcttatggatgaggaagacgtactgcaggaatgcaaggcacagaatcgaaagctgattgaattcctgttgaaggcagaatgcttagaagatctagtctcttttatcatagaggagccccctcaggacatggatgagaaaatacggtataaataccctaatatttcttgcgagcttctcacgtcggacgtctcgcaaatgaacgacagactgggcgaagatgagtccctgctgatgaagctctattcattcttgctgaatgactctccgctgaatcccctgctggccagcttcttttccaaagtgctctctatcctgatttcccggaaaccagagcagattgtggacttcttgaagaagaaacacgactttgtggacctgatcattaagcacatcgggacaagtgcaatcatggacctcctgctgagactactgacgtgcatcgaaccaccgcagcctcgccaggatgttctgaattggctctag

SEQ ID NO: 291973 - DNA, 747 bp, Artificial Sequence
  derived and/or modified sequence
atgaatgaccggctgggagaagatgagagcctgctgatgaagctgtacagcttcctgctgaatgacagccccctgaaccccctgctggccagcttcttcagcaaggtgctgagcatcctgatcagcaggaagccagagcagatcgtggacttcctgaagaagaagcatgactttgtggacctgatcatcaagcacatcggcaccagcgccatcatggacctgctgctgcggctgctgacctgcatcgagcccccccagccccggcaggatgtgctgaactggctgaatgaggagaagatcatccagaggctggtggagatcgtgcaccccagccaggaggaggacagacacagcaatgccagccagagcctgtgtgaaattgtgcggctgagccgggaccagatgctgcagatccagaacagcacagagccagacctgctgctggccagcggcctgcctgacctgaatggagtgggcccccggggcctgctggtggacaacatgctgtggagccggctggtggtgtcctttgccagccacggccagggcctggcccccctggtggcccacgtggcctctgtggtgtggacctggtggctgctgcaccccaccgtggcctctgtggtgtggacctggtggctgctgcaccccacccagggcaacagcgtgctgctgcaccccacagactgctgggagcgggccagcggcaccttcctgtggggcatcatcctcttctgcctgtcctag

SEQ ID NO: 291974 - DNA, 228 bp, Artificial Sequence
  derived and/or modified sequence
atgttctggaagtttgacctgcacagcagcagccacatcgacaccctgctggagcgggaggatgtgaccctgaaggagctgatggatgaagaagatgtgctgcaggagtgcaaggcccagaacaggaagctgattgagttcctgctgaaggccgagtgcctggaggacctggtgtccttcatcatcgaggagcccccccaggacatggatgagaagatccgctactag

SEQ ID NO: 291975 - DNA, 561 bp, Artificial Sequence
  derived and/or modified sequence
atgttctggaagtttgacctgcacagcagcagccacatcgacaccctgctggagcgggaggatgtgaccctgaaggagctgatggatgaagaagatgtgctgcaggagtgcaaggcccagaacaggaagctgattgagttcctgctgaaggccgagtgcctggaggacctggtgtccttcatcatcgaggagcccccccaggacatggatgagaagatccgctacaagtaccccaacatcagctgtgagctgctgaccagtgatgtgtcccagatgaatgaccggctgggggaggatgagagcctgctgatgaagctgtacagcttcctgctgaatgacagccccctgaaccccctgctggccagcttcttcagcaaggtgctgagcatcctgatcagcaggaagccagagcagatcgtggacttcctgaagaagaagcatgactttgtggacctgatcatcaagcacatcggcaccagcgccatcatggacctgctgctgcggctgctgacctgcatcgagcccccccagccccggcaggatgtgctgaactggctgtag

SEQ ID NO: 291976 - DNA, 747 bp, Artificial Sequence
  derived and/or modified sequence
atgaacgaccggctgggcgaggacgagagcctgctgatgaagctgtactctttccttctgaacgatagtcccctcaaccccctgctggctagtttcttctccaaagttctctccattctgatttctaggaaaccagagcagatcgtcgattttctgaagaagaaacatgatttcgtggacctgataattaagcatattggcacttccgcgattatggacttattactacggctattaacatgcatcgaacctccacaaccgagacaggacgtgctgaattggttgaacgaagagaaaataatccagaggctggtggagatagtgcatccgagtcaagaggaggaccgtcacagcaatgcctcacagagcctctgcgaaatcgtgcggctgtccagagaccagatgctccaaatccaaaattcaaccgagcccgatctgctgttagcctctgggttacctgatttgaacggggtcggtcccaggggactgttagtggacaacatgctctggagccggcttgtcgtgtccttcgcttcacatggccagggcctagctccgctagtggcccacgtcgctagcgtcgtgtggacgtggtggctgcttcaccccaccgtggccagcgtagtttggacttggtggctgctgcaccctactcagggaaactctgtgttgctgcacccaaccgattgctgggaacgagcctctgggacatttctgtggggtataattcttttctgcttgtcttag

SEQ ID NO: 291977 - DNA, 228 bp, Artificial Sequence
  derived and/or modified sequence
atgttctggaagttcgacctgcacagcagcagccacatcgacaccttgcttgagagggaggacgtgactttaaaagagctcatggacgaagaagacgtccttcaggagtgcaaagcccagaacaggaagttgatcgagttcctcctcaaggcagaatgcctcgaggatctggtcagcttcatcattgaggaaccgccacaagatatggacgaaaaaatcaggtattag

SEQ ID NO: 291978 - DNA, 561 bp, Artificial Sequence
  derived and/or modified sequence
atgttctggaagttcgacctgcacagcagcagccacatcgacaccctcctggaaagagaggacgtgacactaaaagaacttatggatgaggaggatgtgctgcaagaatgtaaagcacaaaaccggaagcttatcgagttcctgctcaaggccgagtgtctcgaggacctggtctctttcatcattgaagagccccctcaggacatggatgaaaaaattcggtacaagtacccgaacatctcatgcgagctgctgacttccgacgtatcgcagatgaatgatcggctcggcgaggacgagtccttgcttatgaaactgtatagtttccttttaaatgattcgccgctaaaccctctgctagcttccttcttttcaaaggtactctcgatccttatttctaggaagccagaacagatcgtggacttcctgaagaaaaagcatgattttgtcgatctcataatcaaacatatcggcacatccgcaattatggatctgttgcttcgtttactcacctgcatcgaaccccctcagccaagacaggatgtgctcaattggttgtag

SEQ ID NO: 291979 - DNA, 1287 bp, Artificial Sequence
  derived and/or modified sequence
gaactcaaggcctgcttgatacgtccgccattttgggcgcttcgctgatggtgtcggtgagcgcgtttcccgcctgagcgcaactagcggcgggtcgtgggcacctccaggagagcttgtttcatatccatatcccactgtattcctgctaatctgctaatgcagtaaattggaggaaaactgttaccaggataacctgtaatgggcaaggagccacaaagaagaaaacatttcttttaatttttaaacttggtttgaaagaccagcatgttttggaaatttgatcttcactcatcatcccacatagacacacttctagaaagagaagatgtaacactgaaggagttaatggatgaggaagatgttttacaggaatgtaaagctcagaaccgcaaacttatagagtttctgttaaaagcagaatgtctcgaagatttagtctcattcattatagaagaaccacctcaagacatggatgaaaagatcagatacaagtatccaaatatatcttgtgagttgctcacttctgatgtctcccagatgaatgatagactgggagaagatgaatccttgctaatgaaattatatagcttcctcctaaacgattcccctttgaatccactacttgccagtttcttcagcaaggtgctaagtattcttatcagcagaaaaccagaacagattgtggatttcttaaagaagaagcatgattttgtagaccttattataaagcacataggaacttctgctatcatggatttgttgctcaggctcctgacgtgtatcgaacctccacagcccaggcaagatgtgctgaattggttaaatgaggagaaaattatccagaggcttgtggaaatagttcatccatcgcaagaagaagatcgacattcaaatgcatcacaatcactttgtgaaattgttcgcctgagcagagaccagatgttacaaattcagaacagtacagagcccgacctcctgcttgcctcagggctgcctgacttgaatggcgttggacctcggggattactggtagataatatgctctggtctcgcctggtggtgagttttgccagccatggccagggtttggctccactggtggcacacgtggcctccgtggtatggacctggtggcttctccatcccactgtggcctctgtggtatggacctggtggcttctccatcctacccaaggtaacagtgtcttgcttcatcccactgactgctgggagagagcctctgggacttttctttggggcatcattttgttttgtctttcgtag

SEQ ID NO: 291980 - DNA, 747 bp, Artificial Sequence
  derived and/or modified sequence
atgaatgacaggttgggagaggatgagagcctcctcatgaagttatattcttttttactcaatgacagtcccctgaatcctctgctggccagctttttcagtaaggtgcttagcatcctgatatctaggaagcccgagcagattgtggacttcctcaagaagaagcatgacttcgtagacctgatcatcaaacatatcggtacttccgccatcatggatctcctgttgaggctgttaacttgcatcgaaccgcctcaaccgcgacaggacgtactgaattggttaaacgaagagaagattatccagaggcttgttgaaatcgtgcacccctctcaggaagaggataggcatagtaacgccagccaaagtctgtgtgaaattgtccggctgagtcgggatcaaatgctgcagatccagaattccactgaacccgatctgctcttagcaagcggcctgcctgacctgaatggggtcgggcctcgaggcttgctggtggataacatgctttggtctcgcctggtggtttcgtttgcctctcatggacaggggcttgcgcctctggtggcccacgtcgcatccgtagtgtggacctggtggcttctacaccctactgtggccagcgtagtgtggacatggtggctgcttcaccccacccaaggaaactctgtgctgctgcatcctacagattgttgggagcgagcttccggtacctttctgtgggggattatacttttctgcctatcttag

SEQ ID NO: 291981 - DNA, 228 bp, Artificial Sequence
  derived and/or modified sequence
atgttctggaagttcgatctgcattcttcatcccacatcgacactcttctagagagagaggatgtcacattgaaggagctcatggatgaagaggatgttctccaagagtgcaaggctcaaaaccggaagctaatcgaattcctgttgaaggcagaatgccttgaagatctggtcagctttatcatcgaggagcctccccaggacatggatgagaagatccgttattag

SEQ ID NO: 291982 - DNA, 561 bp, Artificial Sequence
  derived and/or modified sequence
atgttttggaaatttgacctccattcatcttcgcacatcgacacactactggagcgggaggatgttacgttaaaggagctgatggacgaagaagatgtgctgcaagagtgcaaggcccaaaaccgcaagttgattgagttcctcctgaaggccgagtgcttggaggatctggtttcttttatcattgaagaaccaccgcaagacatggatgagaagattcgctacaaatatcctaacatttcttgcgagttattgacatctgacgtctcccagatgaacgaccggctaggggaagatgaatctttgctgatgaagctctactcatttcttctgaacgacagcccgctcaatccgctgctggctagcttcttttcaaaggtgctatctattctgatatctcgcaagcccgagcagatcgtggacttcctgaagaaaaagcacgatttcgtagatctcatcataaagcatatcggcacttctgccataatggacctgcttctgagacttctgacatgtatagaaccaccccagccgagacaggatgtgcttaactggctgtag

SEQ ID NO: 291983 - DNA, 603 bp, Artificial Sequence
  derived and/or modified sequence
ttttgggcgcttcgctgatggtgtcggtgagcgcgtttcccgcctgagcgcaactagcggcgggtcgtgggcacctccaggctcagaaggaaagaaaacatctcccaggaccagatgtggagtagatgggagttggagagaagctgaagcccaggcccagcaacaggctgggggcccaggtgcttcgggggtcccagccattaacagagcttcgtgcaggagagcttgtttcatatccatatcccactgtattcctgctaatctgctaatgcagtaaattggaggaaaactgttaccaggataacctgtaatgggcaaggagccacaaagaagaaaacatttcttttaatttttaaacttggtttgaaagaccagcatgttttggaaatttgatcttcactcatcatcccacatagacacacttctagaaagagaagatgtaacactgaaggagttaatggatgaggaagatgttttacaggaatgtaaagctcagaaccgcaaacttatagagtttctgttaaaagcagaatgtctcgaagatttagtctcattcattatagaagaaccacctcaagacatggatgaaaagatcagatacaa

SEQ ID NO: 291984 - DNA, 687 bp, Artificial Sequence
  derived and/or modified sequence
agagctttgtgctgaacatcagtcctccacatcgactcctcttgtaagatgttgtgtccaggtggatcatcacagtggctgccatccttaaatatgtcttggtcctgttgctgctaattgataccagcatgttttggaaatttgatcttcactcatcatcccacatagacacacttctagaaagagaagatgtaacactgaaggagttaatggatgaggaagatgttttacaggaatgtaaagctcagaaccgcaaacttatagagtttctgttaaaagcagaatgtctcgaagatttagtctcattcattatagaagaaccacctcaagacatggatgaaaagatcagatacaagtatccaaatatatcttgtgagttgctcacttctgatgtctcccagatgaatgatagactgggagaagatgaatccttgctaatgaaattatatagcttcctcctaaacgattcccctttgaatccactacttgccagtttcttcagcaaggtgctaagtattcttatcagcagaaaaccagaacagattgtggatttcttaaagaagaagcatgattttgtagaccttattataaagcacataggaacttctgctatcatggatttgttgctcaggctcctgacgtgtatcgaacctccacagcccaggcaagatgtgctgaattggttaa

SEQ ID NO: 291985 - DNA, 551 bp, Artificial Sequence
  derived and/or modified sequence
attttgggcgcttcgctgatggtgtcggtgagcgcgtttcccgcctgagcgcaactagcggcgggtcgtgggcacctccaggagagcttgtttcatatccatatcccactgtattcctgctaatctgctaatgcagtaaattggaggaaaactgttaccaggataacctgtaatgggcaaggagccacaaagaagaaaacatttcttttaatttttaaacttggtttgaaagaaaaatttcgttctttgccctgtgctcagaagatcacaataaaacttcaccacatcaagctgctgtgggatagggcaaaccgggatggttaagtccatgagtgcatgaagtttactgttggtgctactggttcagtaacaggtgatggatttcaaaagtctccagatgcctgctggcgaataatcaaagaataactaccagcatgttttggaaatttgatcttcactcatcatcccacatagacacacttctagaaagagaagatgtaacactgaaggagttaatggatgaggaagatgttttacaggaatgtaaagct

SEQ ID NO: 291986 - protein, 1004 aa, Artificial Sequence
  derived and/or modified sequence
MPVVWPTLLDLSRDECKRILRKLELEAYAGVISALRAQGDLTKEKKDLLGELSKVLSISTERHRAEVRRAVNDERLTTIAHNMSGPNSSSEWSIEGRRLVPLMPRLVPQTAFTVTANAVANAAIQHNASLPVPAETGSKEGVSCSDEDEKPRKRRRTNSSSSSPVVLKEVPKAVVPVSKTITVPVSGSPKMSNIMQSIANSLPPHMSPVKITFTKPSTQTTNTTTQKVIIVTTSPSSTFVPNILSKSHNYAAVTKLVPTSVIASTTQKPPVVITASQSSLVSNSSSGSSSSTPSPIPNTVAVTAVVSSTPSVVMSTVAQGVSTSAIKMASTRLPSPKSLVSAPTQILAQFPKQHQQSPKQQLYQVQQQTQQQVAQPSPVSHQQQPQQSPLPPGIKPTIQIKQESGVKIITQQVQPSKILPKPVTAILTATRPITKMIVTQPKGIGSTVQPAAKIIPTKIVYGQQGKTQVLIKPKPVTFQATVVSEQTRQLVTETLQQASRVAEAGNSSIQEGKEEPQNYTDSSSSSTESSQSSQVSHRSQPQQPSQPQRTLLQHVAQSQTATQTSVVVKSIPASSPGAITHIMQQALSSHTAFTKHSEELGTEEGEVEEMDTLDPQTGLFYRSALTQSQSAKQQKLSQPPLEQTQLQVKTLQCFQTKQKQTIHLQADQLQHKLPQMPQLSIRHQKLTPLQQEQAQPKPDVQHTQHPMVAKDRQLPTLMAQPPQTVVQVLAVKTTQQLPKLQQAPNQPKIYVQPQTPQSQMSLPASSEKQTASQVEQPIITQGSSVTKITFEGRQPPTVTKITGGSSVPKLTSPVTSISPIQASEKTAVSDILKMSLMEAQIDTNVEHMIVDPPKKALATSMLTGEAGSLPSTHMVVAGMANSTPQQQKCRESCSSPSTVGSSLTTRKIDPPAVPATGQFMRIQNVGQKKAEESPAEIIIQAIPQYAIPCHSSSNVVVEPSGLLELNNFTSQQLDDEETAMEQDIDSSTEDGTEPSPSQSSAERS

SEQ ID NO: 291987 - DNA, 3015 bp, Artificial Sequence
  derived and/or modified sequence
atgccggtcgtctggccaacccttctcgacctgtctcgcgatgagtgcaagcgcatcctgaggaagcttgagctggaagcctacgctggcgtgatctcagctctcagagcccagggggatctcactaaggaaaagaaggacctgctgggcgaactctccaaagtgctgtcaatctcaacagagcggcaccgggcagaggtgcgacgggctgtcaacgacgagaggctgacaactatagcccataacatgtccggtccgaacagctcctctgagtggagtatcgagggcaggagactggtaccactcatgcctcgactcgttccacagacagctttcactgtgaccgccaacgccgtggcaaatgcggccattcagcataatgcctccctgcccgtgcccgccgaaaccggttccaaggagggcgtcagttgcagtgacgaagacgaaaagccaaggaagcggcgaaggaccaattcatcatcctcaagtcctgtggtgttaaaggaagtcccgaaggcagtagtgccagtcagcaagacgattaccgttcccgtgtctggtagccctaaaatgtcaaacattatgcagagcattgctaactctttaccacctcacatgagcccagtgaagattactttcactaagccttccacccagaccactaatacgaccactcagaaagtgatcatcgtgaccacatcacccagtagtacatttgtgccgaacattctgtccaaatcgcacaattacgcagctgttacgaaattggtccccacctcggtcattgccagtaccacacaaaagcctccagtggtcatcacagcatcgcagagcagcctggtcagcaacagcagttcaggttcctcctccagcacaccttctcctatccccaacactgtggcggtgaccgctgtggtgtcctcaacgccttccgtggtcatgtcaacagtggcgcagggtgtctccacctccgctatcaagatggcctccacgcggctcccctctccaaaaagtctcgtgagcgcgcccacgcagatcctggcacagttcccaaaacagcaccagcagagccccaagcagcagctataccaggtgcagcaacagacacagcaacaggtggctcagccttctcctgtgtcacaccaacaacagccccaacaatcacctctgccacctgggattaagcctacaatccaaattaagcaagaaagcggggttaagatcatcacacagcaggtccaaccatccaaaatcctcccaaaacccgtgactgccatcctcactgcgaccagaccaatcactaagatgattgtgactcagcctaagggtatagggtctacagtgcaaccagctgccaagatcattcccaccaagattgtgtacgggcagcaaggaaaaacgcaggttctgattaaaccgaaaccggtgaccttccaggctaccgtggtgagcgagcagaccaggcagctggtgaccgagacactccaacaggcatcccgcgtagcagaggccgggaacagttccatccaggagggaaaagaagaaccacagaactacacggacagctcctcctccagcaccgagtccagccagtcgagccaggtgtcccatcgtagtcagccgcagcaaccatctcagcctcagaggaccctcttgcagcatgtggctcagtcacagaccgcgacgcaaacgagtgtggtggtgaagtcgatacctgcctctagcccaggtgcaatcacccacatcatgcaacaagctctctcgagccatactgccttcacgaaacacagcgaggagctcggcaccgaggaaggagaggtggaggaaatggacactttggatcctcagaccggactgttttacagaagtgcacttacacagtcccagagtgccaaacaacagaaactttctcagcctccgttggagcaaacccagctgcaggtgaaaacactacagtgttttcaaactaagcagaaacagacaatccatcttcaagccgaccagctgcagcataaattgccacaaatgccccagctgagcatcagacatcagaaactgacacccctgcaacaagaacaggcccagccaaaacctgacgtgcagcatactcaacatcctatggtcgcaaaagaccggcagctgccgaccttgatggctcaacccccccagactgtggtccaggtcttggctgtgaaaacaacccaacagcttccgaaactccagcaggcccccaaccaaccgaaaatctatgtgcaaccccaaaccccacagtcccagatgagtttacccgcctcctcagagaagcagaccgcatcccaggtggagcaacccataattactcaaggctcgagtgtgaccaagatcacttttgagggacgacagcccccgaccgtaaccaaaataactggcggtagcagtgtccccaaattgacctccccggtcactagtattagccctattcaggcgtcggagaaaacagctgtctcagacatactgaagatgagtttgatggaggcccagattgacacaaacgtagaacatatgattgtagacccacccaaaaaagccctggctaccagtatgcttacaggcgaggctggtagcttgccatccacccacatggtcgttgctggaatggctaattcaaccccacagcagcagaaatgtcgagaatcctgctcaagtccgtctactgtgggaagctccctgaccaccaggaagattgacccaccagcagtgccagccaccggccagtttatgcgaatccaaaacgtaggacagaagaaggctgaagaatctcccgccgagatcatcattcaggctattcctcagtacgccatcccatgtcattccagtagtaatgttgtagtggagccatctggcctcctcgaactcaataacttcacttctcagcagctggacgacgaggaaaccgccatggagcaggacatagattcttcaacagaggacggaactgagccctcaccctcccagtcgtcagctgagaggtcctag

SEQ ID NO: 291988 - DNA, 3015 bp, Artificial Sequence
  derived and/or modified sequence
atgcctgtggtgtggcccaccctgctggacctgagcagagatgagtgcaagaggatcctgaggaagctggagctggaggcctatgctggggtcatcagcgccctgcgggcccagggcgacctgaccaaggagaagaaggacctgctgggggagctgagcaaggtgctgagcatcagcacagagcggcacagagctgaggtgcggcgggctgtgaatgatgagcggctgaccaccatcgcccacaacatgagcggccccaacagcagcagcgagtggagcattgagggccgccgcctggtgcccctgatgccccggctggtgccccagacagccttcaccgtgacagccaatgctgtggccaatgctgccatccagcacaatgccagcctgcctgtgcctgctgagaccggcagcaaggagggcgtgtcctgcagtgatgaagatgagaagcccaggaagagaagaaggaccaacagcagcagcagcagccctgtggtgctgaaggaggtgcccaaggctgtggtgcctgtgtccaagaccatcaccgtgcctgtgtctggcagccccaagatgagcaacatcatgcagagcatcgccaacagcctgcccccccacatgagccctgtgaagatcaccttcaccaagcccagcacccagaccaccaacaccaccacccagaaggtgatcatcgtgaccaccagccccagcagcacctttgtgcccaacatcctgagcaagagccacaactatgctgctgtgaccaagctggtgcccaccagcgtcatcgccagcaccacccagaagccccctgtggtgatcacagccagccagagcagcctggtgagcaacagcagcagcggcagcagcagcagcacccccagccccatccccaacacagtggccgtgacagctgtggtgagcagcaccccatctgtggtgatgagcacagtggcccagggcgtgtccaccagcgccatcaagatggccagcacccggctgcccagccccaagagcctggtgtctgcccccacccagatcctggcccagttccccaagcagcaccagcagagccccaagcagcagctgtaccaggtgcagcagcagacccagcagcaggtggcccagcccagccctgtgagccaccagcagcagccccagcagagccccctgcccccaggcatcaagcccaccatccagatcaagcaggagagcggcgtgaagatcatcacccagcaggtgcagcccagcaagatcctgcccaagcctgtgacagccatcctgacagccacccggcccatcaccaagatgattgtgacccagcccaagggcatcggcagcacagtgcagcctgctgccaagatcatccccaccaagatcgtgtatggccagcagggcaagacccaggtgctgatcaagcccaagcctgtgaccttccaggccaccgtggtgtctgagcagacccggcagctggtgacagagaccctgcagcaggccagccgggtggccgaggccggcaacagcagcatccaggagggcaaggaggagccccagaactacacagacagcagcagcagcagcacagagagcagccagagcagccaggtgagccacaggagccagccccagcagcccagccagccccagaggaccctgctgcagcacgtggcccagagccagacagccacccagacctctgtggtggtgaagagcatcccagccagcagccctggggccatcacccacatcatgcagcaggccctgagcagccacacagccttcaccaagcacagcgaggagctgggcacagaggagggggaggtggaggagatggacaccctggacccccagacaggcctcttctacagaagtgccctgacccagagccagagcgccaagcagcagaagctgagccagccccccctggagcagacccagctgcaggtgaagaccctgcagtgcttccagaccaagcagaagcagaccatccacctgcaggccgaccagctgcagcacaagctgccccagatgccccagctgagcatccgccaccagaagctgacccccctgcagcaggagcaggcccagcccaagccagatgtgcagcacacccagcaccccatggtggccaaggaccggcagctgcccaccctgatggcccagcccccccagacagtggtgcaggtgctggccgtgaagaccacccagcagctgcccaagctgcagcaggcccccaaccagcccaagatctacgtgcagccccagaccccccagagccagatgagcctgcctgccagcagcgagaagcagacagccagccaggtggagcagcccatcatcacccagggcagctctgtgaccaagatcacctttgagggccggcagcccccaacagtgaccaagatcaccggcggcagctctgtgcccaagctgaccagccctgtgaccagcatcagccccatccaggccagcgagaagacagctgtgtctgacatcctgaagatgagcctgatggaggcccagattgacaccaacgtggagcacatgattgtggacccccccaagaaggccctggccacctccatgctgactggagaggccggcagcctgcccagcacccacatggtggtggccggcatggccaacagcaccccccagcagcagaagtgccgggagagctgcagcagccccagcacagtgggcagcagcctgaccaccaggaagattgaccccccagctgtgcctgccaccggccagttcatgaggatccagaatgtgggccagaagaaggccgaggagagccctgctgagatcatcatccaggccatcccccagtatgccatcccctgccacagcagcagcaatgtggtggtggagcccagcggcctgctggagctgaacaacttcaccagccagcagctggatgatgaggagacagccatggagcaggacatcgacagcagcacagaagatggaacagagcccagccccagccagagcagcgctgagaggagctag

SEQ ID NO: 291989 - DNA, 3015 bp, Artificial Sequence
  derived and/or modified sequence
atgcccgtggtgtggcccaccctgctggacctgagccgggacgagtgtaaaaggatcctgcggaaactcgaactggaagcctacgccggcgtgatctcagcactgcgtgcacaaggtgacctgactaaggaaaagaaagaccttctgggggaactgtcaaaagtcctttccatctctactgaacgccatcgcgctgaggtccggagagccgtgaatgacgagaggctgacaacaattgcgcataacatgtcaggcccgaattcatcctcagaatggagcattgagggtcgtaggctggtccctctgatgccccgactggtgccccagactgcattcactgtcacagcaaatgcggtcgctaacgcagccattcaacataatgcctctctcccggtcccagccgagacggggtccaaagagggcgtgagctgctcagatgaagatgagaaacccaggaaacgccgtagaaccaactcgagtagcagttcaccagttgttctcaaagaggttccaaaagccgtggttccagtgtccaagacaatcaccgtccctgttagtgggtcccccaagatgtccaacatcatgcagtccatcgcaaatagtttgccgccccatatgtcaccggtaaagattaccttcacaaaacccagtacacagaccaccaacactacaacccaaaaggtgataatagtgacaaccagcccctcatccacctttgttcctaacatattgagcaagtctcataactatgctgctgtcacaaagctcgtgccgacaagcgttatagcctcaaccacacaaaaaccccccgtcgtgatcaccgctagtcagtccagcctggtcagcaattcttcatcaggtagttcatcctctaccccatccccaatccctaacaccgtggcagtgactgccgtggtgtctagtaccccttcagtggtaatgagtacagtggcacaaggtgtatctaccagcgccatcaagatggcaagtactcgactgccctctcccaagtcactggttagcgctcccacccaaatactggcacagttccccaagcagcaccagcagagccctaagcagcagctctaccaggtgcagcaacagacccagcagcaagtcgcccagcccagccctgttagccaccagcagcagccacagcaatctcctctcccacctggcatcaagccaaccatccagatcaaacaggaaagcggggttaaaatcatcacacagcaggtgcaaccctctaagatcttgcccaagcccgtgacggctattctgaccgccacgagaccaatcacgaagatgatcgtgactcagccgaagggcataggaagcactgtccaaccggccgccaagatcataccaacaaagatcgtctacgggcagcaagggaaaacacaagttctaattaagccgaagcccgtaaccttccaggcaactgtagtgagtgagcagactcgccagttggtcaccgagacgctccaacaggccagcagagtcgccgaagccggtaattcatccatccaagagggcaaggaagagccccagaattataccgatagttcgagctcttcgaccgaaagtagccaaagtagccaggttagccaccggtcccaaccacagcaaccatcccagcctcaacgcaccttactgcagcacgttgcccaatctcagaccgcaacgcaaacatctgtggtggtcaaaagtattcccgcaagctctccaggcgccatcacacacatcatgcagcaagcacttagctctcacactgcatttaccaagcacagcgaggagctgggcaccgaagagggcgaagtggaagagatggacaccctggatccccagactgggcttttctataggtccgccctcacccaatcccagagcgccaaacagcagaagctgtcacagccaccgctggagcagacacagctccaggtaaaaactctgcaatgctttcaaactaaacagaagcaaaccatccatttgcaggctgaccaactccagcacaagttgcctcaaatgccacagcttagtatacgccatcaaaagctgacccccctccaacaagagcaggctcaacctaagccagatgtccagcacacgcaacacccgatggtcgctaaagaccgccaactgcccaccttgatggctcagccaccccaaacggtggttcaagtactcgccgtgaaaacaacccagcaactgccgaagctgcagcaagcacctaaccaaccgaaaatttacgtacagccacagacaccacagtcccaaatgtctctcccggcttcctcagagaaacagaccgcatcacaggtggagcagccgatcataactcaggggtcaagtgtgaccaagattacgtttgaaggccgtcagcctccaaccgtgaccaagatcacgggagggtctagcgtgccgaaactcacctcaccagtaacctccatttctcctatccaagcatctgaaaaaaccgccgtttctgatattctaaagatgtctctcatggaagcccaaattgacaccaatgtggagcacatgatagttgaccccccgaagaaagccctcgccacctcaatgctgactggggaagcagggtcattgccgagcactcatatggtggtcgctggaatggccaattctaccccccagcagcaaaaatgtagagaaagctgttcttcacctagcaccgtcggatcctccctgactacccggaagatcgatcctccagccgtcccggctacaggccagtttatgcgcattcagaacgttggacagaaaaaagccgaagagagccctgccgagatcatcattcaggctatcccccagtacgctattccctgtcatagctcctcgaacgtcgttgtagagccttcaggactcctggagctgaataacttcacaagtcaacagcttgatgacgaggagaccgcaatggaacaggatatcgactcatccacagaagacggaactgagccctccccttctcagagcagtgccgagcggagctag

SEQ ID NO: 291990 - DNA, 3015 bp, Artificial Sequence
  derived and/or modified sequence
atgccagtggtatggcctactcttctagacctgagcagggacgaatgtaaaagaatcctccggaagctggagctcgaagcttacgctggcgtgatcagcgccctgcgcgcacagggtgacttgacgaaggaaaaaaaggacctcctcggcgaactcagtaaggttcttagcataagcactgagaggcaccgtgctgaagtccggagggccgttaatgacgagagattaaccaccattgcccacaacatgtctggccctaattctagttctgaatggagtatagaaggccgacgactagtgccccttatgcctagactcgttcctcagaccgctttcaccgttaccgccaacgccgtagctaatgctgccattcagcacaatgcctccctccccgtgccagcggaaaccggctccaaagagggagtgtcatgttcagatgaggacgaaaagccccgaaagaggcgcagaacaaatagctcttctagctctcccgttgtgttgaaagaggtgcccaaggccgtggttcccgtcagcaaaactataacagtgcccgtgtccggtagtcccaagatgtcaaacattatgcagtctatagcaaattcactccccccacatatgagtcccgtgaagataaccttcactaaacccagcactcagacaactaacacaaccacccaaaaggtgatcatcgtgacgaccagccccagctccacattcgtgcctaatattctgtcaaaaagtcataactacgccgctgtaactaaactggttcctacatccgtgattgcgagcaccacacaaaagccccctgtggttatcactgcttctcaatctagcttggtctcaaacagttcatccggtagctcgagtagcactccttcccccattccaaatacagtggctgtcactgcagtcgtgagctcaaccccatctgtggttatgagcaccgtggctcagggggttagcaccagtgccatcaagatggcatctacccgcctgcctagcccgaaaagcctagttagcgcccctactcagatcctcgcccagtttcccaagcagcaccaacaatcacctaaacagcagctctatcaggtgcagcagcaaactcagcagcaggtggcgcagccttctcctgtgtcccaccagcagcagccacaacagtctccattgcctccagggatcaaacccaccatccagataaagcaggaatccggggttaagatcatcacgcagcaggtacagccttccaagatactaccaaagcctgtgaccgctattctgactgccacaagacccatcacaaagatgatcgtaactcagcctaaggggattggctctaccgtccagccggctgcaaaaatcattccaactaagatcgtctatggtcaacaaggcaaaacccaagtgttgattaagcccaagcctgtcacttttcaggccacagttgtgtccgagcagacccggcagctagtgactgagactttgcagcaagcctcccgcgtcgcagaagccggaaatagctccatccaggaaggtaaggaagaacctcaaaactacaccgactcaagcagctcctctaccgaatcttctcaatcctcccaggtgagccatcggagtcagccacagcaaccgagtcagcctcagcggacgttgctgcagcacgtcgcccagtcccagactgccactcagaccagcgtcgtggtaaaatccatcccagccagtagcccaggtgcaattacccatattatgcagcaggcactgtctagtcataccgcatttactaaacattcagaagagttaggaacagaagagggggaggtggaagaaatggacacactagacccccagactggcttattctacagatcggcattgacgcaatcacagtcggctaaacagcagaagctaagccagccacccctagagcagacacagttgcaggttaagacattgcagtgcttccagacaaaacaaaaacagactatccacttacaggccgaccagctgcagcataagctccctcagatgccccaattaagcattcgccaccagaagttaactcccctgcagcaggaacaggcccagccaaagcccgatgtgcagcacacccagcatccaatggtcgctaaagatcggcagctaccgacactcatggcacagccccctcagacagtggtccaagtgctggcggtgaaaacaactcagcagctgccaaagctgcaacaggctcccaatcagcctaaaatttatgtccagccgcagactccccagtcgcaaatgtctctgcccgcttcttctgagaagcagacagcttcacaagtggagcagccgatcatcacacaggggtcaagtgtcaccaaaattactttcgaggggagacaacctcccaccgtgaccaaaattaccggaggatctagcgtgcctaagctaaccagcccagttaccagtatttctcctattcaggcctccgagaagacggccgttagcgatattctcaaaatgtcacttatggaggctcaaatcgacacaaacgtcgaacacatgatcgtggatcctcctaaaaaagctttggctacctccatgctcactggtgaagccggtagcctcccaagcacccacatggttgttgctggcatggctaactctaccccgcaacagcagaaatgtcgggaatcatgttcttctccaagtacagttggcagctctctgaccacccgtaaaatagatcctcctgcggttcccgcaaccggccagttcatgcgaattcagaatgtgggccagaagaaggctgaggagagcccagcagagattataatccaggccatcccccagtacgccataccttgccactcttcctcaaatgtcgttgtagaaccttccggcctgctggaactgaataactttacttctcagcagttagacgatgaggaaaccgctatggagcaggatatagattcatctaccgaggatggcacagaaccttcccccagccagagctcggcagagcgatcttag

SEQ ID NO: 291991 - DNA, 4554 bp, Artificial Sequence
  derived and/or modified sequence
gtcgccatcttgccccttcagaggcaccgcaaacaaacccaattcctggtgtcccctagtcttggcggaggagccttttagatgagccccgaaaggccgggcagggaggacaagctctttggggctaccaaacagaagcagcaatgcctgttgtgtggccaacccttctggatctcagcagggatgaatgcaaaagaattcttcgaaaattggaattggaggcatatgctggagttatcagtgcacttcgggcacagggggatctcaccaaggaaaagaaagatcttcttggagaactatcaaaagttcttagcatctcaacagaacgccaccgtgctgaagttcggagagcagtaaacgatgaacggttaacaacaattgcacataatatgtctggacctaatagctcttcagaatggtccattgaaggtcgtcgattggtaccactgatgccccggctcgttccccaaaccgcctttactgtaacagctaatgctgttgctaatgcagctatccagcataatgcatctcttccagtgcctgcagaaacaggaagcaaggaaggtgtaagctgttcagatgaagatgaaaaacccagaaaacgaaggcgaacaaactcttccagctcctctcctgttgttctaaaggaagttccaaaggccgttgttccagtctcaaagacgatcactgtgcctgtgagtggtagtcccaagatgagcaacatcatgcagagcattgccaactccttaccaccccacatgtctcctgtaaaaataaccttcactaaaccatcaacacagacaacaaacacaacaacacagaaggttattatagtcaccacatcaccaagctcaaccttcgtgcccaacattctctccaaatcccataactatgcagcagtcactaagcttgtaccaacgtcagtcattgcttctacaacccagaagccaccagttgttataactgcttcacagtcctctctggtcagtaatagcagcagtggcagcagcagttctacaccatcacctattcctaatacagttgcagtaacagctgtggtgtcctctacaccatctgtggtcatgtcaacagtagcacaaggtgtatctacatcagcaatcaaaatggcatcaaccagacttccttcccccaaaagcttagtgagtgccccaactcagattcttgcacagttccctaaacaacatcaacagtctcctaagcagcagttatatcaagtgcaacagcagacacagcaacaagtggcccagccttctccagtatctcatcagcaacagcctcagcagtctcctttgccacctggtattaaacctaccatccaaatcaaacaggagtcaggtgttaaaatcatcacacaacaggttcaaccaagtaaaatcttacccaaaccagtgacagctatccttactgctacaagacccatcaccaaaatgattgtaacgcagccaaaaggaataggttctacagttcaaccagcagctaaaatcatcccaacaaaaattgtttatgggcagcaagggaaaacgcaggttcttattaaacccaaaccagtgacttttcaagcgacagttgttagtgaacaaacaagacagctagtaacagaaacattacagcaagcatccagggtagcagaggctggtaattcatctattcaggaaggaaaagaagaaccacagaattatacagatagtagttcctcttctacagagtcctcccagagttcccaagtcagccatcgctcccagccccaacagccttcccagccccagcggaccctgctccagcatgtggctcagtcacagaccgcaacacagacttcggtggtggtgaagtccatcccagcatcttcccctggagcaatcacccacattatgcagcaggcattaagcagtcacactgcttttaccaaacacagcgaggaacttggaactgaggagggcgaggttgaagagatggacactttagaccctcagacaggtctgttttaccgatctgccctgactcagtcacagtcagctaaacagcagaaacttagccagcccccgctggaacagactcagctgcaagtgaaaactctgcagtgcttccagactaaacagaagcagaccatccacctgcaggcagaccagctccagcacaaactcccgcaaatgccccagctttccatcaggcatcaaaaactcacccctctccagcaagaacaagcacagcccaagccagatgtacagcacacacagcatcccatggtggccaaagacaggcagcttcctaccttaatggcacagcccccgcaaactgtagtacaggtgcttgcagtgaaaaccacgcagcagctccctaaactgcagcaggctccgaaccaaccaaaaatctacgtgcaaccccaaaccccccagagccaaatgtcgctcccagcttcttcagagaaacagacggcaagccaggtggagcagccaattataacccaaggatcctctgttacaaagataacttttgaggggcgccagcctcccacagttacaaagataactggtggcagttctgtgcctaagctgacatcaccagttacaagcatatctcccattcaggcctctgagaagacagcagtgtctgacattttgaaaatgtctttgatggaagctcagattgatacaaatgtagaacatatgatagtggatcccccaaagaaggctcttgccactagcatgctcactggtgaagcaggatcattaccctccacccacatggtggtggcagggatggcgaattccactccccagcaacagaaatgtagagagtcctgttcgagtccatccactgttggctcttccctaacgacaaggaaaattgatccaccagcagtgcctgcgacaggccagttcatgcgtattcagaatgtaggccaaaagaaagctgaagagagtccagcagaaattatcatccaggctattcctcagtatgctattccttgtcactccagctccaatgtggtggtggagcccagtgggcttcttgagctaaacaacttcactagtcaacagctggatgatgaggagacagcaatggagcaggacatagacagtagcacggaggatggaactgaacccagcccttctcagagctctgctgaacggtcctagtgtttggacacaatagtgcactttaaaacctgcttggttaccaagtgtccagggaaacccttgtattttgatgactaaaaagagcactttgcccgtacttaggctgtggaccctaaaacagcagtgtttcaacaagatgttgctgcaggagcagctttttaaaacaagataaaactcacaggggaatgtacttttttaaaaaaaaatgaaaaagaaaaaaaaagctgcacatttacagtgacttaagacctggtcttctttctctgttggatcatggccggtgaaacagttttgtcttgcagtggaaagagacttcctgtgaatgtttctcaactggtttctactgagcaaaataccatctaaaaggagaatgtgaatagttgtattttgaaatgatgtgtcaggaaaagttttttaaaaacttgtatgtttttgcaaatccctggaagtgttgaattggttaaaattttacattttctcagttcataattagtttataaacacctagaataatactggcattaaagaatccttgttggatggtagaaatcagatccctaaccagtgggaggtactttttgggtggcttgtgcattcttatcagttgtgtgctaatttattgtattgttcctttgtgctctaagcagcacacttgccttctatttatttaagtgtaaacatttcaaagcaggccgtactccttctgacaaatttcttgtaaaccaggattgcctacgctttccactgtcgtcgtctccccactttccctcttcctttaagaaaacttactaaaaaatgtttcattgcgaagcagaggaaaagaaacgttttcagacctaaaggaaatgtttggtcatgttaagaaaacaaattattcattcatatgatgctttcttaacgttgaaattgcacattcacattggactgagactttgaaaataacttttacatacttttgtttaagcccctttgaaatgtataaaaagttcatttacagttctaaatgtaatgtttttaagccttctatctttttaggacacagtttgtttaagcaatatgttttggtcttgtgatcactgtctgtcacaagtagagtgaaaggggtaagggggtgggagggtaagagttttgacaagttgtggcaaaggaaactatacttttcatttttaaaaatgtaaatagaaaagtttttaacggttttatatagatttcactataaataagcattttaagactgacaaatgttgaactgtacatacatttatcagcataactgcccagtttttttggtgctgaagtactgtaagtagaattcatcaacggtctcctaatttttgcatctacatctggggggaaaaagctgtgatactatagttaataaattcccactagagtg

SEQ ID NO: 291992 - DNA, 3015 bp, Artificial Sequence
  derived and/or modified sequence
atgcccgtggtgtggcccaccctgctggacctgagcagagacgagtgcaagagaatcctgagaaagctggagctggaggcctacgccggcgtgatcagcgccctgagagcccagggcgacctgaccaaggagaagaaggacctgctgggcgagctgagcaaggtgctgagcatcagcaccgagagacacagagccgaggtgagaagagccgtgaacgacgagagactgaccaccatcgcccacaacatgagcggccccaacagcagcagcgagtggagcatcgagggcagaagactggtgcccctgatgcccagactggtgccccagaccgccttcaccgtgaccgccaacgccgtggccaacgccgccatccagcacaacgccagcctgcccgtgcccgccgagaccggcagcaaggagggcgtgagctgcagcgacgaggacgagaagcccagaaagagaagaagaaccaacagcagcagcagcagccccgtggtgctgaaggaggtgcccaaggccgtggtgcccgtgagcaagaccatcaccgtgcccgtgagcggcagccccaagatgagcaacatcatgcagagcatcgccaacagcctgcccccccacatgagccccgtgaagatcaccttcaccaagcccagcacccagaccaccaacaccaccacccagaaggtgatcatcgtgaccaccagccccagcagcaccttcgtgcccaacatcctgagcaagagccacaactacgccgccgtgaccaagctggtgcccaccagcgtgatcgccagcaccacccagaagccccccgtggtgatcaccgccagccagagcagcctggtgagcaacagcagcagcggcagcagcagcagcacccccagccccatccccaacaccgtggccgtgaccgccgtggtgagcagcacccccagcgtggtgatgagcaccgtggcccagggcgtgagcaccagcgccatcaagatggccagcaccagactgcccagccccaagagcctggtgagcgcccccacccagatcctggcccagttccccaagcagcaccagcagagccccaagcagcagctgtaccaggtgcagcagcagacccagcagcaggtggcccagcccagccccgtgagccaccagcagcagccccagcagagccccctgccccccggcatcaagcccaccatccagatcaagcaggagagcggcgtgaagatcatcacccagcaggtgcagcccagcaagatcctgcccaagcccgtgaccgccatcctgaccgccaccagacccatcaccaagatgatcgtgacccagcccaagggcatcggcagcaccgtgcagcccgccgccaagatcatccccaccaagatcgtgtacggccagcagggcaagacccaggtgctgatcaagcccaagcccgtgaccttccaggccaccgtggtgagcgagcagaccagacagctggtgaccgagaccctgcagcaggccagcagagtggccgaggccggcaacagcagcatccaggagggcaaggaggagccccagaactacaccgacagcagcagcagcagcaccgagagcagccagagcagccaggtgagccacagaagccagccccagcagcccagccagccccagagaaccctgctgcagcacgtggcccagagccagaccgccacccagaccagcgtggtggtgaagagcatccccgccagcagccccggcgccatcacccacatcatgcagcaggccctgagcagccacaccgccttcaccaagcacagcgaggagctgggcaccgaggagggcgaggtggaggagatggacaccctggacccccagaccggcctgttctacagaagcgccctgacccagagccagagcgccaagcagcagaagctgagccagccccccctggagcagacccagctgcaggtgaagaccctgcagtgcttccagaccaagcagaagcagaccatccacctgcaggccgaccagctgcagcacaagctgccccagatgccccagctgagcatcagacaccagaagctgacccccctgcagcaggagcaggcccagcccaagcccgacgtgcagcacacccagcaccccatggtggccaaggacagacagctgcccaccctgatggcccagcccccccagaccgtggtgcaggtgctggccgtgaagaccacccagcagctgcccaagctgcagcaggcccccaaccagcccaagatctacgtgcagccccagaccccccagagccagatgagcctgcccgccagcagcgagaagcagaccgccagccaggtggagcagcccatcatcacccagggcagcagcgtgaccaagatcaccttcgagggcagacagccccccaccgtgaccaagatcaccggcggcagcagcgtgcccaagctgaccagccccgtgaccagcatcagccccatccaggccagcgagaagaccgccgtgagcgacatcctgaagatgagcctgatggaggcccagatcgacaccaacgtggagcacatgatcgtggacccccccaagaaggccctggccaccagcatgctgaccggcgaggccggcagcctgcccagcacccacatggtggtggccggcatggccaacagcaccccccagcagcagaagtgcagagagagctgcagcagccccagcaccgtgggcagcagcctgaccaccagaaagatcgacccccccgccgtgcccgccaccggccagttcatgagaatccagaacgtgggccagaagaaggccgaggagagccccgccgagatcatcatccaggccatcccccagtacgccatcccctgccacagcagcagcaacgtggtggtggagcccagcggcctgctggagctgaacaacttcaccagccagcagctggacgacgaggagaccgccatggagcaggacatcgacagcagcaccgaggacggcaccgagcccagccccagccagagcagcgccgagagaagctag

SEQ ID NO: 291993 - protein, 161 aa, Artificial Sequence
  derived and/or modified sequence
MEHQLLCCEVETIRRAYPDANLLNDRVLRAMLKAEETCAPSVSYFKCVQTFVALCATDVKFISNPPSMVAAGSVVAAVQGLNLRSPNNFLSYYRLTRFLSRVIKCDPDCLRACQEQIEALLESSLRQAQQNMDPKAAEEEEEEEEEVDLACTPTDVRDVDI

SEQ ID NO: 291994 - protein, 23 aa, Artificial Sequence
  derived and/or modified sequence
MTSQPVPNETIIVLPSNVINFSQ

SEQ ID NO: 291995 - protein, 180 aa, Artificial Sequence
  derived and/or modified sequence
MTSQPVPNETIIVLPSNVINFSQAEKPEPTNQGQDSLKKHLHAEIKVIGFIISGSLSIATEKRLTKLLVHSSLVGSILSALSALVGFIILSVKQATLNPASLQCELDKNNIPTRSYVSYFYHDSLYTTDCYTAKASLAGTLSLMLICTLLEFCLAVLTAVLRWKQAYSDFPGVSVLAGFT

SEQ ID NO: 291996 - DNA, 1536 bp, Artificial Sequence
  derived and/or modified sequence
aaaacctctttggagcttctgaggactcagctggaaccaacgggcacagttggcaacaccatcatgacatcacaacctgttcccaatgagaccatcatagtgctcccatcaaatgtcatcaacttctcccaagcagagaaacccgaacccaccaaccaggggcaggatagcctgaagaaacatctacacgcagaaatcaaagttattgggtttatcatctctggctctctatcaatcgccacagagaaaaggttaaccaagcttttggtgcatagcagcctggttggaagcattctgagtgctctgtctgccctggtgggtttcattatcctgtctgtcaaacaggccaccttaaatcctgcctcactgcagtgtgagttggacaaaaataatataccaacaagaagttatgtttcttacttttatcatgattcactttataccacggactgctatacagccaaagccagtctggctggaactctctctctgatgctgatttgcactctgctggaattctgcctagctgtgctcactgctgtgctgcggtggaaacaggcttactctgacttccctggggtgagtgtgctggccggcttcacttaaccttgcctagtgtatcttatccctgcactgtgttgagtatgtcaccaagagtggtagaaggaacaatcagtcagtcatgagatacacatgggagggcatttgcattgtgatggaagacagagaagaaaagcagatggcaattgagtagctgataagctgaaaattcactggatatgaaaatagttaatcatgagaaatcaactgattcaatcttcctattttgtcagcgaagggaatgagactctgggaagttaaatgactggcctggcattatgctatgagtttgtgcctttgctgaggacactagaacctggcttgcctcccttataagcagaaacaatttctgccacaaccactagtctctttaatagtattgacttggtaaagggcatttacacacgtaactggatccagtgaatgtcttatgctctgcatttgcccctggtgatcttaaaattcgtttgcctttttaaagctatattaaaaatgtattgttgaatcaaacccctatggacttatggctttatttaactgaattaaaaagccttgatttatccaaaattgtattatagagtgtagaatgaatactagggtgataaattgcaattatttgaagaacctggtgatatgctctacttatcttggattagctaagaattctatgtatacagttggaaaaatggcatatatacatctatcttgaacctgattgaagtctgaagacctaacatattttgtttcttctagagtgtacttttcctgcctcacagttacattggtaattctggcatgtcctcaaaaatgactcatgactgtggatatgaagaactattgacttcttaagaaaaaagggagaaatattaatcagaaagttgattcttatgataatatggaaaagttaaccattatagaaaagcaaagcttgagttt

SEQ ID NO: 291997 - DNA, 543 bp, Artificial Sequence
  derived and/or modified sequence
atgacttcccagccagttcccaatgagactattatagtcttgccgtctaatgtgattaatttttcacaggcggagaagccggagccgaccaatcaggggcaggatagtttgaagaagcacttacacgcagaaataaaggttatcggcttcattatttccgggagtctttctattgccaccgagaagagactgacaaaacttctagtccactcctctctcgtaggaagcatcctgtccgccttgtccgctttagtaggatttatcatcctgtcagtgaaacaggctacactgaatccagcatccctgcaatgcgaactggacaagaacaacattccaacccgctcttatgtgagctacttctaccacgactctctgtataccaccgactgttacacagccaaagcaagccttgctggaacactgtctctgatgctgatctgcaccctgctggagttctgcctagccgtcctgacggccgttttaaggtggaaacaggcctactccgactttcccggtgtgtccgtattagccgggttcacctag

SEQ ID NO: 291998 - DNA, 543 bp, Artificial Sequence
  derived and/or modified sequence
atgaccagccagcctgtgcccaatgagaccatcatcgtgctgcccagcaatgtcatcaacttcagccaggccgagaagccagagcccaccaaccagggccaggacagcctgaagaagcacctgcatgctgagatcaaggtgattggcttcatcatcagcggcagcctgagcatcgccacagagaagaggctgaccaagctgctggtgcacagcagcctggtgggcagcatcctgagcgccctgagcgccctggtgggcttcatcatcctgtctgtgaagcaggccaccctgaacccagccagcctgcagtgtgagctggacaagaacaacatccccaccaggagctatgtgtcctacttctaccatgacagcctgtacaccacagactgctacacagccaaggccagcctggccggcaccctgagcctgatgctgatctgcaccctgctggagttctgcctggccgtgctgacagctgtgctgcgctggaagcaggcctacagcgacttccctggggtgtctgtgctggccggcttcacctag

SEQ ID NO: 291999 - DNA, 543 bp, Artificial Sequence
  derived and/or modified sequence
atgaccagccagcccgtgcccaacgagaccatcatcgtgctgccctccaatgttattaatttcagccaggcggaaaaacctgagcccaccaaccagggacaggacagcctaaagaagcatcttcacgctgagataaaagtcatcgggttcataatttccggaagccttagcatcgccacggagaagagacttaccaaattacttgtgcacagcagcctggtgggttccattctatcagcgttgagtgctctcgtgggatttataatcctcagtgtcaagcaggcaacgctcaatcctgcttccctgcagtgcgagctcgataagaataacatacctacaaggagctacgtttcatatttctatcacgacagcctgtatacaacagactgttataccgctaaggcatctctagcaggtaccctctctttaatgcttatctgtacccttctcgagttttgtctggcagttctgacagccgttctgcgttggaagcaagcttactccgactttcccggcgtgagtgtcctggccggattcacttag

SEQ ID NO: 292000 - DNA, 543 bp, Artificial Sequence
  derived and/or modified sequence
atgacatcccagcctgtccccaacgagacaatcatcgtccttccttcaaacgttatcaacttctcccaggctgagaaacctgaaccgaccaatcaggggcaagattcactgaaaaagcatctacacgctgagattaaggtgatcgggtttataatctcgggctccttatccatagcaaccgagaaaagactgactaagctactagtacactcgagcctcgttgggtcaatattatccgccctttccgcactggtgggcttcatcatcctttccgtgaagcaggccaccctgaatccagccagcctccagtgtgagctggataagaacaacattcctacaaggagctatgtttcctacttttaccacgattctttatacacaactgactgctataccgccaaggcaagcttagccggaactctaagcttgatgctgatatgcacccttcttgaattctgcctggctgtgctgaccgccgtcctacgctggaaacaggcttattccgactttcccggtgtttcagtgctggcgggtttcacctag

SEQ ID NO: 292001 - DNA, 543 bp, Artificial Sequence
  derived and/or modified sequence
atgaccagccagcccgtgcccaacgagaccatcatcgtgctgcccagcaacgtgatcaacttcagccaggccgagaagcccgagcccaccaaccagggccaggacagcctgaagaagcacctgcacgccgagatcaaggtgatcggcttcatcatcagcggcagcctgagcatcgccaccgagaagagactgaccaagctgctggtgcacagcagcctggtgggcagcatcctgagcgccctgagcgccctggtgggcttcatcatcctgagcgtgaagcaggccaccctgaaccccgccagcctgcagtgcgagctggacaagaacaacatccccaccagaagctacgtgagctacttctaccacgacagcctgtacaccaccgactgctacaccgccaaggccagcctggccggcaccctgagcctgatgctgatctgcaccctgctggagttctgcctggccgtgctgaccgccgtgctgagatggaagcaggcctacagcgacttccccggcgtgagcgtgctggccggcttcacctag

SEQ ID NO: 292002 - DNA, 1678 bp, Artificial Sequence
  derived and/or modified sequence
atgtaaaaaatggagtcaccacgaccagattaggccacggtgaggactgagatgatgttgtaaggcaccagcacagagctgacctacagctcaatcgtggtgggagggagtaattatccattcagaaaaggggaaactttccgctgcgcctcctgtcgctgttttccttggctcccggaggtgcgcagtatcgggtccgtttttaagtcacagtcactgcagcagacatcatggctgtggatgtggcagaataccatctgagcgtcatcaagagcccccctggctgggaggtgggtgtctatgctgcaggggccctggccctgctgggaatcgcagctgtgagcctgtggaagctctggacgtcggggagcttccccagcccctctccgttccccaattacgactacaggtaccttcagcagaagtacggcgagagctgcgcagaggccagggagaagagagtgcctgcctggaatgcccagcgggccagcacgcggggaccacccagccgcaaaggcagtctcagcattgaggacacctttgagagcatcagtgaactggggcctctggagctgatgggccgggagttggacctggccccctatgggaccctccggaagtcccagtcggccgactccctgaactccatctcctccgtgagcaacacctttgggcaggacttcacactgggccaggtggaggtgagcatggagtacgacactgcctcccacacgctgaacgtggcggtgatgcagggcaaggacctcctggagcgggaggaggccagcttcgagtcctgcttcatgcgcgtcagcctgctgccggacgagcagatcgtgggcatttctcggatccagagaaatgcctactccatcttctttgatgagaagttctccatccccctggatcccacagccctggaggagaagagcctgcggttttctgtatttggcatcgatgaggatgagcgcaacgtcagcacgggggtggtggagctgaagctttctgtgcttgacctcccgctgcagcccttcagtggctggctctatttacaggaccagaacaaggccgccgatgctgtgggggagatcctgctctccctcagctacctccccacagccgagcgcctcaccgtggtcgtggttaaggccaagaacctcatctggaccaacgacaagaccacagcggaccccttcgtcaaggtgtacctgctgcaggatgggaggaagatgagcaaaaagaagacagccgtgaagagggatgaccccaacccggtgttcaacgaagccatgatcttctcggtgccagccattgtgctccaggacctgtctctccgcgtgacggtggctgagagcagcagcgacggccgtggggacaacgtgggccatgtcatcattgggccgtcagccagtggcatgggaaccacacattggaaccagatgttggccacgctgcgcaggcccgtgtccatgtggcacgctgtccggcgaaactagcaaccagggcgggccagttgggcaatggagctgctggagcccggtacccactcagctctgtctgatgccctctccatagcccagctggagccgtgaacactggggtcccctggcagagtcctcatgacccatcctggtctctctgtccagattgcagcagaggagtgggcgtggctctgtgt

SEQ ID NO: 292003 - DNA, 1661 bp, Artificial Sequence
  derived and/or modified sequence
actgcaggggtggcgttgccgccggcggccgggctaggcgcaggtgcgtgcgcgctgcgggaggcgggccggcagctggagcccagccggagcggcggcccctccgcggagcccggtcacagtcactgcagcagacatcatggctgtggatgtggcagaataccatctgagcgtcatcaagagcccccctggctgggaggtgggtgtctatgctgcaggggccctggccctgctgggaatcgcagctgtgagcctgtggaagctctggacgtcggggagcttccccagcccctctccgttccccaattacgactacaggtaccttcagcagaagtacggcgagagctgcgcagaggccagggagaagagagtgcctgcctggaatgcccagcgggccagcacgcggggaccacccagccgcaaaggcagtctcagcattgaggacacctttgagagcatcagtgaactggggcctctggagctgatgggccgggagttggacctggccccctatgggaccctccggaagtcccagtcggccgactccctgaactccatctcctccgtgagcaacacctttgggcaggacttcacactgggccaggtggaggtgagcatggagtacgacactgcctcccacacgctgaacgtggcggtgatgcagggcaaggacctcctggagcgggaggaggccagcttcgagtcctgcttcatgcgcgtcagcctgctgccggacgagcagatcgtgggcatttctcggatccagagaaatgcctactccatcttctttgatgagaagttctccatccccctggatcccacagccctggaggagaagagcctgcggttttctgtatttggcatcgatgaggatgagcgcaacgtcagcacgggggtggtggagctgaagctttctgtgcttgacctcccgctgcagcccttcagtggctggctctatttacaggaccagaacaaggccgccgatgctgtgggggagatcctgctctccctcagctacctccccacagccgagcgcctcaccgtggtcgtggttaaggccaagaacctcatctggaccaacgacaagaccacagcggaccccttcgtcaaggtgtacctgctgcaggatgggaggaagatgagcaaaaagaagacagccgtgaagagggatgaccccaacccggtgttcaacgaagccatgatcttctcggtgccagccattgtgctccaggacctgtctctccgcgtgacggtggctgagagcagcagcgacggccgtggggacaacgtgggccatgtcatcattgggccgtcagccagtggcatgggaaccacacattggaaccagatgttggccacgctgcgcaggcccgtgtccatgtggcacgctgtccggcgaaactagcaaccagggcgggccagttgggcaatggagctgctggagcccggtacccactcagctctgtctgatgccctctccatagcccagctggagccgtgaacactggggtcccctggcagagtcctcatgacccatcctggtctctctgtccagattgcagcagaggagtgggcgtggctctgtgtccagggccccagggtctgctcctgctgaggaccagctgtggctgggccaggacagaggactcaaccctgctcct

SEQ ID NO: 292004 - protein, 636 aa, Artificial Sequence
  derived and/or modified sequence
MWLFFGITGLLTAALSGHPSPAPPDQLNTSSAESELWEPGERLPVRLTNGSSSCSGTVEVRLEASWEPACGALWDSRAAEAVCRALGCGGAEAASQLAPPTPELPPPPAAGNTSVAANATLAGAPALLCSGAEWRLCEVVEHACRSDGRRARVTCAENRALRLVDGGGACAGRVEMLEHGEWGSVCDDTWDLEDAHVVCRQLGCGWAVQALPGLHFTPGRGPIHRDQVNCSGAEAYLWDCPGLPGQHYCGHKEDAGAVCSEHQSWRLTGGADRCEGQVEVHFRGVWNTVCDSEWYPSEAKVLCQSLGCGTAVERPKGLPHSLSGRMYYSCNGEELTLSNCSWRFNNSNLCSQSLAARVLCSASRSLHNLSTPEVPASVQTVTIESSVTVKIENKESRELMLLIPSIVLGILLLGSLIFIAFILLRIKGKYVFMLPIQVQAPPPEDSDSGSDSDYEHYDFSAQPPVALTTFYNSQRHRVTDEEVQQSRFQMPPLEEGLEELHASHIPTANPGHCITDPPSLGPQYHPRSNSESSTSSGEDYCNSPKSKLPPWNPQVFSSERSSFLEQPPNLELAGTQPAFSAGPPADDSSSTSSGEWYQNFQPPPQPPSEEQFGCPGSPSPQPDSTDNDDYDDISAA

SEQ ID NO: 292005 - DNA, 1911 bp, Artificial Sequence
  derived and/or modified sequence
atgtggctcttctttggtatcacgggcttgcttacggccgctctctctggtcatccttccccagcaccacctgaccagcttaatacatcctctgccgagtctgagctgtgggaaccaggagagcgcttaccagttaggctgacaaatggcagtagttcttgcagcggtacggttgaagtgagactagaagcctcttgggaaccagcttgtggagccctgtgggactcccgggccgccgaagcagtctgccgcgccctggggtgtggcggcgccgaggccgcttcgcaactcgcgcccccgaccccagaactcccgcctccccccgccgcagggaatacttcagtcgctgctaatgcaacgctggccggcgctcccgccttgttatgtagcggggctgaatggcgactgtgtgaggtggtcgaacacgcttgcagatctgacgggcggagggcacgtgtgacgtgtgcagaaaatcgcgccttgcgcctggtagacgggggaggcgcatgtgctggtagggtcgaaatgctcgagcatggcgagtggggctctgtctgtgatgatacttgggacctcgaagatgcccatgtggtgtgcagacaactcggctgtggctgggccgtccaggccctgccgggactgcacttcaccccaggcagaggacccatccacagagatcaggtcaactgcagcggggccgaagcttacctctgggactgccctgggctaccgggccaacactactgtggccacaaggaagacgcaggggctgtctgtagcgaacaccagtcttggcgacttactgggggcgctgacagatgcgagggccaggtggaggtgcactttagaggtgtgtggaatacagtctgtgattcagaatggtatccctcagaggcgaaggtgttgtgccagagcctcgggtgcggcaccgcggtggagcgcccaaagggccttccccactctctgtccggccggatgtattatagctgtaacggcgaggaactgactctgtcgaactgcagctggaggtttaacaacagcaacttgtgctctcagtcattggcagcaagggtgctgtgttcagcctctcggtcgctgcacaatctgtctaccccagaggtgccggcaagcgtgcagacggtgacgattgagagcagcgtgactgtgaagatcgagaacaaagagtctcgagagttgatgctgcttatacccagcatagtcctaggtattctcctgcttggttctcttatcttcattgcattcatcctcctgagaatcaagggcaaatacgtgtttatgctgccaattcaggtccaggccccacctcccgaggactccgatagcggctccgacagcgactacgagcattacgattttagcgcacagccccctgtcgctctgaccaccttctacaattcccagcgacaccgggttaccgatgaggaggtacagcagagcaggttccaaatgcctcccttggaagagggtctggaagagctgcatgcttcccacatcccaactgcgaaccccggacactgcataactgatccaccttcactgggacctcagtatcaccctaggagcaatagtgagtcttcaaccagctcgggtgaggactattgcaactctccgaaatcaaagcttcccccttggaatccccaggtgttttcctctgagagatcgagctttcttgaacagccccccaacctggagctggccggcacccagcccgctttctcggcaggcccaccggctgacgattcatcgtcgacgtcaagtggcgagtggtatcaaaatttccaacctcccccccagcctccatcggaggagcaatttggctgccctggcagcccttccccccaaccagactctacagataatgatgactacgacgacatttcagccgcgtag

SEQ ID NO: 292006 - DNA, 1911 bp, Artificial Sequence
  derived and/or modified sequence
atgtggctgttcttcggcatcaccggcctgctgacagctgccctgagcggccaccccagccctgcccccccagaccagctgaacaccagcagcgctgagagcgagctgtgggagcctggagagcggctgcctgtgcggctgaccaacggcagcagcagctgcagcggcaccgtggaggtgcggctggaggcctcctgggagcccgcctgtggggccctgtgggacagcagagctgctgaggccgtgtgccgggccctgggctgcggcggcgctgaggccgccagccagctggccccacccaccccagagctgcccccacctcctgctgctggcaacacctctgtggccgccaatgccaccctggccggggccccagccctgctgtgcagcggggctgagtggaggctgtgtgaggtggtggagcacgcctgccgcagtgatggaagaagagcccgggtgacctgtgctgaaaatagagccctgcggctggtggatggcggcggggcctgtgccggccgggtggagatgctggagcacggggagtggggctctgtgtgtgatgacacctgggacctggaggatgcccacgtggtgtgccggcagctgggctgcggctgggccgtgcaggccctgcccggcctgcacttcaccccaggccggggccccatccaccgggaccaggtgaactgcagcggggctgaggcctacctgtgggactgccccggcctgcccggccagcactactgcggccacaaggaggatgctggagctgtgtgcagcgagcaccagagctggaggctgaccggcggcgctgacagatgtgagggccaggtggaggtgcacttccggggcgtgtggaacacagtgtgtgacagcgagtggtaccccagcgaggccaaggtgctgtgccagagcctgggctgcggcacagctgtggagcggcccaagggcctgccccacagcctgagcggccgcatgtactacagctgcaatggagaggagctgaccctgagcaactgctcctggaggttcaacaacagcaacctgtgcagccagagcctggccgcccgggtgctgtgcagcgccagccgcagcctgcacaacctgagcaccccagaggtgcctgcctctgtgcagacagtgaccatcgagagctctgtgacagtgaagattgagaacaaggagagccgggagctgatgctgctgatccccagcatcgtgctgggcatcctgctgctgggcagcctcatcttcatcgccttcatcctgctgcgcatcaagggcaagtatgtgttcatgctgcccatccaggtgcaggcccctcctcctgaggacagcgacagcggcagtgacagcgactatgagcactatgacttcagcgcccagccccctgtggccctgaccaccttctacaacagccagaggcaccgggtgacagatgaggaggtgcagcagagccgcttccagatgccacccctggaggagggcctggaggagctgcacgccagccacatccccacagccaaccctggccactgcatcacagatcctcccagcctgggcccccagtaccaccccaggagcaacagcgagagcagcaccagcagcggggaggactactgcaacagccccaagagcaagctgcccccctggaacccccaggtgttcagcagcgagaggagcagcttcctggagcagccccccaacctggagctggccggcacccagcctgccttctctgctggccccccagcagatgacagcagcagcaccagcagtggagagtggtaccagaacttccagcccccaccccagccccccagcgaggagcagtttggctgccccggcagccccagcccccagcctgacagcacagacaatgatgattatgatgacatctctgctgcctag

SEQ ID NO: 292007 - DNA, 1911 bp, Artificial Sequence
  derived and/or modified sequence
atgtggctgttcttcggcatcaccggcctgctgaccgccgccctgtccggtcacccaagccccgccccacctgaccaactcaatacttccagtgcagaaagcgaactgtgggagccaggagaaagactcccagtgagattgacaaatggtagctcttcctgtagtgggacagtggaagtgaggttagaggcaagctgggaacctgcttgtggagctttgtgggatagtcgcgccgcagaagccgtctgtagggccttggggtgcggaggggccgaggcggcttcccagcttgcccctccaactccagagcttcctccgccacctgcggctggaaacaccagcgttgctgctaatgctacactggctggtgcaccagccctgttgtgcagcggcgctgagtggcgcctttgcgaagtggtggagcacgcatgtaggagcgatggtagaagggcgagggttacctgcgcggagaaccgggctctgcgtctcgtcgacggaggaggagcctgtgctggacgcgtggaaatgctggagcatggggaatgggggtctgtctgcgatgatacctgggacctcgaggatgcccacgtggtgtgtcgccaactaggttgcggatgggccgttcaagctctgccaggtctgcatttcactcctggtcggggacctatacatcgcgatcaggtgaattgttcaggggccgaagcctatctgtgggattgtcccggcttacctggacaacactattgcgggcacaaagaagatgcaggcgcagtttgctccgaacaccagtcatggcggctgaccggaggagcggacagatgcgagggtcaagtcgaggtgcacttcagaggggtgtggaacaccgtttgtgatagcgaatggtatccatccgaagccaaggtattatgtcaatccctgggctgtggaaccgccgtagagcgcccaaagggtttgccccactctctttccgggcgaatgtattattcttgtaacggcgaggagctgactctatcgaattgctcttggcgtttcaacaattctaatctatgttcccagtccctggcagctcgcgtgctgtgttccgcatcccgatcactgcacaatctgtcgaccccagaggtgcctgccagtgtccaaaccgtgaccatcgagagcagcgtgaccgtgaaaatcgaaaataaggagtccagggagctgatgttactcataccctccattgtgctgggaatcctactattgggttccctcatctttatcgctttcattctcctgcggataaagggcaagtacgtctttatgctgccaattcaggttcaggcccctcccccagaagactcagactctgggagcgactctgactacgagcattacgacttctccgcccaacccccagttgccctaactacattctacaattcccagcggcatcgtgtgacagacgaggaagttcaacagagccggttccaaatgccacccctcgaggaaggtctggaggaactgcatgcgagccacattccaacagccaatcctggacactgcattaccgaccccccgtcacttgggccgcaatatcacccacggagcaatagcgagagctccacctcatctggcgaggactattgtaatagcccaaaaagcaagttacccccttggaaccctcaggtttttagtagcgagaggagctccttcctcgaacagcctcccaacttagaactggctggcacccagcctgcattctccgcaggaccacccgccgatgactcctcctctacgtccagcggcgagtggtatcagaactttcagccccctccccaacctccaagcgaggagcagttcggatgcccagggtctccgtcaccgcagccggattccactgacaatgatgactacgacgatatctccgctgcttag

SEQ ID NO: 292008 - DNA, 1911 bp, Artificial Sequence
  derived and/or modified sequence
atgtggctgtttttcggtataacgggactcttaactgccgcactgtccgggcatccctcccctgcccctcccgatcagctaaacacttcgtctgccgaatcggaactgtgggaaccgggagagaggctgcctgtcaggttaaccaatgggtcttcctcctgttccgggacagtggaagtgcgcctagaagcctcatgggaacctgcatgcggagccttgtgggatagtcgcgcagccgaggccgtatgccgcgctttggggtgcggcggagcagaagccgcttcacagttggcgcctccgactccggaactgccgccaccccctgccgcaggcaatacatcagtggctgctaatgcaaccttagcgggtgcacccgcactgttgtgttctggagccgaatggcgcctctgcgaagttgtcgagcacgcttgtcgctcagacggaagaagggcaagagttacatgcgcagaaaacagggctctgcggcttgtagatggtgggggagcctgtgccggacgggttgaaatgctggagcacggagagtggggcagcgtgtgtgacgatacatgggatctggaggacgcccacgtggtatgccgccagcttggctgcggctgggctgtgcaagccctccccggactccatttcactccaggcagaggcccaatccacagggatcaggtgaactgtagtggtgcagaagcctatctgtgggactgtcccggtctcccgggtcagcattattgcgggcacaaagaggacgccggagcagtgtgctccgagcaccagtcctggagactcaccggcggtgccgaccggtgcgagggccaggtggaagtacactttaggggcgtgtggaacaccgtgtgtgattccgagtggtaccccagtgaagctaaagtcctgtgtcaaagccttggctgcggaacagcggtggaaagaccaaagggtctgcctcattcattatccggtaggatgtactattcatgtaatggggaagaactgaccctgagtaactgctcatggaggttcaataactccaatctgtgctcccagagtttggcagcgagggtcctctgctccgcctctcggtccttacacaatctcagtactccagaagttccggcaagcgtccagacagtcactatcgaatcttcagtgacggtgaagatcgaaaataaagaaagccgggaactgatgctgttaataccgagtatagtcctggggatcctgctgcttgggtccctaatttttatagcgtttatactattgcggatcaagggtaagtatgtgtttatgttaccgattcaggtgcaggccccaccaccagaggatagtgacagcggtagcgactcagattatgaacattacgatttttccgctcaacccccagtagcgttgaccaccttttataactctcaacgccacagagtgacagacgaagaagtgcaacagtcgcgattccaaatgcccccactggaggagggcttagaggagctgcacgcctcccatatccctactgccaaccctgggcattgtataactgatcctccatccctcggaccgcaatatcatcctcggtccaatagcgaaagctcgactagctctggagaggattattgcaattcccccaagtccaagctcccaccttggaatccgcaggtgttcagtagtgagaggagtagcttcctggaacagcccccaaatctcgagctggccggaacacagcctgcattttccgctggcccacccgctgacgactcaagctctacatcgtccggcgaatggtaccagaatttccagccccctccacagcctccaagtgaggaacagtttgggtgcccaggaagcccctctccccagccagacagcactgataatgatgactacgacgatatatccgccgcatag

SEQ ID NO: 292009 - DNA, 3190 bp, Artificial Sequence
  derived and/or modified sequence
agaccaaaaccacaagcagaacaagcaggcgtgagacactcacaggttgggtttgatcgcatgcgtgtcggagaggagagagcagagagagacacaggaacaagaacagcaaagggtagagcagacctgcgccaggggcgcacaacggccgtgtccacctcccggccccaagatggtgcttcccacaggcagccacgcgtagcagccagagacagctccagacatgtggctcttcttcgggatcactggattgctgacggcagccctctcaggtcatccatctccagccccacctgaccagctcaacaccagcagtgcagagagtgagctctgggagccaggggagcggcttccggtccgtctgacaaacgggagcagcagctgcagcgggacggtggaggtgcggctcgaggcgtcctgggagcccgcgtgcggggcgctctgggacagccgcgccgccgaggccgtgtgccgagcactgggctgcggcggggcggaggccgcctctcagctcgccccgccgacccctgagctgccgcccccgcctgcagccgggaacaccagcgtagcagctaatgccactctggccggggcgcccgccctcctgtgcagcggcgccgagtggcggctctgcgaggtggtggagcacgcgtgccgcagcgacgggaggcgggcccgtgtcacctgtgcagagaaccgcgcgctgcgcctggtggacggtggcggcgcctgcgccggccgcgtggagatgctggagcatggcgagtggggatcagtgtgcgatgacacttgggacctggaggacgcccacgtggtgtgcaggcaactgggctgcggctgggcagtccaggccctgcccggcttgcacttcacgcccggccgcgggcctatccaccgggaccaggtgaactgctcgggggccgaagcttacctgtgggactgcccggggctgccaggacagcactactgcggccacaaagaggacgcgggcgcggtgtgctcagagcaccagtcctggcgcctgacagggggcgctgaccgctgcgaggggcaggtggaggtacacttccgaggggtctggaacacagtgtgtgacagtgagtggtacccatcggaggccaaggtgctctgccagtccttgggctgtggaactgcggttgagaggcccaaggggctgccccactccttgtccggcaggatgtactactcatgcaatggggaggagctcaccctctccaactgctcctggcggttcaacaactccaacctctgcagccagtcgctggcagccagggtcctctgctcagcttcccggagtttgcacaatctgtccactcccgaagtccctgcaagtgttcagacagtcactatagaatcttctgtgacagtgaaaatagagaacaaggaatctcgggagctaatgctcctcatcccctccatcgttctgggaattctcctccttggctccctcatcttcatagccttcatcctcttgagaattaaaggaaaatatgttttcatgctgcccatccaggtccaggccccgccccctgaggactcagactctggctcggactcagactatgagcactatgacttcagcgcccagcctcctgtggccctgaccaccttctacaattcccagcggcatcgggtcacagatgaggaggtccagcaaagcaggttccagatgccacccttggaggaaggacttgaagagttgcatgcctcccacatcccaactgccaaccctggacactgcattacagacccgccatccctgggccctcagtatcacccgaggagcaacagtgagtcgagcacctcttcaggggaggattactgcaatagtcccaaaagcaagctgcctccatggaacccccaggtgttttcttcagagaggagttccttcctggagcagcccccaaacttggagctggccggcacccagccagccttttcagcagggcccccggctgatgacagctccagcacctcatccggggagtggtaccagaacttccagccaccaccccagcccccttcggaggagcagtttggctgtccagggtcccccagccctcagcctgactccaccgacaacgatgactacgatgacatcagcgcagcctaggccggggccagccgaggctcctggggtggctctgaccctctggcctcctgctctacctactccctttcccctttcccaccctcccagctcacctccccatggagctgagaggcctcccttggagagatggaaggaaacgttataccttgtacccctcggtctccatccatcaagccaaacctgctgccacagccctcccccggccccagatagcagccccagggaggatgctgcctccaagaggtgtgagccctctgtctcggggatgaacaagcagagtctgggctacctcttgacagctggtggaggggagttggggagctggactggatgactctggaggccccttccaaacctcaagtgtccggcgctttgattgcctgagtttctgacacttcagggcccagaggtcctgcgaggggcagaactggacccccatgccagtgctgctgcaggagggcccatatactagggtctgctgagctgttgtcactgatcggtgggcgctgggggggtagggtagcacaccagctgtcccaggctttgctccgggcggtaactgcacttgggcagggaatatagccttcctgggcacaactagctgacaatgacaggttgactgtgtacccccaaccaaggagctggggcccaaggccagtcctgccccagagacactccaagtccgccaggggcacagaccagttctgcagtgactgtccctggacaatgggtctttattctgagtttcctatggtttacaaagagggccccagcccagccccaccacagatcccagagataggggcccagtctccatgggggcaaggagcatagagatgttttccaggaaggggctcagaagctgcactaggccccgagtccccatgtgtctccttgaattgatgaggatgctcctgggagggatgcgtgactatgtggtgttgcacccggggctgcaaacgtctccgtgcagcccccagagagaggcccatgggctcagaccaggctttgttgtcctgctctgagtatcctgagattaaactgaattgctgaatg

SEQ ID NO: 292010 - DNA, 1911 bp, Artificial Sequence
  derived and/or modified sequence
atgtggctgttcttcggcatcaccggcctgctgaccgccgccctgagcggccaccccagccccgccccccccgaccagctgaacaccagcagcgccgagagcgagctgtgggagcccggcgagagactgcccgtgagactgaccaacggcagcagcagctgcagcggcaccgtggaggtgagactggaggccagctgggagcccgcctgcggcgccctgtgggacagcagagccgccgaggccgtgtgcagagccctgggctgcggcggcgccgaggccgccagccagctggccccccccacccccgagctgccccccccccccgccgccggcaacaccagcgtggccgccaacgccaccctggccggcgcccccgccctgctgtgcagcggcgccgagtggagactgtgcgaggtggtggagcacgcctgcagaagcgacggcagaagagccagagtgacctgcgccgagaacagagccctgagactggtggacggcggcggcgcctgcgccggcagagtggagatgctggagcacggcgagtggggcagcgtgtgcgacgacacctgggacctggaggacgcccacgtggtgtgcagacagctgggctgcggctgggccgtgcaggccctgcccggcctgcacttcacccccggcagaggccccatccacagagaccaggtgaactgcagcggcgccgaggcctacctgtgggactgccccggcctgcccggccagcactactgcggccacaaggaggacgccggcgccgtgtgcagcgagcaccagagctggagactgaccggcggcgccgacagatgcgagggccaggtggaggtgcacttcagaggcgtgtggaacaccgtgtgcgacagcgagtggtaccccagcgaggccaaggtgctgtgccagagcctgggctgcggcaccgccgtggagagacccaagggcctgccccacagcctgagcggcagaatgtactacagctgcaacggcgaggagctgaccctgagcaactgcagctggagattcaacaacagcaacctgtgcagccagagcctggccgccagagtgctgtgcagcgccagcagaagcctgcacaacctgagcacccccgaggtgcccgccagcgtgcagaccgtgaccatcgagagcagcgtgaccgtgaagatcgagaacaaggagagcagagagctgatgctgctgatccccagcatcgtgctgggcatcctgctgctgggcagcctgatcttcatcgccttcatcctgctgagaatcaagggcaagtacgtgttcatgctgcccatccaggtgcaggcccccccccccgaggacagcgacagcggcagcgacagcgactacgagcactacgacttcagcgcccagccccccgtggccctgaccaccttctacaacagccagagacacagagtgaccgacgaggaggtgcagcagagcagattccagatgccccccctggaggagggcctggaggagctgcacgccagccacatccccaccgccaaccccggccactgcatcaccgacccccccagcctgggcccccagtaccaccccagaagcaacagcgagagcagcaccagcagcggcgaggactactgcaacagccccaagagcaagctgcccccctggaacccccaggtgttcagcagcgagagaagcagcttcctggagcagccccccaacctggagctggccggcacccagcccgccttcagcgccggcccccccgccgacgacagcagcagcaccagcagcggcgagtggtaccagaacttccagccccccccccagccccccagcgaggagcagttcggctgccccggcagccccagcccccagcccgacagcaccgacaacgacgactacgacgacatcagcgccgcctag

SEQ ID NO: 292011 - protein, 595 aa, Artificial Sequence
  derived and/or modified sequence
MWLFFGITGLLTAALSGHPSPAPPDQLNTSSAESELWEPGERLPVRLTNGSSSCSGTVEVRLEASWEPACGALWDSRAAEAVCRALGCGGAEAASQLAPPTPELPPPPAAGNTSVAANATLAGAPALLCSGAEWRLCEVVEHACRSDGRRARVTCAENRALRLVDGGGACAGRVEMLEHGEWGSVCDDTWDLEDAHVVCRQLGCGWAVQALPGLHFTPGRGPIHRDQVNCSGAEAYLWDCPGLPGQHYCGHKEDAGAVCSEHQSWRLTGGADRCEGQVEVHFRGVWNTVCDSEWYPSEAKVLCQSLGCGTAVERPKGLPHSLSGRMYYSCNGEELTLSNCSWRFNNSNLCSQSLAARVLCSASRSLHNLSTPEVPASVQTVTIESSVTVKIENKESRELMLLIPSIVLGILLLGSLIFIAFILLRIKGKYDSQRHRVTDEEVQQSRFQMPPLEEGLEELHASHIPTANPGHCITDPPSLGPQYHPRSNSESSTSSGEDYCNSPKSKLPPWNPQVFSSERSSFLEQPPNLELAGTQPAFSAGPPADDSSSTSSGEWYQNFQPPPQPPSEEQFGCPGSPSPQPDSTDNDDYDDISAA

SEQ ID NO: 292012 - DNA, 1788 bp, Artificial Sequence
  derived and/or modified sequence
atgtggctatttttcggcattactggattgttgactgcagctctgagcggccatccaagcccagcaccgcccgaccagttgaatacctcatccgcagagagcgaactctgggaacctggtgagagactccccgttaggctgacaaacggcagctcgtcctgctctggaaccgtggaggtgcgcctcgaagcgtcttgggagcctgcttgcggcgctctgtgggattctcgggcagctgaagcagtgtgtcgagccctaggctgtggcggtgcagaggccgccagtcagctggctccacccacccctgagctgccacctcctcccgctgcaggcaacaccagtgtggctgcaaacgccacacttgcaggcgcacctgccttgctgtgcagtggggccgagtggcggctgtgcgaggtagtggaacacgcgtgtagatccgatgggcgtagggcccgcgttacctgtgctgaaaatcgagcccttcgcctggtcgacggtggaggtgcctgtgccgggcgggtggagatgttagagcatggagaatggggttctgtctgtgatgatacttgggatcttgaggacgcacacgtagtctgtaggcaactagggtgcggctgggcggtgcaggccttgcccggactgcacttcaccccaggccgcgggccaattcatagggatcaggttaactgttccggggctgaggcttatctatgggattgcccgggcctgcctggacagcactattgtggacataaggaagacgctggggccgtttgttcagaacaccagagttggcgcctcaccggaggcgccgaccggtgtgagggtcaggtggaggtccatttccggggcgtctggaataccgtctgtgattctgagtggtaccctagcgaggccaaagttctctgtcagtcacttggctgtggaacagccgttgaaaggccaaaaggattgcctcattccctgagcgggcggatgtattactcgtgcaatggcgaagagcttacgctgtctaattgcagttggaggttcaacaactccaatctctgctcacaatctcttgccgcaagggtcctgtgcagcgcctcccgtagcctgcacaacctctctactccagaagtgcctgcaagcgtccaaactgtcacgattgagtcctccgtgacggtgaagatcgaaaacaaggagtctcgtgaactcatgctcctgatccctagcattgttctcggcattctcttattagggagcttgatttttatcgcctttatcctgttgagaatcaagggtaagtacgattcccaacgccaccgcgtgacagatgaggaggtacagcagtccaggtttcagatgcctccacttgaggaagggcttgaggagctgcatgccagccatatccctactgccaatcccggacattgcattacagaccctccgtctctcggaccccaatatcacccacgctccaatagcgaaagttctacgtcgagcggcgaggattattgtaacagcccaaaaagcaagttacccccctggaaccctcaggtgttcagcagcgaacggtcaagcttcctcgagcagccgccaaatctggagttggccggaactcagcccgccttctcagcggggcctcccgcagacgatagctcctccacttcctcaggggagtggtatcagaactttcagcccccaccccagcccccgtccgaggagcagtttggctgtccaggctcgccgagtccacagcctgacagcactgataacgacgattacgacgatatcagcgcagcctag

SEQ ID NO: 292013 - DNA, 1788 bp, Artificial Sequence
  derived and/or modified sequence
atgtggctgttcttcggcatcaccggcctgctgacagctgccctgagcggccaccccagccctgcccccccagaccagctgaacaccagcagcgctgagagcgagctgtgggagcctggagagcggctgcctgtgcggctgaccaacggcagcagcagctgcagcggcaccgtggaggtgcggctggaggcctcctgggagcccgcctgtggggccctgtgggacagcagagctgctgaggccgtgtgccgggccctgggctgcggcggcgctgaggccgccagccagctggccccacccaccccagagctgcccccacctcctgctgctggcaacacctctgtggccgccaatgccaccctggccggggccccagccctgctgtgcagcggggctgagtggaggctgtgtgaggtggtggagcacgcctgccgcagtgatggaagaagagcccgggtgacctgtgctgaaaatagagccctgcggctggtggatggcggcggggcctgtgccggccgggtggagatgctggagcacggggagtggggctctgtgtgtgatgacacctgggacctggaggatgcccacgtggtgtgccggcagctgggctgcggctgggccgtgcaggccctgcccggcctgcacttcaccccaggccggggccccatccaccgggaccaggtgaactgcagcggggctgaggcctacctgtgggactgccccggcctgcccggccagcactactgcggccacaaggaggatgctggagctgtgtgcagcgagcaccagagctggaggctgaccggcggcgctgacagatgtgagggccaggtggaggtgcacttccggggcgtgtggaacacagtgtgtgacagcgagtggtaccccagcgaggccaaggtgctgtgccagagcctgggctgcggcacagctgtggagcggcccaagggcctgccccacagcctgagcggccgcatgtactacagctgcaatggagaggagctgaccctgagcaactgctcctggaggttcaacaacagcaacctgtgcagccagagcctggccgcccgggtgctgtgcagcgccagccgcagcctgcacaacctgagcaccccagaggtgcctgcctctgtgcagacagtgaccatcgagagctctgtgacagtgaagattgagaacaaggagagccgggagctgatgctgctgatccccagcatcgtgctgggcatcctgctgctgggcagcctcatcttcatcgccttcatcctgctgcgcatcaagggcaagtatgacagccagaggcaccgggtgacagatgaggaggtgcagcagagccgcttccagatgccacccctggaggagggcctggaggagctgcacgccagccacatccccacagccaaccctggccactgcatcacagacccccccagcctgggcccccagtaccaccccaggagcaacagcgagagcagcaccagcagtggagaggactactgcaacagccccaagagcaagctgcccccctggaacccccaggtgttcagcagcgagaggagcagcttcctggagcagccccccaacctggagctggccggcacccagcctgccttctctgctggccccccagcagatgacagcagcagcaccagcagcggggagtggtaccagaacttccagcccccaccccagcccccatctgaggagcagtttggctgccccggcagccccagcccccagcctgacagcacagacaatgatgattatgatgacatctctgctgcctag

SEQ ID NO: 292014 - DNA, 1788 bp, Artificial Sequence
  derived and/or modified sequence
atgtggctgttcttcggcatcaccggcctgctgaccgccgccctgtcgggccaccccagtcctgcaccccccgaccagctgaacacaagtagcgcggaatcggaactgtgggagcccggggagcggttgcctgttaggctgaccaacggctcttcatcttgctctggcacagtcgaagtcagactcgaggcaagttgggaaccagcgtgcggcgccttgtgggattccagggcagccgaagcagtgtgtcgcgccctgggctgtggaggggcggaagccgcaagccagctcgcacctccgacgcccgaattgcctccgccgccagctgctggaaatacctccgtcgccgccaacgccacgctggcgggggctcccgctctgctctgctccggcgccgagtggcgcctgtgcgaagtagttgagcatgcttgcagatcagacgggaggcgagccagagtcacctgcgctgagaaccgcgctctgagactggtggacggcggaggtgcctgtgccgggagggtcgaaatgctcgaacacggagaatggggtagtgtgtgcgacgatacttgggatctcgaggatgctcacgtggtttgccgccagcttgggtgcggatgggccgtgcaggcactccctggcctacactttacccccggacgaggaccgatacatcgtgaccaggtaaactgttcgggagctgaagcttacctctgggattgccccggtctccccggccagcattattgtggtcacaaggaagatgcaggagccgtgtgttctgaacatcaatcctggcgccttaccggcggagccgacagatgcgagggccaggttgaagtccactttagaggtgtgtggaacactgtctgcgattcagaatggtacccgagcgaggccaaagtactgtgtcaaagcctgggatgtgggactgccgtggagagaccgaaagggctaccccactccttatctgggaggatgtactactcatgcaacggggaggagctgacactctcaaactgtagctggcgattcaataactcaaacctttgtagccagtctctcgccgcgcgtgtattgtgcagtgcatcccgttccctgcacaacctgagtacacctgaggtcccagccagcgtgcagaccgtaacaatagagagctctgtgactgtgaagattgaaaacaaagagtccagagagctcatgctccttattccctccatagtcctgggaattctcctgctcgggtccctgattttcattgccttcatcctcctgagaatcaaaggtaagtatgattctcagcggcatagagtgactgatgaggaggtgcagcagtctcggtttcagatgcccccgctggaggaaggcctcgaggaactacacgcctctcatatcccgaccgccaacccaggccattgcatcaccgacccacccagccttggaccccagtaccatcctcgctctaactctgaatcctcaacaagctccggcgaggactattgtaattcacccaagtccaagttgcctccctggaatccccaggtgttttcttccgaaaggagtagctttctggagcagccccctaacctggaacttgctgggactcagcccgctttcagtgctggacccccagcggacgattcgagctcgacttctagcggggaatggtaccagaatttccaaccacccccccaacctccaagcgaagagcagttcggatgtcctgggtctccctctccacagcctgactctacagacaatgacgactacgatgacatctctgctgcatag

SEQ ID NO: 292015 - DNA, 1788 bp, Artificial Sequence
  derived and/or modified sequence
atgtggctcttcttcggcattaccggacttcttacagctgctctgtcgggccatccttctcctgcgcctccagatcagcttaatacttcttcagctgagagtgaattatgggaacccggagagaggctgcccgtgcgcctgaccaacggctcatcaagctgcagcgggactgtggaggtccgcctcgaggcgtcttgggagcctgcatgcggggcactgtgggattcacgtgctgccgaggcggtctgccgtgcccttggctgtggcggtgctgaagctgctagtcagctggcccctccaactcccgagctgccccctcctccagccgcaggaaatacctcagtggccgctaacgcaaccttggcaggtgccccagcacttttgtgttctggcgctgaatggagactgtgcgaggtggtggagcacgcctgcagatctgacggccgaagggcacgcgtcacatgcgctgagaacagggctctgagactggtcgatgggggtggcgcatgtgctgggcgtgtagaaatgctggagcacggggagtgggggtctgtttgcgacgatacttgggacctggaggatgcccatgtcgtgtgtcggcaattgggatgcggatgggctgtgcaggcactgcccggattacacttcactcccggtagggggccaatacaccgcgatcaggttaattgctccggagctgaggcatacttgtgggattgccccggactgccaggacagcattattgcggccacaaggaagatgctggcgcagtctgcagcgaacatcagtcgtggcgactcaccggcggtgctgacagatgcgagggacaagtcgaagtgcacttcagaggggtgtggaacacggtgtgtgattccgaatggtatccttccgaggccaaggttctctgtcagtctctgggttgcggaaccgccgtggagcgccctaagggcctgccccactctctctctggtcgcatgtattactcttgtaacggcgaagaacttactctgtccaactgtagctggcggtttaacaattcgaatttatgcagccagtcactggccgcaagggttttgtgcagcgcgagccgctcactccacaatctgtcaacgcctgaagtgcccgcatctgtccagacagtcactatcgagtccagcgtgacagtgaaaattgagaataaggagagccgagagctcatgcttctaattccatctattgtcctcggtatcctccttctcggctcactaatttttatcgcattcatcttactccgtattaaggggaagtacgatagccaacgtcacagggtgactgatgaggaagtccagcagagcaggttccaaatgcctcctcttgaagagggcttggaggagctgcacgcaagccacatcccgaccgctaacccaggccattgcatcaccgatcccccttccctcggcccacagtatcacccccgatccaactctgagtcttccaccagtagcggggaggactactgtaacagtcccaaaagtaagctccctccctggaatccccaggttttttcctctgaaagatcgagctttttggaacagccaccaaatctggagttggcaggaacccagccagccttctccgcaggtccaccagcagacgattccagctctacttccagtggggaatggtatcaaaacttccaacccccaccacagcccccttcagaggagcagtttggctgccctggttctcctagccctcagcctgactctaccgataatgacgactacgacgacattagtgccgcatag

SEQ ID NO: 292016 - DNA, 3067 bp, Artificial Sequence
  derived and/or modified sequence
agaccaaaaccacaagcagaacaagcaggcgtgagacactcacaggttgggtttgatcgcatgcgtgtcggagaggagagagcagagagagacacaggaacaagaacagcaaagggtagagcagacctgcgccaggggcgcacaacggccgtgtccacctcccggccccaagatggtgcttcccacaggcagccacgcgtagcagccagagacagctccagacatgtggctcttcttcgggatcactggattgctgacggcagccctctcaggtcatccatctccagccccacctgaccagctcaacaccagcagtgcagagagtgagctctgggagccaggggagcggcttccggtccgtctgacaaacgggagcagcagctgcagcgggacggtggaggtgcggctcgaggcgtcctgggagcccgcgtgcggggcgctctgggacagccgcgccgccgaggccgtgtgccgagcactgggctgcggcggggcggaggccgcctctcagctcgccccgccgacccctgagctgccgcccccgcctgcagccgggaacaccagcgtagcagctaatgccactctggccggggcgcccgccctcctgtgcagcggcgccgagtggcggctctgcgaggtggtggagcacgcgtgccgcagcgacgggaggcgggcccgtgtcacctgtgcagagaaccgcgcgctgcgcctggtggacggtggcggcgcctgcgccggccgcgtggagatgctggagcatggcgagtggggatcagtgtgcgatgacacttgggacctggaggacgcccacgtggtgtgcaggcaactgggctgcggctgggcagtccaggccctgcccggcttgcacttcacgcccggccgcgggcctatccaccgggaccaggtgaactgctcgggggccgaagcttacctgtgggactgcccggggctgccaggacagcactactgcggccacaaagaggacgcgggcgcggtgtgctcagagcaccagtcctggcgcctgacagggggcgctgaccgctgcgaggggcaggtggaggtacacttccgaggggtctggaacacagtgtgtgacagtgagtggtacccatcggaggccaaggtgctctgccagtccttgggctgtggaactgcggttgagaggcccaaggggctgccccactccttgtccggcaggatgtactactcatgcaatggggaggagctcaccctctccaactgctcctggcggttcaacaactccaacctctgcagccagtcgctggcagccagggtcctctgctcagcttcccggagtttgcacaatctgtccactcccgaagtccctgcaagtgttcagacagtcactatagaatcttctgtgacagtgaaaatagagaacaaggaatctcgggagctaatgctcctcatcccctccatcgttctgggaattctcctccttggctccctcatcttcatagccttcatcctcttgagaattaaaggaaaatatgattcccagcggcatcgggtcacagatgaggaggtccagcaaagcaggttccagatgccacccttggaggaaggacttgaagagttgcatgcctcccacatcccaactgccaaccctggacactgcattacagacccgccatccctgggccctcagtatcacccgaggagcaacagtgagtcgagcacctcttcaggggaggattactgcaatagtcccaaaagcaagctgcctccatggaacccccaggtgttttcttcagagaggagttccttcctggagcagcccccaaacttggagctggccggcacccagccagccttttcagcagggcccccggctgatgacagctccagcacctcatccggggagtggtaccagaacttccagccaccaccccagcccccttcggaggagcagtttggctgtccagggtcccccagccctcagcctgactccaccgacaacgatgactacgatgacatcagcgcagcctaggccggggccagccgaggctcctggggtggctctgaccctctggcctcctgctctacctactccctttcccctttcccaccctcccagctcacctccccatggagctgagaggcctcccttggagagatggaaggaaacgttataccttgtacccctcggtctccatccatcaagccaaacctgctgccacagccctcccccggccccagatagcagccccagggaggatgctgcctccaagaggtgtgagccctctgtctcggggatgaacaagcagagtctgggctacctcttgacagctggtggaggggagttggggagctggactggatgactctggaggccccttccaaacctcaagtgtccggcgctttgattgcctgagtttctgacacttcagggcccagaggtcctgcgaggggcagaactggacccccatgccagtgctgctgcaggagggcccatatactagggtctgctgagctgttgtcactgatcggtgggcgctgggggggtagggtagcacaccagctgtcccaggctttgctccgggcggtaactgcacttgggcagggaatatagccttcctgggcacaactagctgacaatgacaggttgactgtgtacccccaaccaaggagctggggcccaaggccagtcctgccccagagacactccaagtccgccaggggcacagaccagttctgcagtgactgtccctggacaatgggtctttattctgagtttcctatggtttacaaagagggccccagcccagccccaccacagatcccagagataggggcccagtctccatgggggcaaggagcatagagatgttttccaggaaggggctcagaagctgcactaggccccgagtccccatgtgtctccttgaattgatgaggatgctcctgggagggatgcgtgactatgtggtgttgcacccggggctgcaaacgtctccgtgcagcccccagagagaggcccatgggctcagaccaggctttgttgtcctgctctgagtatcctgagattaaactgaattgctgaatg

SEQ ID NO: 292017 - DNA, 1788 bp, Artificial Sequence
  derived and/or modified sequence
atgtggctgttcttcggcatcaccggcctgctgaccgccgccctgagcggccaccccagccccgccccccccgaccagctgaacaccagcagcgccgagagcgagctgtgggagcccggcgagagactgcccgtgagactgaccaacggcagcagcagctgcagcggcaccgtggaggtgagactggaggccagctgggagcccgcctgcggcgccctgtgggacagcagagccgccgaggccgtgtgcagagccctgggctgcggcggcgccgaggccgccagccagctggccccccccacccccgagctgccccccccccccgccgccggcaacaccagcgtggccgccaacgccaccctggccggcgcccccgccctgctgtgcagcggcgccgagtggagactgtgcgaggtggtggagcacgcctgcagaagcgacggcagaagagccagagtgacctgcgccgagaacagagccctgagactggtggacggcggcggcgcctgcgccggcagagtggagatgctggagcacggcgagtggggcagcgtgtgcgacgacacctgggacctggaggacgcccacgtggtgtgcagacagctgggctgcggctgggccgtgcaggccctgcccggcctgcacttcacccccggcagaggccccatccacagagaccaggtgaactgcagcggcgccgaggcctacctgtgggactgccccggcctgcccggccagcactactgcggccacaaggaggacgccggcgccgtgtgcagcgagcaccagagctggagactgaccggcggcgccgacagatgcgagggccaggtggaggtgcacttcagaggcgtgtggaacaccgtgtgcgacagcgagtggtaccccagcgaggccaaggtgctgtgccagagcctgggctgcggcaccgccgtggagagacccaagggcctgccccacagcctgagcggcagaatgtactacagctgcaacggcgaggagctgaccctgagcaactgcagctggagattcaacaacagcaacctgtgcagccagagcctggccgccagagtgctgtgcagcgccagcagaagcctgcacaacctgagcacccccgaggtgcccgccagcgtgcagaccgtgaccatcgagagcagcgtgaccgtgaagatcgagaacaaggagagcagagagctgatgctgctgatccccagcatcgtgctgggcatcctgctgctgggcagcctgatcttcatcgccttcatcctgctgagaatcaagggcaagtacgacagccagagacacagagtgaccgacgaggaggtgcagcagagcagattccagatgccccccctggaggagggcctggaggagctgcacgccagccacatccccaccgccaaccccggccactgcatcaccgacccccccagcctgggcccccagtaccaccccagaagcaacagcgagagcagcaccagcagcggcgaggactactgcaacagccccaagagcaagctgcccccctggaacccccaggtgttcagcagcgagagaagcagcttcctggagcagccccccaacctggagctggccggcacccagcccgccttcagcgccggcccccccgccgacgacagcagcagcaccagcagcggcgagtggtaccagaacttccagccccccccccagccccccagcgaggagcagttcggctgccccggcagccccagcccccagcccgacagcaccgacaacgacgactacgacgacatcagcgccgcctag

SEQ ID NO: 292018 - DNA, 291 bp, Artificial Sequence
  derived and/or modified sequence
atgttcgaggacaagggcctggactgcatcttcctggagaccaacatgagcatgaagaagcagtaccacatggtgtacgagtgcatccccctgcccaaggaggtgggcgacatggcccccatctacttcaagaaggccatcatggagagcgacgaggagtggagcatgaacaagaagctgatcgacctgagcagcaaggacatcagaaagagcgtgcccagaggcctgccctacttcagcgtggacttcggcctgcacggcggcttcgcccacgtgatcgaggaccagtag

SEQ ID NO: 292019 - DNA, 1110 bp, Artificial Sequence
  derived and/or modified sequence
ccagataaaatctagaacagtcatccaataattaagccagaaagggagtatgaacaaacatgaagtaaagatgtttgtgagatgttcagaaaatcattggtaaagatgtttgaagataaaggattagactgcatttttttggaaactaatatgagcatgaagaaacagtatcacatggtttatgaatgtattcctcttcccaaggaagtgggtgacatggctcccatctattttaagaaagccataatggaatctgatgaagagtggtccatgaacaagaagttgatagatctctcttcaaaagatatcagaaagtctgtacccagagggttaccttacttctctgtggattttggccttcacggagggtttgcccatgtcattgaagatcagcacaaattccctcattactttggaaaggaaatcataggtgggatgctggatatagaaccaagactttggaggaaaggcatccgagaaagctttgaggatcagaggaaaaaagcactgcagtttgctcagtggtggaaaccatatgacttcaccaaaagtaaaaactattgaggtgtaccttccattttaaaatttttcttcagatcccgttcagttttatttccattgcatctaatgaagcaactgaccctcaggtcacaggcagagagagtcacagcagcagactgctctgggtcagtgacaactgtacatcaggagattgtgttgttttcttcttcacctgctcctatctatggacttcattttagtcaccatggagtaaaaacatatattcgatgatctgctcacattcctgctctctacctacttcttggtattccgaattgttcagttaatttagagaaggccttttctgaagggatatctaaaaagcataggaaatccttggttcagagggaagtgggtctgcttcatggttgttaagtctactgtctggcttcttttgcatttttaaaaataagacgatttaattttaatttcataggattttatagaaaagctcttaattttctactagcagtatatagtatcacttctattctttttgttaaaggaaaaggaaatgtccccaaagtattaaagaattaaatgatactg

SEQ ID NO: 292020 - DNA, 291 bp, Artificial Sequence
  derived and/or modified sequence
atgtttgaggacaaaggtctggattgtatcttcctcgagactaatatgagtatgaagaagcagtatcacatggtctatgagtgcatcccattgcctaaggaagtaggagacatggctccaatttactttaaaaaggccataatggaatctgatgaggaatggtctatgaacaaaaaactgatcgatttgtcttcaaaggacattcgcaaatccgtcccaagaggtctaccgtatttctctgttgactttggtctgcacgggggctttgcgcacgtcattgaggaccaatag

SEQ ID NO: 292021 - DNA, 291 bp, Artificial Sequence
  derived and/or modified sequence
atgtttgaagataaaggcctggactgcatcttcctggagaccaacatgtccatgaagaagcagtaccacatggtgtatgagtgcatccccctgcccaaggaggtgggggacatggcccccatctacttcaagaaggccatcatggagagtgatgaggagtggagcatgaacaagaagctgattgacctgagcagcaaggacatcaggaagtctgtgccccggggcctgccctacttctctgtggactttggcctgcacggcggctttgcccacgtgattgaggaccagtag

SEQ ID NO: 292022 - DNA, 291 bp, Artificial Sequence
  derived and/or modified sequence
atgttcgaggacaagggcctggactgcatcttcctggagaccaacatgtcgatgaagaaacaataccacatggtctatgaatgtattcctttacctaaggaagtcggggacatggctccaatttacttcaagaaggccattatggagtcagacgaggaatggtccatgaacaaaaagctgattgatctaagtagcaaggacatccgcaagtcagtcccccgtggattaccatacttttccgtcgactttggcctgcatggggggtttgcccacgtgattgaagatcagtag

SEQ ID NO: 292023 - DNA, 291 bp, Artificial Sequence
  derived and/or modified sequence
atgttcgaagataagggtctagattgcattttcttggagacgaatatgtcaatgaagaagcagtatcatatggtctatgaatgcattcctctccccaaagaagttggagacatggctcctatatacttcaaaaaggctatcatggaaagcgatgaggaatggtctatgaacaagaaactcatcgatctgtcatctaaggacattcggaaatcggtgcctcgaggactcccatatttctctgtggacttcggcctgcacgggggttttgctcacgtcatcgaggatcagtag

SEQ ID NO: 292024 - protein, 372 aa, Artificial Sequence
  derived and/or modified sequence
MDALNRNQIGPGCQTQTMVQKGPLDLIETGKGLKVQTDKPHLVSLGSGRLSTAITLLPLEEGRTVIGSAARDISLQGPGLAPEHCYIENLRGTLTLYPCGNACTIDGLPVRQPTRLTQGCMLCLGQSTFLRFNHPAEAKWMKSMIPAGGRAPGPPYSPVPESESLVNGNHTPQTATRGPSACASHSSLVSSIEKDLQEIMDSLVLEEPGAAGKKPAATSPLSPMANGGRYLLSPPTSPGAMSVGSSYENTSPAFSPLSSPASSGSCASHSPSGQEPGPSVPPLVPARSSSYHLALQPPQSRPSGARSESPRLSRKGGHERPPSPGLRGLLTDSPAATVLAEARRATESPRLGGQLPVVAISLSEYPAARRCT

SEQ ID NO: 292025 - protein, 730 aa, Artificial Sequence
  derived and/or modified sequence
MERSDEENLKEECSSTESTQQEHEDAPSTKLQGEVLALEEERAQVLGHVEQLKVRVKELEQQLQESAREAEMERALLQGEREAERALLQKEQKAVDQLQEKLVALETGIQKERDKERAELAAGRRHLARQALYAELQTQLDNCPESVREQLQEQLRREAEALETETKLFEDLEFQQLERESRVEEERELAGQGLLRSKAELLRSIAKRKERLAILDSQAGQIRAQAVQESERLARDKNASLQLLQKEKEKLTVLERRYHSLTGGRPFPKTTSTLKEMEKLLLPAVDLEQWYQELMAGLGTGPAAASPHSSPPPLPAKASRQLQVYRSKMDGEATSPLPRTRSGPLPSSSGSSSSSSQLSVATLGRSPSPKSALLTQNGTGSLPRNLAATLQDIETKRQLALQQKGQQVIEEQRRRLAELKQKAAAEAQCQWDALHGAAPFPAGPSGFPPLMHHSILHHLPAGRERGEEGEHAYDTLSLESSDSMETSISTGGNSACSPDNMSSASGLDMGKIEEMEKMLKEAHAEKNRLMESREREMELRRQALEEERRRREQVERRLQSESARRQQLVEKEVKMREKQFSQARPLTRYLPIRKEDFDLKTHIESSGHGVDTCLHVVLSSKVCRGYLVKMGGKIKSWKKRWFVFDRLKRTLSYYVDKHETKLKGVIYFQAIEEVYYDHLRSAAKSPNPALTFCVKTHDRLYYMVAPSAEAMRIWMDVIVTGAEGYTQFMN

SEQ ID NO: 292026 - DNA, 2193 bp, Artificial Sequence
  derived and/or modified sequence
atggagagaagtgatgaggagaatcttaaagaagagtgctccagtaccgaaagtacgcagcaggaacacgaagacgcaccgtccacaaaactgcagggagaagtgctcgctctcgaggaggaaagagcacaagtcttaggccacgttgagcaactcaaggtgcgcgtgaaggagctggaacaacaactacaggaatctgcaagagaagcagagatggagcgggcactgttacagggagaacgcgaggccgagcgcgctctgctccagaaggaacagaaggcagttgaccagctgcaggagaaactggttgcactggaaactggaatccaaaaagagcgagataaagagagagccgaactcgcagctgggcgacggcatctggccagacaggctctctacgcagaactccaaactcagttagataattgtcctgagtctgttcgggagcagctgcaagaacagctccgccgggaggctgaggccctcgagacggaaaccaaactattcgaggacctggagtttcaacagctggaaagggagagtcgtgtggaggaagagagggaattagctgggcagggcctgctgcgcagtaaagctgagctgctgcgctctatcgccaagcgcaaagaaagactggcgattctggattcccaagcaggccaaattagagcccaggcagtgcaggagtcagaaagactggccagggacaagaacgcatcactacagcttctgcagaaagagaaagagaaattgacagtgctggagaggcgttatcactcactgactgggggcagaccttttcccaagaccacctccactttaaaggaaatggaaaaactacttctgcctgccgttgatctcgagcagtggtaccaggagttgatggctggactgggtacgggccctgcagccgccagcccacactcttccccaccccccctccctgcaaaagcctcccggcagctccaggtttaccgaagtaaaatggatggcgaggcgacctctccactgccaagaactcgctccggaccccttccttcatcttctggttcctcatcctcgtcctcccagctctcggtggcaaccctggggagatcgccttctccaaaatccgcacttctcacacagaatggcactggatcactgccccgaaacctggccgcaacgcttcaggacattgagaccaagcgacagttggctctgcagcagaagggtcagcaggtgattgaagagcagcggcgccgtctcgcagagttaaagcagaaagcagccgccgaggcccaatgccagtgggatgcccttcatggcgccgcgccattccctgcaggcccgtcagggtttccaccactaatgcaccactctatactgcatcacctgccagctgggagggagagaggagaggagggagagcatgcttacgacacgctctccttggagtcctctgacagcatggaaacctcaatttctaccggcgggaattccgcctgctcaccggacaatatgtcgagtgcatcagggcttgacatgggcaaaatcgaggaaatggagaaaatgttgaaagaagctcacgcagagaagaatcgcttaatggagagccgcgaacgggagatggaactgaggaggcaagctcttgaagaggagaggcggaggagagagcaagtcgagcggcgtctccagtcagagtctgctcgtaggcagcaattggtggagaaagaagtgaaaatgagggaaaagcagtttagccaggccaggcccctgacccgctacctgccgatacgcaaggaagacttcgatctgaaaacccacattgaatctagtggacatggagtcgacacttgtttgcatgtagtcctgtcttccaaggtctgtcggggttacttggtcaagatgggtgggaaaattaagtcttggaaaaagaggtggtttgtatttgaccgccttaagaggaccttaagctattacgttgacaagcatgagaccaagctgaagggcgtcatctattttcaggccatcgaggaggtgtattacgaccatctgagatctgccgccaagtcacctaatcccgctttaacattttgcgttaagacccatgatcggctctactacatggtggcacccagtgccgaagccatgagaatctggatggacgtaatcgtgaccggcgctgaaggttacacccagttcatgaattag

SEQ ID NO: 292027 - DNA, 2193 bp, Artificial Sequence
  derived and/or modified sequence
atggagaggagtgatgaggagaacctgaaggaggagtgcagcagcacagagagcacccagcaggagcatgaagatgcccccagcaccaagctgcagggcgaggtgctggccctggaggaggagcgggcccaggtgctgggccacgtggagcagctgaaggtgcgggtgaaggagctggagcagcagctgcaggagagcgcccgggaggccgagatggagcgggccctgctgcagggcgagcgggaggccgagcgggccctgctgcagaaggagcagaaggctgtggaccagctgcaggagaagctggtggccctggagaccggcatccagaaggagcgggacaaggagcgggcagagctggccgccggccgccgccacctggcccggcaggccctgtatgcagagctgcagacccagctggacaactgcccagagagcgtgcgggagcagctgcaggagcagctgcggcgggaggccgaggccctggagacagagaccaagctgtttgaggacctggagttccagcagctggagcgggagagccgggtggaggaggagcgggagctggccggccagggcctgctgcggagcaaggccgagctgctgcggagcatcgccaagaggaaggagcggctggccatcctggacagccaggccggccagatccgggcccaggccgtgcaggagagcgagcggctggcccgggacaagaatgccagcctgcagctgctgcagaaggagaaggagaagctgactgtgctggagcggcgctaccacagcctgaccggcggccggcccttccccaagaccaccagcaccctgaaggagatggagaagctgctgctgcctgctgtggacctggagcagtggtaccaggagctgatggccggcctgggcaccggccctgctgctgccagcccccacagcagccccccacccctgcctgccaaggccagccggcagctgcaggtgtaccgcagcaagatggatggagaggccaccagccccctgcccaggaccaggagcggccccctgcccagcagcagcggcagcagcagcagcagcagccagctgtctgtggccaccctgggccgcagccccagccccaagagcgccctgctgacccagaatggaacaggcagcctgcccaggaacctggccgccaccctgcaggacatcgagaccaagaggcagctggccctgcagcagaagggccagcaggtgattgaggagcagaggcggcggctggccgagctgaagcagaaggctgctgctgaggcccagtgccagtgggatgccctgcatggagctgcccccttccctgctggccccagcggcttcccccccctgatgcaccacagcatcctgcaccacctgcctgctggccgggagcggggggaggagggggagcacgcctatgacaccctgagcctggagagcagtgacagcatggagaccagcatcagcactggaggcaacagcgcctgcagcccagacaacatgagcagcgccagcggcctggacatgggcaagattgaggagatggagaagatgctgaaggaggcccacgccgagaagaaccggctgatggagagccgggagcgggagatggagctgcggcggcaggccctggaggaggagaggagaagaagagagcaggtggagcggcggctgcagagcgagagcgcccggcggcagcagctggtggagaaggaggtgaagatgagggagaagcagttcagccaggcccggcccctgacccgctacctgcccatcagaaaagaagattttgacctgaagacccacatcgagagcagcggccacggcgtggacacctgcctgcacgtggtgctgagcagcaaggtgtgccggggctacctggtgaagatgggcggcaagatcaagtcctggaagaagcgctggtttgtgtttgaccggctgaagaggaccctgagctactacgtggacaagcatgagaccaagctgaagggcgtcatctacttccaggccatcgaggaggtgtactatgaccacctgcggtctgctgccaagagccccaacccagccctgaccttctgtgtgaagacccatgaccggctgtactacatggtggcccccagcgctgaggccatgaggatctggatggatgtgattgtgactggagctgagggctacacccagttcatgaactag

SEQ ID NO: 292028 - DNA, 2193 bp, Artificial Sequence
  derived and/or modified sequence
atggagcggagcgacgaggagaacctgaaggaggagtgcagcagcacagagtctacccagcaggagcatgaagacgcaccttccaccaaactgcagggcgaagtgctggctctagaggaggagcgggcacaggtcctgggccacgtcgaacagctaaaagtgagggtgaaggaactcgaacagcagctgcaggaatcggcacgggaagcggagatggagcgggccctgcttcagggcgagagggaagctgaaagagctttactacaaaaggagcagaaagccgtggaccagctccaagagaaactggtcgcgttggaaaccgggatacaaaaagagcgcgacaaggagagggccgaactggccgccgggcggcgacacctggcccggcaagcactgtacgctgagctgcaaacacagttagataactgtccagagagtgtgcgtgagcagcttcaggagcagctgaggagagaagctgaagcactggagacagagacaaagctgttcgaagatctggagttccagcagctcgaaagagaatcaagagtagaagaggaacgggagcttgcaggtcaggggctgttgcgctccaaggccgagctgctacgctcaatagcaaaacgcaaggagagactggcgatcctagactcacaggccggtcagattagagctcaggccgtgcaagagtcagagcgcctggcccgggacaagaacgcctctctacaactccttcagaaagagaaggaaaaattaaccgtgttagaacggcggtatcactccctgacagggggccgcccctttccaaaaactactagcacactgaaggaaatggagaaattgctgttgccagccgttgacctcgaacagtggtaccaagagctgatggccggcctgggcacaggccccgctgcagcgtcaccccactcttctcccccaccccttcccgccaaggcatcaagacagctgcaggtgtaccgcagcaagatggatggggaagcaacgtcccccctcccacgcacacgatccggccctctgccttcctccagtggcagttccagctctagcagccagctgtctgtggcgaccctcgggcgatccccgtcgccaaagagcgctctgctgacacagaacggaacgggttcattgccaagaaatctggccgcaacgctgcaggatattgaaaccaagaggcagttagccttacagcagaagggacagcaggtcatcgaagagcaacgcagaagactggccgaacttaagcagaaagccgctgctgaggcacagtgccagtgggacgcactgcatggcgctgccccgttcccggccggcccctctggcttccccccactgatgcaccactccattctgcaccaccttccagcaggccgcgaaagaggagaggaaggagaacacgcctatgatacattgagtcttgagtcctctgactcgatggagacatctatctccacgggaggcaactccgcatgttctcctgataatatgagctcagcctcagggctcgatatgggcaaaatcgaggagatggagaaaatgctgaaggaggcccatgccgaaaaaaaccggctgatggagtctagagagcgagagatggagctgcggaggcaggctctggaggaggaacgaaggaggagagagcaagtcgagagaaggctacagagcgaatctgcaagaaggcaacagctggtggagaaagaggttaaaatgagagaaaaacaattcagccaggcgagacctcttacacgctacctccctattcgaaaggaagatttcgacctgaagacccatatcgaaagctccggccatggagtcgatacttgtctacatgtcgtcctcagctcgaaagtgtgcagaggatacctagttaagatgggagggaagatcaagagctggaaaaagcggtggttcgtttttgaccggctgaagcgcacgttgtcttactacgtggataaacatgaaacgaaactgaagggagtcatttactttcaagccatagaagaggtgtattatgatcaccttcgaagcgcagccaaaagcccaaacccagccttaaccttctgtgtcaaaacccacgacaggctgtactacatggtcgcaccatccgctgaggctatgcgtatctggatggacgttatagtgacaggcgccgagggctacacccagtttatgaattag

SEQ ID NO: 292029 - DNA, 5565 bp, Artificial Sequence
  derived and/or modified sequence
agcgagctcccggggaaaagcaacggtgtcctcctaagcctgaggccaccgcgaccgagccgagccaggctaagggaccagtgtctccctgccccccccccacctctaggagctctggagccttaggaccatggacgctctcaataggaaccaaataggccctggatgccagacccagaccatggtgcagaaaggacccttggacctgatcgagacaggcaaagggctgaaagtgcaaacggacaaaccccacctggtgagcctgggcagtgggcgactcagcacagccatcaccctcctgccgctggaggaagggaggacggtgattggctctgcagccagagacatctcactacagggcccaggcctggctccagagcactgctacatcgagaacctgcggggcaccctcaccctctacccctgtggcaatgcctgcactattgatgggctccctgtccggcagcctacccggctcactcagggctgcatgttgtgcctgggtcagtccaccttccttcgctttaaccacccggctgaagccaagtggatgaaaagcatgattccagcagggggccgagcccctgggcccccctacagccctgttcctgcagaatcagaaagtctggtaaatgggaaccacaccccacagactgcaacacggggaccctctgcctgtgccagccacagttccctggtgagctctattgagaaggacctgcaagagatcatggactcactggtgctagaggagcctggagctgctggcaagaagcctgccgcaacctctccactgtcaccgatggctaatggtgggcgctacctgctgtctcccccaaccagccccggcgccatgtctgtgggctccagctatgagaacacctctccagccttctctccactctcttcaccagccagcagtggaagctgtgccagtcactcacccagtgggcaagagccaggaccttctgtgcccccgctggtacctgcccgttcctccagctaccatctggccctacagcccccacagtcccgcccaagtggtgctcgctccgagagtcctcggctgagcaggaaagggggccatgagaggcctcccagccctggcctccggggtctgctgacagacagccctgcagctactgtcttggcggaggcccggagagccactgagagcccccggctgggtgggcagctgcctgtggtggccatcagcctgagtgaatacccagcttctggtgctctcagtcaacccaccagcattcctggcagccccaagtttcagcctccagtccctgctccccgaaacaagattggcacactccaggaccgccctcccagccctttccgtgagcctccaggcagtgagcgggtgctaacaaccagcccctcacgccaactggtgggccgaacattttcagatgggttagccacccgtaccctgcagcctcctgagagtccccgcctgggccggcggggcctggacagtatgcgagaactaccccccttaagtccatctctgtcccggcgagctctctccccgctgcccacccggaccaccccagatcccaagctaaacagggaagtggcagagagtcctcggccccggcgctgggcagcccatggggcttcaccagaggacttctccctgacgctgggggcacggggccgtaggacacggagcccctcacccacactgggtgagtctctggcaccccacaagggcagcttcagtggcaggctgagcccagcctacagtctgggctctcttactggggcttcaccctgccagagtccctgtgtccagaggaagctctccagcggggacttgcgggtgcctgtcacaagggagcggaaaaatagcatcacagagatcagtgacaatgaggacgacctcctggagtaccaccggcgacagcgccaagagcggctccgggagcaggagatggagaggctggaacgccagcgcctggagaccatcctgaacctgtgtgccgaatacagccgggctgatgggggacctgaggctggggagcttcccagcattggggaggccaccgcagcattggcactggcaggccggaggccctcacgaggccttgcaggggcctctgggcggagcagcgaggagcctggcgttgccacccaacgcctatgggagagtatggagcgctcagatgaggaaaatctcaaggaggagtgcagcagcactgagagcacccagcaggagcacgaagatgcacctagcaccaagctccagggagaggtgctagccctggaagaagagcgggctcaggtgctggggcacgtggagcagctcaaggtccgtgtgaaggagctagagcagcagctgcaggagtcagcccgagaggccgaaatggagcgggcactgctgcagggagagagggaggcagagcgggcactgctgcagaaggagcagaaggcagtggatcagctgcaggagaagctggtggccttggagacaggcatccagaaggagagggacaaggagagggcggagctggccgcgggacggaggcacctggcccgccaggcgctctacgccgagctccagacgcagctcgataactgccccgagtcagtgcgggaacagttacaggagcagctgagaagggaggcagaggccctggagactgagacaaagctctttgaggacttggagttccagcagttggagcgggagagccgcgtggaggaggagcgcgagctggccggccaggggctgctccggagcaaggctgagctgctccgcagcatcgccaagaggaaggagcgcctggccatcctggacagtcaggctgggcagatccgggctcaggccgtgcaggaatcagaacgcctggcccgggacaagaatgcctccttacagctgctgcaaaaggagaaggagaagctgactgtgctggaaaggagataccactcactcacagggggcaggcctttcccgaagaccacatcgaccctcaaagagatggagaagctgctgctccctgctgtagacttagagcagtggtaccaggagctgatggccgggctggggactggccccgctgcagcctcccctcactcttctcccccgcctctgcccgccaaagcttcccgtcagctgcaggtttaccgctccaagatggatggcgaggccaccagcccccttccccggacccgcagcggccccctcccctcctcctctggctcttcctcctcctcctcccagctcagcgtggctaccctggggcgtagcccctccccaaagagcgctctactcacccagaatggcacgggcagccttcctcgcaacctggcagccacactgcaggacatcgagaccaagcgccaactagctctgcagcagaagggacaacaagtgattgaagagcagcggcggcgactggctgagctgaagcagaaagcggcagctgaggcacagtgccagtgggatgcccttcacggggcagcacccttcccagcgggcccctcgggcttcccccctctcatgcaccactctatcctacaccacctgcctgcggggcgggagcgtggggaggagggtgagcacgcctatgatacgctgagtctggagagctctgacagcatggagaccagcatctccaccgggggcaactcggcctgctcccctgacaacatgtccagcgcgagtggtctggacatggggaagatcgaggagatggagaagatgctgaaagaggctcatgcagagaagaaccggctcatggagtcgagggagcgggagatggagctgcggcggcaggccctggaggaggagcggcggaggcgtgagcaggtagaacggaggctgcagagtgagagtgcccggaggcagcagctggtcgagaaggaggtcaagatgcgggagaaacaattttcccaggcacgacccctgacccgctacctgccaatccggaaggaggactttgacctgaagacacatattgagtcatcgggccatggtgttgatacctgcctgcacgtggtgctcagcagcaaggtctgccgtggctacttggtcaagatgggcggcaagattaaatcatggaagaagcgctggtttgtcttcgaccggctcaagcgcaccctttcctattatgtggacaagcatgagacgaagctgaagggagtcatctatttccaggccattgaggaagtgtactacgaccacctgcgcagtgcagccaagagcccgaacccagccctcaccttctgcgtaaagacccatgaccggctgtactacatggtggccccatctgcagaggccatgcgtatctggatggatgtcattgtcacaggggctgagggctacactcagttcatgaactaactgccgtgggcctcctggcagagcacaactggggcttttgtataagaagactttaatattctgtaaggagcttggtcctgtgagtttctgggctctggcctcctgaagaaccagccagaagaagaaaagtagaggtggctttgctgcctcctgggagcccagaacttgcagtaaccctttagggtcctgccccaggcccagccagggctgaggagctgtcacagagagggcctcagctctgacctgacacctgctctccccagcctgttttctcttttctaaaagacaaattatggtaccataagctgccaaagatcccctcctgcctcagacccctttgccaggggctttgggggctgagcagagccacatccagagtggggtaatagctcaggcggcccgcttcccatttctcaaaccccgctctgccccattgttctcctttcccttatactttttattaccttgctcaagggccagagatctcaagtgtcaaccttgaggtcccagctccatcccctagttgcagactcatcaccatggttaccatagtgactgcttcattgccatggttacatactaattgctgcagctctgtggcccagcccactgcttcagctgtgggccatctgagggtacgtgccatcatctctccagcccaggcccctgggcatctcatgctggggggaagggactgaatacctttttccttccccctgcctgtgtcttcagccctgatgcacaggctgccagccccccagtccagccctctcccttccactggtgccttgcttagagccagaagggatgaagccgggggatctatggaacagaggaggagcgatgcagttgggagaggaagctagaagggttatggttggagttctgtacagtgttgagtttccgacagggaaagaggattcctccaatgctcctagagagaaagcctgagcaggagatgatgcagcagaggggaagggccctgtggtgccgccgcccttccttcagcctccgaagggtgatggaaatggagagtggaggaccaggcctccagctgtctggcctcgcccttcacgccttaacactaagcccacctcccctgctctccttcccagcattgagcccttggttgcctgggcccaggctgggggttttcagtatttgtaagcatttcagcagaacaataaagcctttggactacggaagtg

SEQ ID NO: 292030 - DNA, 2193 bp, Artificial Sequence
  derived and/or modified sequence
atggagcgatctgacgaagaaaatctgaaggaagaatgttccagcacagagtcaacccaacaggaacacgaagatgcacctagcaccaagcttcagggggaggtcctggccctcgaagaggaacgcgctcaggtcctggggcacgtcgagcaacttaaggtccgcgttaaagaactggagcaacagctgcaggagtccgcaagagaagccgagatggaaagagccctgctacagggtgaaagggaggcagaacgagcattgttacagaaagaacaaaaggccgtcgaccagctgcaagaaaaattagttgccctggagacgggaattcaaaaggaacgcgacaaagagcgggcagagctggccgcaggcagaagacatctagctcgacaggccctgtatgcggagctgcagacccagctagataattgccccgaatccgtgagggagcagctgcaagagcaactgcgtcgtgaggcagaggcccttgagacagaaaccaagttatttgaggatttggaattccagcagctggaacgagaatcacgggtcgaagaggaacgtgaactcgctgggcagggcttgctacgctcaaaggcagagctcctgcggagcatagctaaacgcaaggaaagactggccatcctcgactctcaagctgggcaaattcgcgcacaggccgtccaggaaagtgagagactcgccagagacaagaacgcttcccttcagctcctccagaaggagaaggagaaattgaccgtgctggaacggagataccattccttaactggtggcagaccctttcctaagaccacatctactcttaaagagatggagaaattactcctgcctgccgtggacctggagcaatggtaccaggagctgatggccggtctggggactggaccggcagccgcatcacctcactctagtccaccccctctacccgcaaaagcgtcccggcagctgcaagtgtatcgtagcaagatggatggggaggccacatccccactgcctagaactaggtccggcccacttccttcttcatctggctccagcagcagctccagtcaactcagcgtggcaacactggggaggagcccgtctcctaagtccgcactactgacacagaatggtactgggagcctcccacgaaacctggcagcaactctccaggatattgagacaaagcggcagctcgctctgcagcagaaaggtcagcaggttattgaggagcagcgtagacggctcgctgagctcaagcagaaggccgctgccgaggcacagtgtcaatgggacgcacttcacggcgcagctccattccctgcaggacctagcggctttcccccacttatgcatcactctattctgcatcacttgccagcagggagagaaaggggagaggagggggaacacgcttacgacacgctgtctctggaatcttccgatagcatggagacttccataagcaccggcggaaatagtgcctgctctcctgataacatgtcttctgctagcgggctggacatgggtaaaatcgaggaaatggagaaaatgctgaaggaagctcacgctgaaaagaatcgactcatggagagtagggaacgcgagatggaactgcggaggcaggctctcgaggaagagaggagaaggagagaacaagtcgaacgtagactgcaaagcgaatctgccagaagacagcagttggtggaaaaagaggtgaaaatgcgggaaaaacagttctcacaagccaggccgttgactagatatcttccaatacgcaaagaggacttcgatctgaaaacacatatagaaagctccggtcacggcgtcgatacctgccttcatgtggttctttcgagcaaagtgtgccggggatatttagtgaagatggggggaaaaatcaaatcatggaagaagagatggtttgtgttcgaccgactgaagcggacactgtcttactatgttgataaacacgagacaaaactcaagggggtcatttactttcaggcaatcgaggaagtttactatgaccatctgcgttctgccgctaaatcccctaaccctgccctcacattttgcgtcaagacacacgatagactctattacatggtcgcccctagcgccgaggcaatgcggatttggatggacgtgatcgtcaccggcgctgagggttatacacagtttatgaattag

SEQ ID NO: 292031 - DNA, 2193 bp, Artificial Sequence
  derived and/or modified sequence
atggagagaagcgacgaggagaacctgaaggaggagtgcagcagcaccgagagcacccagcaggagcacgaggacgcccccagcaccaagctgcagggcgaggtgctggccctggaggaggagagagcccaggtgctgggccacgtggagcagctgaaggtgagagtgaaggagctggagcagcagctgcaggagagcgccagagaggccgagatggagagagccctgctgcagggcgagagagaggccgagagagccctgctgcagaaggagcagaaggccgtggaccagctgcaggagaagctggtggccctggagaccggcatccagaaggagagagacaaggagagagccgagctggccgccggcagaagacacctggccagacaggccctgtacgccgagctgcagacccagctggacaactgccccgagagcgtgagagagcagctgcaggagcagctgagaagagaggccgaggccctggagaccgagaccaagctgttcgaggacctggagttccagcagctggagagagagagcagagtggaggaggagagagagctggccggccagggcctgctgagaagcaaggccgagctgctgagaagcatcgccaagagaaaggagagactggccatcctggacagccaggccggccagatcagagcccaggccgtgcaggagagcgagagactggccagagacaagaacgccagcctgcagctgctgcagaaggagaaggagaagctgaccgtgctggagagaagataccacagcctgaccggcggcagacccttccccaagaccaccagcaccctgaaggagatggagaagctgctgctgcccgccgtggacctggagcagtggtaccaggagctgatggccggcctgggcaccggccccgccgccgccagcccccacagcagccccccccccctgcccgccaaggccagcagacagctgcaggtgtacagaagcaagatggacggcgaggccaccagccccctgcccagaaccagaagcggccccctgcccagcagcagcggcagcagcagcagcagcagccagctgagcgtggccaccctgggcagaagccccagccccaagagcgccctgctgacccagaacggcaccggcagcctgcccagaaacctggccgccaccctgcaggacatcgagaccaagagacagctggccctgcagcagaagggccagcaggtgatcgaggagcagagaagaagactggccgagctgaagcagaaggccgccgccgaggcccagtgccagtgggacgccctgcacggcgccgcccccttccccgccggccccagcggcttcccccccctgatgcaccacagcatcctgcaccacctgcccgccggcagagagagaggcgaggagggcgagcacgcctacgacaccctgagcctggagagcagcgacagcatggagaccagcatcagcaccggcggcaacagcgcctgcagccccgacaacatgagcagcgccagcggcctggacatgggcaagatcgaggagatggagaagatgctgaaggaggcccacgccgagaagaacagactgatggagagcagagagagagagatggagctgagaagacaggccctggaggaggagagaagaagaagagagcaggtggagagaagactgcagagcgagagcgccagaagacagcagctggtggagaaggaggtgaagatgagagagaagcagttcagccaggccagacccctgaccagatacctgcccatcagaaaggaggacttcgacctgaagacccacatcgagagcagcggccacggcgtggacacctgcctgcacgtggtgctgagcagcaaggtgtgcagaggctacctggtgaagatgggcggcaagatcaagagctggaagaagagatggttcgtgttcgacagactgaagagaaccctgagctactacgtggacaagcacgagaccaagctgaagggcgtgatctacttccaggccatcgaggaggtgtactacgaccacctgagaagcgccgccaagagccccaaccccgccctgaccttctgcgtgaagacccacgacagactgtactacatggtggcccccagcgccgaggccatgagaatctggatggacgtgatcgtgaccggcgccgagggctacacccagttcatgaactag

SEQ ID NO: 292032 - protein, 247 aa, Artificial Sequence
  derived and/or modified sequence
MDALNRNQIGPGCQTQTMVQKGPLDLIETGKGLKVQTDKPHLVSLGSGRLSTAITLLPLEEGRTVIGSAARDISLQGPGLAPEHCYIENLRGTLTLYPCGNACTIDGLPVRQPTRLTQGCMLCLGQSTFLRFNHPAEAKWMKSMIPAGGRAPGPPYSPVPAESESLVNGNHTPQTATRGPSACASHSSLVSSIEKDLQEIMDSLVLEEPGAAGKKPAATSPLSPMANGGRYLLSPPTSPGHVCGLQL

SEQ ID NO: 292033 - protein, 902 aa, Artificial Sequence
  derived and/or modified sequence
MRIISRQIVLLFSGFWGLAMGAFPSSVQIGGLFIRNTDQEYTAFRLAIFLHNTSPNASEAPFNLVPHVDNIETANSFAVTNAFCSQYSRGVFAIFGLYDKRSVHTLTSFCSALHISLITPSFPTEGESQFVLQLRPSLRGALLSLLDHYEWNCFVFLYDTDRGYSILQAIMEKAGQNGWHVSAICVENFNDVSYRQLLEELDRRQEKKFVIDCEIERLQNILEQIVSVGKHVKGYHYIIANLGFKDISLERFIHGGANVTGFQLVDFNTPMVIKLMDRWKKLDQREYPGSETPPKYTSALTYDGVLVMAETFRSLRRQKIDISRRGNAGDCLANPAAPWGQGIDMERTLKQVRIQGLTGNVQFDHYGRRVNYTMDVFELKSTGPRKVGYWNDMDKLVLIQDVPTLGNDTAAIENRTVVVTTIMESPYVMYKKNHEMFEGNDKYEGYCVDLASEIAKHIGIKYKIAIVPDGKYGARDADTKIWNGMVGELVYGKAEIAIAPLTITLVREEVIDFSKPFMSLGISIMIKKPQKSKPGVFSFLDPLAYEIWMCIVFAYIGVSVVLFLVSRFSPYEWHTEEPEDGKEGPSDQPPNEFGIFNSLWFSLGAFMQQGCDISPRSLSGRIVGGVWWFFTLIIISSYTANLAAFLTVERMVSPIESAEDLAKQTEIAYGTLDSGSTKEFFRRSKIAVYEKMWTYMRSAEPSVFTRTTAEGVARVRKSKGKFAFLLESTMNEYIEQRKPCDTMKVGGNLDSKGYGVATPKGSSLRTPVNLAVLKLSEAGVLDKLKNKWWYDKGECGPKDSGSKDKTSALSLSNVAGVFYILVGGLGLAMLVALIEFCYKSRAEAKRMKLTFSEAIRNKARLSITGSVGENGRVLTPDCPKAVHTGTAIRQSSGLAVIASDLP

SEQ ID NO: 292034 - protein, 82 aa, Artificial Sequence
  derived and/or modified sequence
MRIISRQIVLLFSGFWGLAMGAFPSSVQIGGLFIRNTDQEYTAFRLAIFLHNTSPNASEAPFNLVPHVDNIETANSFAVTNA

SEQ ID NO: 292035 - DNA, 2709 bp, Artificial Sequence
  derived and/or modified sequence
atgcgcatcattagtcggcaaatcgtgttgctcttctcaggattttgggggctcgctatgggcgctttcccatccagtgttcaaatcggcggcctgttcatacggaatacagatcaggaatatactgcgtttaggttggccatatttctgcacaacacatctcccaacgcctctgaggcgcctttcaatctggtgccacacgtggataacatcgaaactgcgaattccttcgctgtaactaacgccttttgtagtcagtattctcgaggggtgtttgccatctttggactgtatgacaaacggtccgtccacactctgacgtcattttgtagcgccctgcatattagcctgataacgccctccttccctacagaaggggaatcgcagttcgtgctgcaactaagacccagcctcaggggtgctctgctcagcctgttagatcactacgagtggaactgtttcgtcttcctttacgacacagatcgagggtattctatccttcaggccatcatggaaaaagccggccagaatgggtggcacgtgtctgcaatctgtgtagaaaattttaacgacgtatcctatcggcagctcttagaagagctcgacagaagacaggaaaaaaagtttgtgattgactgcgagattgagaggcttcagaacattctcgagcagattgtgtccgtcggcaagcacgtgaagggttatcactatataatcgcaaacctcggtttcaaggacatctctttagaacggttcatccatggcggcgctaacgttactggatttcagcttgttgacttcaatacacccatggttattaaactgatggacagatggaaaaaacttgatcagagagagtacccagggtcagaaacacccccgaagtacacgtccgccctcacatacgatggggtgttggtcatggcggaaacattcagaagccttcggagacagaaaattgacatttctcgtaggggcaatgccggtgattgcttggcgaatcccgcagctccttggggtcaaggaattgacatggagagaactttaaaacaggtcagaattcaagggttaaccggcaacgtgcagttcgatcactacggtcgccgggttaactataccatggacgtgttcgaactgaagtctacaggcccccgaaaagtgggctactggaatgacatggacaaacttgttttgatccaggacgtccccaccctgggtaacgacactgcagctatcgagaacagaaccgtcgtggtcaccacaattatggaatccccgtacgtcatgtataagaagaatcacgaaatgtttgagggcaatgacaagtacgaaggctactgtgtggacctggcttcagaaattgccaagcacataggtattaaatacaaaatagccatcgtccctgacggtaaatacggcgcaagggatgccgataccaaaatttggaatggcatggttggggagctggtctatgggaaagctgaaattgctattgcgcctctgaccattacattggtgagggaagaagtcatcgacttttctaaaccatttatgagcctggggatctctattatgattaaaaagccacaaaagagcaagcctggtgtgttcagcttcctcgacccactggcctatgaaatttggatgtgtattgtctttgcgtacatcggagtctcggtcgttttattcctggtgtctcggttctccccgtacgagtggcacacagaagagcccgaggacggtaaggaggggccatccgatcaacctcccaacgagttcggtatctttaactctctgtggttctcactaggtgcattcatgcaacagggttgcgatatttcacccaggagtttgagtgggcggatcgtaggtggcgtctggtggtttttcactcttatcatcattagcagttacacggcaaatctggctgcgtttttgaccgtcgagaggatggtgtcacccatcgagtccgcagaggatctggcaaagcagaccgagatcgcttatggaactcttgatagtgggtctactaaggagttcttccggagatctaaaattgcagtgtacgagaaaatgtggacgtacatgagaagcgcggagccctctgtttttacaaggactacagcagaaggagtagctcgcgtgcggaagtctaaggggaagttcgctttcctgctggaaagcacaatgaatgagtacattgaacagaggaaaccctgtgataccatgaaggttggggggaatctcgactctaagggatatggagtggcgacgcccaaggggagcagtctccgcactccggttaatctggccgtcctgaagctgtccgaggcaggcgtgctagacaagctcaaaaacaaatggtggtacgataagggcgagtgcggacctaaagatagcggctcaaaggacaagacatccgcactgtcactgtcaaatgtggcgggagtcttttacattttagttgggggtttaggcttggccatgctggtggcactcattgagttctgttacaaatcaagagcggaggcaaaacgcatgaaactgacattctctgaggctattaggaataaggcaagactctcgatcactggctcggtgggcgaaaatggccgcgttttgacacccgactgtcccaaggccgtgcataccgggacggccattcgtcagtcctccggacttgctgtgatcgctagcgaccttccatag

SEQ ID NO: 292036 - DNA, 2709 bp, Artificial Sequence
  derived and/or modified sequence
atgagaattatctcacggcagatcgtgctcctcttttccggcttctgggggctggcaatgggggcctttccttcatcagttcagataggaggactctttattaggaatacagatcaggagtataccgccttccgactcgctatcttcttgcacaacacgtcgccgaacgcctctgaagcccctttcaatctggtcccccacgtggacaacatcgagactgcaaatagctttgctgtgacaaacgcgttttgcagccagtactcacggggagtgttcgcgatttttggcctgtatgataaaaggtctgtgcatactctgacatcgttttgtagcgctcttcacatctctctgattacaccatccttcccgacagaaggggaaagtcagttcgttctccaactcaggccaagcctaagaggggctctcttgagcctgttagatcactacgagtggaattgctttgtatttctctatgataccgacaggggctacagtattctacaagcgataatggagaaggctggccagaacggttggcacgtgagcgctatttgcgtagagaacttcaacgacgtgtcttacaggcaactgctcgaagaactcgatcggcgccaggagaaaaaattcgtgatcgactgtgagatagagaggctgcagaacattctcgaacagatcgtttcagtgggcaagcacgttaaaggttatcactacataattgcaaatttgggattcaaggacatttctcttgaacggtttattcatggcggcgccaatgtgacaggctttcaactggtggattttaacacccctatggttatcaagctcatggaccggtggaaaaagctcgaccagcgtgagtaccctggatccgagacacccccaaagtatacatctgcattgacctacgatggggtgttagtcatggccgagacttttcgatccctgaggagacagaagatagacatctccagacggggaaacgcaggcgactgtctggctaacccagcagccccctgggggcaggggatcgacatggaacgcaccctcaagcaagtgaggattcaggggttgaccggaaacgtccagtttgaccattacggccggcgagtaaattacaccatggacgtgttcgagctgaaatcgacgggccccagaaaggttgggtactggaacgacatggataagctcgttttaattcaggatgtccctaccctgggtaatgacacagccgcgatcgagaataggacagttgtggtgactaccatcatggaatccccatacgttatgtataaaaagaaccacgagatgttcgagggcaatgataagtacgaaggttactgtgtagacctggcttcggagatagccaaacatattggcataaagtataagattgccattgtgcctgatggcaagtatggtgcccgcgatgcagatacgaagatctggaacgggatggtgggcgaactggtctacggtaaggcagaaattgcaatcgctcccctgaccataaccctggttcgggaggaagtgatcgactttagcaagccattcatgtccctgggaatcagtattatgataaagaagcctcaaaagtccaagcccggagtattttcctttctggaccccctggcttatgagatctggatgtgtatagtctttgcctacattggcgtgtcagtggtgttgttcctggtgagccggttttcgccgtatgagtggcacactgaggaacctgaggacggtaaggagggtcccagtgaccagccacccaatgagttcggaatattcaattccctgtggttcagcttaggggcatttatgcagcaaggatgtgacatctctccccggtctctctccgggagaatcgtaggcggcgtgtggtggttctttaccctgatcatcatcagttcctacacagcgaacttagccgcctttctgaccgtagaaagaatggtatcaccaattgagtcagcagaggatctggccaagcagactgagatcgcctacggcactctggattctggtagcactaaagaattcttccggcgaagtaagatcgcagtgtacgagaagatgtggacttacatgcggtcagctgagccatccgtgtttacgcggactacagccgaaggggtcgccagagtaagaaagtccaaaggcaagtttgcttttctgcttgagtccaccatgaatgagtacattgagcaacggaagccctgcgacacaatgaaagtgggcggaaatctggactcgaagggatacggagtggctactcctaagggcagtagtctgcggacacctgtcaatttggccgtactcaagctgtcagaagccggtgtcctcgacaaactgaaaaataagtggtggtacgacaaaggcgaatgcggccctaaggactccgggtcaaaagacaagacatccgctttgtcactcagtaatgtggcaggtgtgttctatatccttgtgggcgggctgggactggcaatgctcgttgccctcatagagttctgctataagtccagagccgaagccaagaggatgaagctaacattctcggaggcaatcaggaataaggcccgacttagtataactggatccgtgggagagaacggaagagtcctcacgccggattgtcctaaggcagttcacacagggacggcaatacgccaaagctctgggctggcagttattgcatcagatctgccatag

SEQ ID NO: 292037 - DNA, 5508 bp, Artificial Sequence
  derived and/or modified sequence
agtggcagaagagggctaggctgagagggaagccaggactgtaggagagggaggcagcccgtcctcctcacgaacctgcaaggatgcggcaggggcctgggggcatggggaggtactaaccccccggagcccccgattggggcttgcagacctggcccgtgggcggattttctgcctagcgcagccgagaagcagaggtgccaggaaaaccaagagaggggcgctgggggtgcccatccccagagtcggtccctctgcgaaccgaggaagaaaagaggagggagtcagcgagtggtcagaagggaaaacctgacaccagactggctccggagcgtccgggagactggggcgctccgcgccatcgtcttcaatgcttctctgaacagcctttaggaagagtgcgagagaaagagagagagcgcgcgccagggagaggagaaaagaagatgaggattatttccagacagattgtcttgttattttctggattttggggactcgccatgggagcctttccgagcagcgtgcaaataggtggtctcttcatccgaaacacagatcaggaatacactgcttttcgattagcaatttttcttcataacaccagccccaatgcgtcggaagctccttttaatttggtacctcatgtggacaacattgagacagccaacagttttgctgtaacaaacgccttctgttcccagtattctagaggagtatttgccatttttggactctatgataagaggtcggtacataccttgacctcattctgcagcgccttacatatctccctcatcacaccaagtttccctactgagggggagagccagtttgtgctgcaactaagaccttcgttacgaggagcactcttgagtttgctggatcactacgaatggaactgttttgtcttcctgtatgacacagacaggggatactcgatactccaagctattatggaaaaagcaggacaaaatggttggcatgtcagcgctatatgtgtggaaaattttaatgatgtcagctataggcaacttctagaagaacttgacagaagacaagagaagaagtttgtaatagactgtgagatagagagacttcaaaacatattagaacagattgtaagtgttggaaagcatgttaaaggctaccattatatcattgcaaacttgggattcaaggatatttctcttgagaggtttatacatggtggagccaatgttactggattccagttggtggattttaatacacctatggtaatcaaactaatggatcgctggaagaaactagatcagagagagtatccaggatctgagactcctccaaagtacacctctgctctgacttatgatggagtccttgtgatggctgaaactttccgaagtcttaggaggcagaaaattgatatctcaaggagaggaaatgctggggattgtctggcaaatcctgctgctccatggggccagggaattgacatggagaggacactcaaacaggttcgaattcaagggctgacagggaatgttcagtttgaccactatggacgtagagtcaattacacaatggatgtgtttgagctgaaaagcacaggacctagaaaggttggttactggaatgatatggataagttagtcttgattcaagatgtaccaactcttggcaatgacacagctgctattgagaacagaacagtggttgtaaccacaattatggaatccccatatgttatgtacaagaaaaatcatgaaatgtttgaaggaaatgacaagtatgaaggatactgtgtagatttggcatctgaaattgcaaaacatattggtatcaagtataaaattgccattgtccctgatggaaaatatggagcaagggatgcagacacaaaaatctggaatgggatggtaggagaacttgtttatgggaaagcagagattgctattgcccctctgacaatcactttggtacgagaggaggtcattgacttttctaagcccttcatgagtttgggcatatctatcatgatcaaaaagcctcagaaatccaaaccaggagtgttttccttcttggatcctctggcctatgagatttggatgtgcatagtctttgcctacattggtgtcagcgtggtcttattcctagttagtagatttagtccatatgagtggcacacagaagagccagaggacggaaaggaaggacccagcgaccagcctcccaatgagtttggcatctttaacagcctctggttttccctgggtgcttttatgcagcaaggatgtgacatttcacccagatccctctcaggtcgaattgttggaggtgtttggtggttctttacactcatcattatatcatcttatactgctaacctcgctgctttcctgacggttgagcgaatggtctctcccatagaaagtgcagaagacctggccaaacaaacagaaattgcctatggaacactggattcaggatcaacaaaagaattcttcagaagatcaaaaatagcagtgtatgaaaagatgtggacctacatgcgatcagcagagccatcagtattcactaggactacagctgagggagtagctcgtgtccgcaaatccaagggcaaatttgcctttctcctggagtccactatgaatgaatacattgagcagcgaaagccatgtgacacgatgaaagtgggaggaaatctggattccaaaggctatggagtagcaacgcccaagggttcctcattaagaactcctgtaaaccttgccgttttgaaactcagtgaggcaggcgtcttagacaagctgaaaaacaaatggtggtacgataaaggtgaatgtggacccaaggactctggaagcaaggacaagacgagtgccttgagcctgagcaatgtagcaggcgtcttctacattctggttggcggcttgggcttggcaatgctggtggctttgatagagttctgttacaagtccagggcagaagcgaagagaatgaagctgaccttttctgaagccataagaaacaaagccagattatccatcactgggagtgtgggagagaatggccgcgtcttgacgcctgactgcccaaaggctgtacacactggaactgcaatcagacaaagttcaggattggctgtcattgcatcggacctaccataaaaaccaaaaaaataattgagtgccttaattaaactgttggtgactggtggaaacgcagccctgagggacacgccacgcgcgggtctttgctaaaccaatcctttggctgagagcgggaagtccgtcctaacgcgctggccggacatcagcagcagcaacgtgtgcatgagctcagctcggaaacccaaactcagattttatatcaggaaaactcacaattgaggtttttttcggggagtgggtgggggagggatctgggatgggtgtattaacagcaacaaatttcattcgagtggactcaaaaactaatcagacttatgagttagcgcattaaactgtgaagttcttgctcagaaaggcctttgtcttcaccggaaaggataaaatagttgtagaagtccgtgaacatgctaacctgtgtctccagaacatccatatagtccatggaagaaaatccagctgagaaaacaaatcactaaactgtgataagaaaataatgaacaaacatgtaaaacctgtgggaaaaaaaaataaaggaagtatgtacacttactttggagaaaacaaatactgaaacatgcttgctttttaactgacgtaaattcagtagaggacaacacaattcttttttctaaccatcttagggaacaatacattgcaataattgatataaatgccatcactgtaataaactttagagacttttttttataaaagttgttggtcatcttcttgtttgctgtaaccttcactatgtcacatgagtcgattcaccgattgcatttgtctcacaaccaggaagaaaagcaaaaggaagaaaacgtttaggttcaatcatcagtctgcggtgtagactcgaaagagatgacaggtcactcatgttaatggtattatttataatctcattctgtgtacaacattgtggtttttgtacccaccaaaaagaataaaacagcagatgttcttacaatatctacagagcttaaaagttttttcttatcgttataaaagttatttgagaaattataagactataagagagattgtattagtggtgggccatagtggaaaatgtagctagccctcattattttttgcatactaagctacccctccttttcagatctttgactcattaacagattaaactgtcaaagatggagtctttgagttggggaatgaatcactgtcctaacaacaacataccttgtaattgtgtgttgaaattttacttgactgtattttgctgcataaaattatgtgtctcttgggcttcttcccttattcctattgttccctttaaatcatatgaaggcattcataatagcttggggtagataacaaatgaagaattagtctttgttttcaactggaaattgtaaagaaaattatactcatgtttatttataaaaatcaccttatgtatgaattaaactaacatggttcaaaagaaggtttggttcatttgaaataataaataagtactctaatacagataaaaatcatgtacttagggtattggcagaaagcacaagttaggatgatttcagaagtctggccttgaaggatgagttgagttttaacaggaggagaaggtgttaagagccatatgagtgagcagtggcccaaagccatgcacatcagtggctcatttaaggaatgaatgccattagatgggctactgagagtacagggatattatggaagataaagttggaaaagctgaaggattgattttcttccatcaactctcaagatcccattcgccattcaatctctgtgctgcagtaagagcaatcttaaacagtataaatcacacacacacacacacacacacacacacacacacacaagtccctcaggaaaaattccaagctcttgagaagatcacatgagccccttcatgacctggcgcttgcttatttcttccaggacttctctcacttctatccagctattcccgtcagcaaatgaacctccaaagcagcacatggagcactgcatagactatttcctcagtgcgtaactcctccctgtctcctctttacctgagtaacttgtactcatccttcaatactccaactgaattttacttaccctgaaaagatttccatggctatccaccacccccctgcctgtgagactgagttaggtgccctttttcatgtctttcccccatcacggcacttaccatactgcgttgtaattgcctgtgtactcgtctgtataactactagactgtaagctccttgagggcagggactgtgtctatcttgttcacagttgtatccccagcacccagcacagtgcctggcatattgtaggtgcttaataaatatttgttgaatgaatg

SEQ ID NO: 292038 - DNA, 5059 bp, Artificial Sequence
  derived and/or modified sequence
atgaggattatttccagacagattgtcttgttattttctggattttggggactcgccatgggagcctttccgagcagcgtgcaaataggtggtctcttcatccgaaacacagatcaggaatacactgcttttcgattagcaatttttcttcataacaccagccccaatgcgtcggaagctccttttaatttggtacctcatgtggacaacattgagacagccaacagttttgctgtaacaaacgccttctgttcccagtattctagaggagtatttgccatttttggactctatgataagaggtcggtacataccttgacctcattctgcagcgccttacatatctccctcatcacaccaagtttccctactgagggggagagccagtttgtgctgcaactaagaccttcgttacgaggagcactcttgagtttgctggatcactacgaatggaactgttttgtcttcctgtatgacacagacaggggatactcgatactccaagctattatggaaaaagcaggacaaaatggttggcatgtcagcgctatatgtgtggaaaattttaatgatgtcagctataggcaacttctagaagaacttgacagaagacaagagaagaagtttgtaatagactgtgagatagagagacttcaaaacatattagaacagattgtaagtgttggaaagcatgttaaaggctaccattatatcattgcaaacttgggattcaaggatatttctcttgagaggtttatacatggtggagccaatgttactggattccagttggtggattttaatacacctatggtaatcaaactaatggatcgctggaagaaactagatcagagagagtatccaggatctgagactcctccaaagtacacctctgctctgacttatgatggagtccttgtgatggctgaaactttccgaagtcttaggaggcagaaaattgatatctcaaggagaggaaatgctggggattgtctggcaaatcctgctgctccatggggccagggaattgacatggagaggacactcaaacaggttcgaattcaagggctgacagggaatgttcagtttgaccactatggacgtagagtcaattacacaatggatgtgtttgagctgaaaagcacaggacctagaaaggttggttactggaatgatatggataagttagtcttgattcaagatgtaccaactcttggcaatgacacagctgctattgagaacagaacagtggttgtaaccacaattatggaatccccatatgttatgtacaagaaaaatcatgaaatgtttgaaggaaatgacaagtatgaaggatactgtgtagatttggcatctgaaattgcaaaacatattggtatcaagtataaaattgccattgtccctgatggaaaatatggagcaagggatgcagacacaaaaatctggaatgggatggtaggagaacttgtttatgggaaagcagagattgctattgcccctctgacaatcactttggtacgagaggaggtcattgacttttctaagcccttcatgagtttgggcatatctatcatgatcaaaaagcctcagaaatccaaaccaggagtgttttccttcttggatcctctggcctatgagatttggatgtgcatagtctttgcctacattggtgtcagcgtggtcttattcctagttagtagatttagtccatatgagtggcacacagaagagccagaggacggaaaggaaggacccagcgaccagcctcccaatgagtttggcatctttaacagcctctggttttccctgggtgcttttatgcagcaaggatgtgacatttcacccagatccctctcaggtcgaattgttggaggtgtttggtggttctttacactcatcattatatcatcttatactgctaacctcgctgctttcctgacggttgagcgaatggtctctcccatagaaagtgcagaagacctggccaaacaaacagaaattgcctatggaacactggattcaggatcaacaaaagaattcttcagaagatcaaaaatagcagtgtatgaaaagatgtggacctacatgcgatcagcagagccatcagtattcactaggactacagctgagggagtagctcgtgtccgcaaatccaagggcaaatttgcctttctcctggagtccactatgaatgaatacattgagcagcgaaagccatgtgacacgatgaaagtgggaggaaatctggattccaaaggctatggagtagcaacgcccaagggttcctcattaagaactcctgtaaaccttgccgttttgaaactcagtgaggcaggcgtcttagacaagctgaaaaacaaatggtggtacgataaaggtgaatgtggacccaaggactctggaagcaaggacaagacgagtgccttgagcctgagcaatgtagcaggcgtcttctacattctggttggcggcttgggcttggcaatgctggtggctttgatagagttctgttacaagtccagggcagaagcgaagagaatgaagctgaccttttctgaagccataagaaacaaagccagattatccatcactgggagtgtgggagagaatggccgcgtcttgacgcctgactgcccaaaggctgtacacactggaactgcaatcagacaaagttcaggattggctgtcattgcatcggacctaccataaaaaccaaaaaaataattgagtgccttaattaaactgttggtgactggtggaaacgcagccctgagggacacgccacgcgcgggtctttgctaaaccaatcctttggctgagagcgggaagtccgtcctaacgcgctggccggacatcagcagcagcaacgtgtgcatgagctcagctcggaaacccaaactcagattttatatcaggaaaactcacaattgaggtttttttcggggagtgggtgggggagggatctgggatgggtgtattaacagcaacaaatttcattcgagtggactcaaaaactaatcagacttatgagttagcgcattaaactgtgaagttcttgctcagaaaggcctttgtcttcaccggaaaggataaaatagttgtagaagtccgtgaacatgctaacctgtgtctccagaacatccatatagtccatggaagaaaatccagctgagaaaacaaatcactaaactgtgataagaaaataatgaacaaacatgtaaaacctgtgggaaaaaaaaataaaggaagtatgtacacttactttggagaaaacaaatactgaaacatgcttgctttttaactgacgtaaattcagtagaggacaacacaattcttttttctaaccatcttagggaacaatacattgcaataattgatataaatgccatcactgtaataaactttagagacttttttttataaaagttgttggtcatcttcttgtttgctgtaaccttcactatgtcacatgagtcgattcaccgattgcatttgtctcacaaccaggaagaaaagcaaaaggaagaaaacgtttaggttcaatcatcagtctgcggtgtagactcgaaagagatgacaggtcactcatgttaatggtattatttataatctcattctgtgtacaacattgtggtttttgtacccaccaaaaagaataaaacagcagatgttcttacaatatctacagagcttaaaagttttttcttatcgttataaaagttatttgagaaattataagactataagagagattgtattagtggtgggccatagtggaaaatgtagctagccctcattattttttgcatactaagctacccctccttttcagatctttgactcattaacagattaaactgtcaaagatggagtctttgagttggggaatgaatcactgtcctaacaacaacataccttgtaattgtgtgttgaaattttacttgactgtattttgctgcataaaattatgtgtctcttgggcttcttcccttattcctattgttccctttaaatcatatgaaggcattcataatagcttggggtagataacaaatgaagaattagtctttgttttcaactggaaattgtaaagaaaattatactcatgtttatttataaaaatcaccttatgtatgaattaaactaacatggttcaaaagaaggtttggttcatttgaaataataaataagtactctaatacagataaaaatcatgtacttagggtattggcagaaagcacaagttaggatgatttcagaagtctggccttgaaggatgagttgagttttaacaggaggagaaggtgttaagagccatatgagtgagcagtggcccaaagccatgcacatcagtggctcatttaaggaatgaatgccattagatgggctactgagagtacagggatattatggaagataaagttggaaaagctgaaggattgattttcttccatcaactctcaagatcccattcgccattcaatctctgtgctgcagtaagagcaatcttaaacagtataaatcacacacacacacacacacacacacacacacacacacaagtccctcaggaaaaattccaagctcttgagaagatcacatgagccccttcatgacctggcgcttgcttatttcttccaggacttctctcacttctatccagctattcccgtcagcaaatgaacctccaaagcagcacatggagcactgcatagactatttcctcagtgcgtaactcctccctgtctcctctttacctgagtaacttgtactcatccttcaatactccaactgaattttacttaccctgaaaagatttccatggctatccaccacccccctgcctgtgagactgagttaggtgccctttttcatgtctttcccccatcacggcacttaccatactgcgttgtaattgcctgtgtactcgtctgtataactactagactgtaagctccttgagggcagggactgtgtctatcttgttcacagttgtatccccagcacccagcacagtgcctggcatattgtaggtgcttaataaatatttgttgaatga

SEQ ID NO: 292039 - DNA, 2709 bp, Artificial Sequence
  derived and/or modified sequence
atgaggatcatcagccggcagatcgtgctgctcttcagcggcttctggggcctggccatgggcgccttccccagctctgtgcagattggaggcctcttcatccggaacacagaccaggagtacacagccttccggctggccatcttcctgcacaacaccagccccaatgccagcgaggcccccttcaacctggtgccccacgtggacaacattgaaacagccaacagctttgctgtgaccaatgccttctgcagccagtacagccggggcgtgtttgccatcttcggcctgtatgacaagaggtctgtgcacaccctgaccagcttctgcagcgccctgcacatcagcctcatcacccccagcttccccacagaaggagagagccagtttgtgctgcagctgcggcccagcctgcggggggccctgctgagcctgctggaccactatgagtggaactgctttgtgttcctgtatgacacagaccggggctacagcatcctgcaggccatcatggagaaggccggccagaatggctggcacgtgtctgccatctgtgtggagaacttcaatgatgtgtcctaccggcagctgctggaggagctggaccggcggcaggagaagaagtttgtgattgactgtgaaattgagcggctgcagaacatcctggagcagatcgtgtctgtgggcaagcacgtgaagggctaccactacatcatcgccaacctgggcttcaaggacatcagcctggagcgcttcatccacggcggggccaacgtgacaggcttccagctggtggacttcaacacccccatggtgatcaagctgatggaccgctggaagaagctggaccagcgggagtacccaggcagcgagaccccacccaagtacaccagcgccctgacctatgatggagtgctggtgatggccgagaccttccgcagcctgcggcggcagaagattgacatcagcagaagaggaaatgctggggactgcctggccaacccagctgccccctggggccagggcatcgacatggagaggaccctgaagcaggtgcgcatccagggcctgactggaaatgtgcagtttgaccactacggccggcgggtgaactacaccatggatgtgtttgagctgaagagcacaggccccaggaaggtgggctactggaatgacatggacaagctggtgctgatccaggatgtgcccaccctgggcaatgacacagctgccattgaaaatagaacagtggtggtgaccaccatcatggagagcccctacgtgatgtacaagaagaaccacgagatgtttgagggcaatgacaagtatgagggctactgtgtggacctggccagcgagatcgccaagcacatcggcatcaagtacaagatcgccatcgtgcctgatggcaagtacggggccagagatgctgacaccaagatctggaatggcatggtgggggagctggtgtatggcaaggccgagatcgccatcgcccccctgaccatcaccctggtgcgggaggaggtgattgacttcagcaagcccttcatgagcctgggcatcagcatcatgatcaagaagccccagaagagcaagccaggagtcttctccttcctggaccccctggcctatgagatctggatgtgcatcgtgtttgcctacatcggcgtgtctgtggtgctcttcctggtgagccgcttcagcccctatgagtggcacacagaggagccagaagatggcaaggagggccccagcgaccagcccccaaatgaatttggcatcttcaacagcctgtggttcagcctgggcgccttcatgcagcagggctgtgacatcagccccaggagcctgagcggccgcatcgtgggcggcgtgtggtggttcttcaccctcatcatcatcagcagctacacagccaacctggccgccttcctgactgtggagaggatggtgagccccattgaatctgctgaggacctggccaagcagacagaaattgcctacggcaccctggacagcggcagcaccaaggagttcttccgccgcagcaagattgctgtgtatgagaagatgtggacctacatgaggtctgctgagcccagcgtcttcaccaggaccacagctgagggcgtggcccgggtgaggaagagcaagggcaagtttgccttcctgctggagagcaccatgaatgagtacatcgagcagaggaagccctgtgacaccatgaaggtgggcggcaacctggacagcaagggctacggcgtggccacccccaagggcagcagcctgcggacccctgtgaacctggccgtgctgaagctgtctgaggccggcgtgctggacaagctgaagaacaagtggtggtatgacaagggggagtgtggccccaaggacagcggcagcaaggacaagaccagcgccctgagcctgagcaatgtggccggggtcttctacatcctggtgggcggcctgggcctggccatgctggtggccctgattgagttctgctacaagagcagagctgaggccaagaggatgaagctgaccttcagcgaggccatccggaacaaggcccggctgagcatcaccggctctgtgggagaaaatggccgggtgctgaccccagactgccccaaggctgtgcacactggaacagccatccggcagagcagcggcctggccgtgattgccagtgacctgccctag

SEQ ID NO: 292040 - DNA, 2709 bp, Artificial Sequence
  derived and/or modified sequence
atgcggatcatcagccggcagatcgtgctgctgttcagcggcttctggggattggcaatgggagcttttcctagctccgtgcagattgggggccttttcatcagaaataccgaccaggagtataccgcattcaggctggcaatcttcttgcacaatacatcgccaaacgccagtgaggcaccctttaaccttgtgccacatgtggataatatagaaactgctaacagcttcgccgtgacaaatgctttctgcagtcagtatagccggggtgtgttcgccatctttggcttgtatgacaagcgcagcgtgcacacactcacaagcttctgttcggcgctccacattagtctgatcaccccttcatttccaacggaaggtgaatcacagttcgtgctgcagttgcgcccgtccctgaggggagcgctgttgtccttactcgaccactacgaatggaactgcttcgtcttcttatacgataccgatagaggctacagtattctgcaggctatcatggaaaaagctgggcagaacgggtggcacgtgtctgccatatgcgtcgagaatttcaacgacgtgtcttataggcaacttctggaagaattagatcgcagacaggaaaagaagttcgttatcgactgtgaaatagaaaggctgcagaatattctggagcagatcgttagcgtgggaaaacacgttaagggatatcattatatcatcgccaacctgggttttaaggatatttccttggagaggttcatccacggtggggctaacgtgacggggtttcagttagttgatttcaatacacctatggtgataaagctgatggatagatggaagaagctcgaccagagggagtatccgggatcagagaccccccccaagtacacctcagctttaacgtacgacggtgtgctggtgatggccgaaacgtttcggagtctgaggaggcagaaaatcgatatctcacgtcgagggaatgccggggactgcctggcaaatccagcagccccgtgggggcagggaattgacatggagagaacattgaaacaagtgaggatccagggcttaacaggaaatgtgcagttcgatcattatggacgacgcgttaattacactatggacgtctttgaactgaagtctactgggccccgcaaagtgggatactggaacgacatggacaagcttgttttaatacaagatgtccccacattgggcaacgacaccgccgccattgaaaaccgcaccgtcgtggtgaccaccattatggagtctccttatgttatgtacaagaagaaccacgagatgtttgaaggtaacgataagtatgaggggtactgcgtggatttggcttccgaaatcgctaaacacattggaataaaatacaaaatcgcaatcgttccagacgggaagtacggcgctcgcgacgcagacactaagatatggaatgggatggtgggcgaattggtctacggcaaggccgagatagctatcgcccctctcactatcactctcgttagagaggaggtgattgatttttccaagccattcatgagcttggggatcagcattatgatcaagaaaccacaaaaatctaaaccaggggtgttctccttcctcgaccccctcgcctacgagatctggatgtgcatcgtgttcgcctacattggtgtgtccgtggtgcttttccttgtgagtaggttctccccttacgagtggcataccgaagaacccgaagacggaaaggaaggcccatccgaccagccccccaatgaatttgggatttttaactcactctggttttccctcggggctttcatgcaacaggggtgtgacatatccccacgaagcttgtcaggacgcatcgtgggtggagtatggtggtttttcactctcattataatctcctcctacacagctaatttagctgcttttctgaccgtggagagaatggtctcccccattgaaagtgctgaggacctggcaaagcagaccgaaattgcttacggcaccctcgatagtggaagcacgaaggagtttttcaggcgcagcaaaatcgctgtttacgagaagatgtggacttacatgaggtctgccgaaccatccgtgttcacccggaccacggctgagggagttgcaagagtccgcaagtccaaggggaagttcgcattccttttggaatcaaccatgaacgaatatattgaacagcggaaaccttgtgatacgatgaaagtaggcggcaacttagacagcaaaggctatggagtcgctacgcccaagggatcaagtctgaggactcccgttaatctggccgtgctgaagttgagcgaggccggggtgctggataagcttaaaaacaaatggtggtacgacaaaggagaatgtgggcccaaagattcaggaagcaaagataagacatccgcccttagtctgtccaacgtcgctggggtcttttacatactcgttggcgggctagggctcgctatgctggtggcattgatcgaattctgctataagtctagggctgaggccaagcggatgaaactcacttttagcgaagctattaggaacaaggcccggctgtccatcacaggtagtgtcggcgagaatggaagagtgctcaccccggactgtcctaaggctgtgcatacaggtaccgcaattcggcaatcaagcggcctagccgtaatcgcctcagacctgccttag

SEQ ID NO: 292041 - DNA, 2709 bp, Artificial Sequence
  derived and/or modified sequence
atgcggatcatcagccggcagatcgtgctgctgttcagcggcttctggggacttgccatgggcgctttccccagctcagtacagattggcggcctgttcattcgcaatactgaccaagagtacacagcctttaggctggccatattcttacataacacctctccaaacgcgagcgaggctccattcaacttggtgccacatgtggacaacatcgaaaccgcgaacagctttgccgtcactaatgccttttgctcccagtactccagaggggtcttcgccatattcgggctgtacgacaaacgctctgtgcacaccttaacgtctttttgctctgcattacatatcagcctcattactccatcgtttcctacggaaggagaatctcagtttgtcctgcagctccggccttcactacgtggcgcacttctcagcctcctggaccactacgaatggaactgttttgtttttctctacgacacagaccggggatactcaatcttgcaggcgataatggaaaaggctggtcaaaacggctggcacgtttccgctatttgcgttgaaaatttcaatgatgtgagttatcggcagctgctggaagagttagatagaaggcaagagaagaaattcgtaattgattgcgagattgaacgcctccaaaatatactcgagcagatcgtgtccgtaggcaagcacgttaaaggataccattacatcatagccaacctagggtttaaagatatctcccttgagcgctttattcacgggggggccaatgtgacgggattccaactggtcgacttcaacactccgatggtcatcaagctgatggatcgatggaagaagttggatcagagagagtatcctggtagcgagacaccccccaagtatacctccgcgctaacatacgacggtgtcctcgtcatggcagaaacctttcggtccctccgtaggcagaagatcgatatctcgcgccgcggaaacgcaggggattgtctcgcgaaccctgccgccccatgggggcagggcattgatatggaacgtaccctaaaacaagttaggatccagggcctcacaggaaatgtgcaattcgaccattatggacgcagggtgaattacaccatggatgtgtttgaactgaagtcgacgggcccgcggaaagtaggatactggaatgatatggataaactcgtgctcattcaggacgtgcccacccttgggaacgacacagcagctatagagaatcggactgtggtcgttaccacaatcatggagtccccctacgtaatgtacaagaagaatcacgagatgttcgagggcaacgacaagtatgagggatactgtgtggacttggcttcagaaatagctaaacacatcggcattaagtataagatcgccatcgtgccagatgggaagtacggtgctagagatgcagatactaagatctggaacggcatggtcggcgaattggtgtatggtaaagctgagatcgccattgcgcctctgaccattacccttgtgcgcgaagaagtgattgactttagtaagccttttatgtcgctgggcatctcaattatgatcaagaagcctcagaaatccaagccgggagttttcagcttcttggaccctcttgcttacgaaatctggatgtgcattgtcttcgcctatatcggggttagcgtggtgctttttcttgtgagtcggttttcgccatatgaatggcacacggaggaacccgaagacggaaaagaaggcccgtcagatcagcctcccaacgaatttggcatcttcaattctctgtggttcagcctgggagcctttatgcagcagggctgcgatatttccccccgtagcctgtctggaagaattgtgggcggtgtctggtggtttttcaccctcatcatcatcagcagttataccgccaatctggccgcatttttgaccgtagaaagaatggtgagtccaatcgaatcagccgaagatttagccaagcagacagagatcgcatatggaactctggactcagggtctacaaaagagtttttcagacgcagtaagattgccgtgtacgaaaaaatgtggacttacatgcggtctgccgaaccgagcgtgttcaccaggaccacagccgaaggggtggcgagagttcgaaagtccaaaggcaaattcgcattcctcctggaatccaccatgaatgaatatattgagcagcgcaagccttgtgatacaatgaaggtgggcggcaacttggactccaagggttacggcgtcgccacaccgaagggcagtagtctgaggacgcctgttaacctcgcagttctcaagctctcggaggccggcgtgctggataagttgaaaaacaagtggtggtacgataaaggggagtgcggtcctaaagactctgggtcaaaggataaaactagcgctcttagtctttcaaatgttgccggggtattctacatactggtgggtggcctcgggctagcaatgctggtggcccttatagaattttgctataagagcagggcggaggcgaaacgaatgaagcttacattttcggaggccatcaggaataaggcacggttgtcgattaccggatcagtgggtgagaacggtagagtcctgacgcccgactgcccgaaggcagtccatactggcaccgccatcagacaaagttcaggcctcgctgtcatcgcatctgatctcccatag

SEQ ID NO: 292042 - DNA, 2709 bp, Artificial Sequence
  derived and/or modified sequence
atgcgcataatttcccgacagatcgtcctcctgttcagtggtttttggggcctcgccatgggggcattcccctccagtgtccagattggtggcctgttcatcaggaacactgaccaagaatacactgcatttaggttggctatttttctccataataccagtcctaacgccagcgaggccccatttaacttggtccctcacgtggacaacatcgagacagcaaacagcttcgccgtcaccaacgcgttttgttctcagtacagtcggggtgtgttcgcgatatttgggctgtacgataaacggagtgtgcatacactcacaagcttctgtagtgccttacacatttccctgattactccttcgttccccaccgagggcgagagccagttcgtgcttcagctgaggccctctttacgaggagctctgctttcacttctggaccactatgagtggaattgctttgtgtttctgtatgacacagacaggggttactctatcctccaggcaatcatggagaaggcaggccagaacggatggcatgtgtcagcaatctgcgtggaaaacttcaacgacgtgagttatcgacaattgctggaagagctcgaccggagacaggaaaaaaagttcgtgatcgactgtgagatcgagcggctgcagaatatcctggaacagattgtgtcagtgggcaaacatgtgaaaggataccattatatcatagctaacttaggatttaaggatatcagtctcgagagatttatccacggaggcgcaaacgtaactggctttcagttggtcgacttcaatacaccaatggttatcaaactgatggatcgctggaaaaaactggaccaacgcgagtatcctgggtcagagactcccccaaagtacacctccgctctgacctatgacggcgttctggtgatggcagagacctttcggagtctcaggagacagaaaatcgatatctctagacgcggaaacgcaggcgactgtttagcaaatccagccgctccctggggccagggtatagacatggagaggacgctcaagcaggtcaggatccaggggttgacagggaacgttcaatttgaccactacggacgcagagtgaattatactatggatgtgttcgagctgaaatccacaggaccaagaaaggtcggctattggaatgatatggacaagctggtcctcatccaggatgtgcccactttaggaaatgacacggccgcaattgaaaacagaacagtggtcgttactacaatcatggaatccccatacgtcatgtataaaaagaaccacgagatgtttgaaggcaacgacaagtatgaaggctactgcgttgatctggcaagtgagatcgccaagcatataggaatcaagtataagattgctatcgtgcctgatgggaaatatggagccagggatgcagatacaaagatatggaacgggatggtgggtgagctggtctacggaaaggctgagatagcaattgcgccacttaccatcaccctggttcgagaggaggtgattgacttttctaaacctttcatgtcactgggcatttcaatcatgatcaagaaacctcagaagagtaaacccggtgtgttctcctttctcgaccctctcgcttacgaaatctggatgtgcattgtcttcgcttacatcggggtgagtgtggtgttatttctcgtgtcgcgattctccccttacgagtggcatacggaggagcctgaggatggaaaggagggcccatcggatcagcccccaaacgaattcggaatattcaattctctgtggttttcactgggcgcatttatgcaacaagggtgcgacatttcaccgaggtctttgagtgggcgaattgttggcggagtctggtggtttttcactctcataattatctcatcctacactgcaaacttggctgcgttcttaacagttgaaaggatggtgagccccattgagtcagccgaggaccttgccaagcagactgagattgcatatggaactctggattctggaagtactaaagagttctttcggagatccaagatcgcagtttacgaaaagatgtggacttacatgaggtcagcagaaccctctgtgtttacacgcaccacagctgaaggcgttgcacgggtgcggaagtccaaggggaagttcgccttccttctggagtcaacaatgaacgaatatattgagcagcggaagccttgtgacacaatgaaagtgggaggtaacctggacagcaaaggctatggagttgccactcccaaaggctcgtctttacggactcccgtgaatctggcagtgctaaagctctctgaagctggcgtgctagataaacttaagaataagtggtggtacgacaaaggcgaatgcgggcctaaggattctggttccaaagacaaaaccagcgccctgtccctctccaacgtggctggcgtcttctacatcttagtgggcggactagggctggccatgcttgttgccctcatcgagttctgctataaatcacgcgctgaagcgaaaagaatgaaactgacctttagtgaggcgatcagaaacaaggccagacttagtatcacagggagcgtaggagagaatgggcgagtcctgacacctgactgcccaaaggccgtgcatacaggaacggctattcgccagagttctggcttagcggtcatagcatccgacctgccctag

SEQ ID NO: 292043 - DNA, 2709 bp, Artificial Sequence
  derived and/or modified sequence
atgcgtataatctcccgccagatcgtcctgttgttctctgggttttggggcctggctatgggagccttcccaagctcagtgcaaatcggcggtctctttattcggaatacggatcaagagtatacagcctttcgcctggctatctttttacacaacacaagccccaacgcttctgaagctccatttaacctggtgcctcatgtcgacaacatcgaaactgccaatagttttgccgtaaccaatgccttctgcagtcagtactcaagaggagtgttcgcgatcttcggactttacgacaaaaggtctgtccatacactgacctccttctgtagcgccctgcatattagtttgatcaccccctcatttcccaccgaaggcgaatctcagtttgttctgcagctcagacctagtctcagaggcgctttactgagcctcttggaccactatgagtggaactgcttcgtgttcctctacgatacagatagaggatacagcatccttcaggcaatcatggagaaagctggccagaacggctggcacgtgagcgcaatatgtgtggagaatttcaatgatgtgtcataccggcagcttctggaggagctcgacagaaggcaggagaagaagttcgtgattgactgcgaaatagaacgcctgcagaatattctagagcaaatagtcagcgttggaaaacatgtgaaaggataccattacatcatagcgaacctcgggttcaaagatatttctctggagcgcttcatacatggtggggctaatgtgaccgggtttcagcttgtggatttcaacactccgatggtcatcaagttaatggatcggtggaagaaactggaccagcgggagtaccctggtagtgagactccccctaagtataccagtgctctgacctacgacggggtgctggtcatggcggaaacctttcgcagcttgagaagacaaaagattgatatctctagacgaggtaatgcaggagactgtctggccaatcccgctgcaccctggggacagggaattgacatggaaagaaccctgaagcaggtccgcatccagggactgacaggaaacgtgcagttcgaccattacgggcgacgtgttaattatacaatggacgtgttcgaattaaaatcaacgggaccaaggaaagtggggtattggaatgatatggataagcttgtcctcatacaggatgtccccaccttaggcaatgatactgcggctatcgaaaaccgcaccgtggtggtgactaccattatggagtccccttacgtgatgtataagaaaaaccacgagatgttcgagggaaatgacaaatacgaaggatattgcgtggatctggcctccgaaatagcaaaacatatcggcattaagtacaaaatcgccattgtccccgatggtaagtatggggcaagggatgccgacacaaaaatctggaatggaatggtcggtgagctcgtgtacggtaaagctgaaattgcaatagccccactgactataactctcgtcagagaggaggtgatcgactttagcaagcccttcatgagcctcggaatttccatcatgatcaaaaaaccacagaaatctaagcctggagtcttttcttttttggaccctttagcttacgagatttggatgtgtatcgtgtttgcttatatcggtgtcagcgtcgttctgttcctagtgagtagattctccccttacgaatggcacaccgaggagcccgaggacggcaaggaaggccctagtgatcagcccccaaatgagttcggtatcttcaatagcctgtggttctctcttggcgctttcatgcagcagggctgtgatattagcccccgatcattgtccgggagaatcgtgggaggggtttggtggtttttcaccctgataatcatctcctcatacaccgccaacctcgcagccttcctgacagtggaaaggatggtttctccaatcgaatctgccgaagacctggcaaagcagacagagatagcctatggcacgctcgacagtggaagtacgaaggaatttttccggcgtagcaaaattgctgtctatgaaaagatgtggacctacatgagaagcgccgagccgagcgtttttacgaggacaactgccgagggggttgccagggtccgtaagagcaagggcaaattcgccttcttgttagagtcgaccatgaacgagtacatcgaacaaaggaaaccctgcgacaccatgaaagtagggggaaatctggattccaaaggctacggcgtagccacaccaaaaggctctagcctgcgaacccccgttaacctggcagtcctgaaattgtcggaggccggtgtgctggacaagttgaaaaataagtggtggtatgataagggagagtgcggccctaaggactccggcagtaaggataagaccagtgcgctatcactctctaacgtagccggagttttctacattctggtgggtggcctgggactggcgatgctggtcgccctcatcgaattttgttacaagtcacgcgctgaagccaagcgcatgaagctgacctttagcgaggctattcgcaacaaggccaggctctccatcacgggctcggtcggcgaaaacggaagagtgttgacgccagattgccccaaagccgtgcacaccggaacagctattcgccaatccagcggccttgccgtgattgcgtcagacctgccctag

SEQ ID NO: 292044 - DNA, 2709 bp, Artificial Sequence
  derived and/or modified sequence
atgagaatcatcagcagacagatcgtgctgctgttcagcggcttctggggcctggccatgggcgccttccccagcagcgtgcagatcggcggcctgttcatcagaaacaccgaccaggagtacaccgccttcagactggccatcttcctgcacaacaccagccccaacgccagcgaggcccccttcaacctggtgccccacgtggacaacatcgagaccgccaacagcttcgccgtgaccaacgccttctgcagccagtacagcagaggcgtgttcgccatcttcggcctgtacgacaagagaagcgtgcacaccctgaccagcttctgcagcgccctgcacatcagcctgatcacccccagcttccccaccgagggcgagagccagttcgtgctgcagctgagacccagcctgagaggcgccctgctgagcctgctggaccactacgagtggaactgcttcgtgttcctgtacgacaccgacagaggctacagcatcctgcaggccatcatggagaaggccggccagaacggctggcacgtgagcgccatctgcgtggagaacttcaacgacgtgagctacagacagctgctggaggagctggacagaagacaggagaagaagttcgtgatcgactgcgagatcgagagactgcagaacatcctggagcagatcgtgagcgtgggcaagcacgtgaagggctaccactacatcatcgccaacctgggcttcaaggacatcagcctggagagattcatccacggcggcgccaacgtgaccggcttccagctggtggacttcaacacccccatggtgatcaagctgatggacagatggaagaagctggaccagagagagtaccccggcagcgagaccccccccaagtacaccagcgccctgacctacgacggcgtgctggtgatggccgagaccttcagaagcctgagaagacagaagatcgacatcagcagaagaggcaacgccggcgactgcctggccaaccccgccgccccctggggccagggcatcgacatggagagaaccctgaagcaggtgagaatccagggcctgaccggcaacgtgcagttcgaccactacggcagaagagtgaactacaccatggacgtgttcgagctgaagagcaccggccccagaaaggtgggctactggaacgacatggacaagctggtgctgatccaggacgtgcccaccctgggcaacgacaccgccgccatcgagaacagaaccgtggtggtgaccaccatcatggagagcccctacgtgatgtacaagaagaaccacgagatgttcgagggcaacgacaagtacgagggctactgcgtggacctggccagcgagatcgccaagcacatcggcatcaagtacaagatcgccatcgtgcccgacggcaagtacggcgccagagacgccgacaccaagatctggaacggcatggtgggcgagctggtgtacggcaaggccgagatcgccatcgcccccctgaccatcaccctggtgagagaggaggtgatcgacttcagcaagcccttcatgagcctgggcatcagcatcatgatcaagaagccccagaagagcaagcccggcgtgttcagcttcctggaccccctggcctacgagatctggatgtgcatcgtgttcgcctacatcggcgtgagcgtggtgctgttcctggtgagcagattcagcccctacgagtggcacaccgaggagcccgaggacggcaaggagggccccagcgaccagccccccaacgagttcggcatcttcaacagcctgtggttcagcctgggcgccttcatgcagcagggctgcgacatcagccccagaagcctgagcggcagaatcgtgggcggcgtgtggtggttcttcaccctgatcatcatcagcagctacaccgccaacctggccgccttcctgaccgtggagagaatggtgagccccatcgagagcgccgaggacctggccaagcagaccgagatcgcctacggcaccctggacagcggcagcaccaaggagttcttcagaagaagcaagatcgccgtgtacgagaagatgtggacctacatgagaagcgccgagcccagcgtgttcaccagaaccaccgccgagggcgtggccagagtgagaaagagcaagggcaagttcgccttcctgctggagagcaccatgaacgagtacatcgagcagagaaagccctgcgacaccatgaaggtgggcggcaacctggacagcaagggctacggcgtggccacccccaagggcagcagcctgagaacccccgtgaacctggccgtgctgaagctgagcgaggccggcgtgctggacaagctgaagaacaagtggtggtacgacaagggcgagtgcggccccaaggacagcggcagcaaggacaagaccagcgccctgagcctgagcaacgtggccggcgtgttctacatcctggtgggcggcctgggcctggccatgctggtggccctgatcgagttctgctacaagagcagagccgaggccaagagaatgaagctgaccttcagcgaggccatcagaaacaaggccagactgagcatcaccggcagcgtgggcgagaacggcagagtgctgacccccgactgccccaaggccgtgcacaccggcaccgccatcagacagagcagcggcctggccgtgatcgccagcgacctgccctag

SEQ ID NO: 292045 - DNA, 336 bp, Artificial Sequence
  derived and/or modified sequence
gacttcaaggatgagcagtttttagggtttgggtctgatgaggaggttcgggtcagaagccccactagaagtccttccggcagtatgctagcacaagcagataagttacctatgaccgataagcgtgtggcgtctcttctgaaaaaggccaaggcacagctttgcaagatcgagaagtcaaaatcgttaaagcagacagaccagccaaaagcacagggtcaggaatccgacagctctgagacttccgttcgaggtccacgcatcaaacacgtgtgtaggagagccgccgtcgcattggggcggaagcgggccgtgttccccgatgacatgccctag

SEQ ID NO: 292046 - DNA, 336 bp, Artificial Sequence
  derived and/or modified sequence
gacttcaaggatgagcagttcctgggcttcggcagtgatgaggaggtgcgggtgcgcagccccaccaggagccccagcggctccatgctggcccaggccgacaagctgcccatgacagacaagagggtggccagcctgctgaagaaggccaaggcccagctgtgcaagattgagaagagcaagagcctgaagcagacagaccagcccaaggcccagggccaggagagtgacagcagcgagacctctgtgcggggcccccgcatcaagcacgtgtgcagaagagctgctgtggccctgggcaggaagagagctgtgtttcctgatgacatgccctag

SEQ ID NO: 292047 - DNA, 684 bp, Artificial Sequence
  derived and/or modified sequence
gattttaaagatgagcaattcttaggttttggctcagatgaagaagtcagagtgcgaagtcccacaaggtctccttcaggctccatgttggctcaggcagacaagcttccaatgactgacaagagggttgccagcctcctaaaaaaggccaaagctcagctctgcaagattgagaagagtaagagtcttaaacaaaccgaccagcccaaagcacagggtcaagaaagtgactcatcagagacctctgtgcgaggaccccggattaaacatgtctgcagaagagcagctgttgcccttggccgaaaacgagctgtgtttcctgatgacatgcccaccctgagtgccttaccatgggaagaacgagaaaagattttgtcttccatggggaatgatgacaagtcatcaattgctggctcagaagatgctgaacctcttgctccacccatcaaaccaattaaacctgtcactagaaacaaggcaccccaggaacctccagtaaagaaaggacgtcgatcgaggcggtgtgggcagtgtcccggctgccaggtgcctgaggactgtggtgtttgtactaattgcttagataagcccaagtttggtggtcgcaatataaagaagcagtgctgcaagatgagaaaatgtcagaatctacaatggatgccttccaaagcctacctgcagaag

SEQ ID NO: 292048 - DNA, 336 bp, Artificial Sequence
  derived and/or modified sequence
gacttcaaggacgagcagttcctgggcttcggcagcgacgaggaggtaagagtaaggagccctaccagaagtccgtctgggtccatgctggctcaagcagacaagttaccaatgacagacaagcgggtcgcatccttgttgaagaaggcaaaggcccagctgtgcaaaattgagaagagcaagtctttaaaacagacggaccagccgaaggctcagggccaggaaagcgatagttcagagacctccgttcgaggcccccgcatcaaacacgtgtgccggagggcggcagtagcactcgggaggaaacgggccgtattccccgatgatatgccctag

SEQ ID NO: 292049 - DNA, 336 bp, Artificial Sequence
  derived and/or modified sequence
gacttcaaggacgagcagtttctggggttcggcagcgatgaggaggtgcgtgtgcgctcccccaccagatccccctcaggaagtatgctggcacaggcggacaagttgcccatgacggataaaagggtggcatctttacttaagaaagcaaaggcacagttgtgtaagattgagaagtccaagagcctcaagcagacagaccaaccaaaagcacagggacaagagagcgactcgtctgagactagcgtcaggggccctagaatcaaacacgtgtgtcgtagggcagcagtggcgctgggcaggaaaagggccgtgtttcctgatgatatgccttag

SEQ ID NO: 292050 - DNA, 336 bp, Artificial Sequence
  derived and/or modified sequence
gacttcaaggacgagcagttcctgggcttcggcagcgacgaggaggtgagagtgagaagccccaccagaagccccagcggcagcatgctggcccaggccgacaagctgcccatgaccgacaagagagtggccagcctgctgaagaaggccaaggcccagctgtgcaagatcgagaagagcaagagcctgaagcagaccgaccagcccaaggcccagggccaggagagcgacagcagcgagaccagcgtgagaggccccagaatcaagcacgtgtgcagaagagccgccgtggccctgggcagaaagagagccgtgttccccgacgacatgccctag

SEQ ID NO: 292051 - protein, 707 aa, Artificial Sequence
  derived and/or modified sequence
MSTADALDDENTFKILVATDIHLGFMEKDAVRGNDTFVTLDEILRLAQENEVDFILLGGDLFHENKPSRKTLHTCLELLRKYCMGDRPVQFEILSDQSVNFGFSKFPWVNYQDGNLNISIPVFSIHGNHDDPTGADALCALDILSCAGFVNHFGRSMSVEKIDISPVLLQKGSTKIALYGLGSIPDERLYRMFVNKKVTMLRPKEDENSWFNLFVIHQNRSKHGSTNFIPEQFLDDFIDLVIWGHEHECKIAPTKNEQQLFYISQPGSSVVTSLSPGEAVKKHVGLLRIKGRKMNMHKIPLHTVRQFFMEDIVLANHPDIFNPDNPKVTQAIQSFCLEKIEEMLENAERERLGNSHQPEKPLVRLRVDYSGGFEPFSVLRFSQKFVDRVANPKDIIHFFRHREQKEKTGEEINFGKLITKPSEGTTLRVEDLVKQYFQTAEKNVQLSLLTERGMGEAVQEFVDKEEKDAIEELVKYQLEKTQRFLKERHIDALEDKIDEEVRRFRETRQKNTNEEDDEVREAMTRARALRSQSEESASAFSADDLMSIDLAEQMANDSDDSISAATNKGRGRGRGRRGGRGQNSASRGGSQRGRDTGLETSTRSRNSKTAVSASRNMSIIDAFKSTRQQPSRNVTTKNYSEVIEVDESDVEEDIFPTTSKTDQRWSSTSSSKIMSQSQVSKGVDFESSEDDDDDPFMNTSSLRRNRR

SEQ ID NO: 292052 - protein, 221 aa, Artificial Sequence
  derived and/or modified sequence
MSTADALDDENTFKILVATDIHLGFMEKDAVRGNDTFVTLDEILRLAQENEVDFILLGGDLFHENKPSRKTLHTCLELLRKYCMGDRPVQFEILSDQSVNFGFSKFPWVNYQDGNLNISIPVFSIHGNHDDPTGADALCALDILSCAGFVNHFGRSMSVEKIDISPVLLQKGSTKIALYGLGSIPDERLYRMFVNKKVTMLRPKEDENSWFNLFVIHQNRV

SEQ ID NO: 292053 - DNA, 2124 bp, Artificial Sequence
  derived and/or modified sequence
atgagcaccgccgacgccctggacgacgagaacaccttcaagatcctggtggccaccgacatccacctgggcttcatggagaaggacgccgtgagaggcaacgacaccttcgtgaccctggacgagatcctgagactggcccaggagaacgaggtggacttcatcctgctgggcggcgacctgttccacgagaacaagcccagcagaaagaccctgcacacctgcctggagctgctgagaaagtactgcatgggcgacagacccgtgcagttcgagatcctgagcgaccagagcgtgaacttcggcttcagcaagttcccctgggtgaactaccaggacggcaacctgaacatcagcatccccgtgttcagcatccacggcaaccacgacgaccccaccggcgccgacgccctgtgcgccctggacatcctgagctgcgccggcttcgtgaaccacttcggcagaagcatgagcgtggagaagatcgacatcagccccgtgctgctgcagaagggcagcaccaagatcgccctgtacggcctgggcagcatccccgacgagagactgtacagaatgttcgtgaacaagaaggtgaccatgctgagacccaaggaggacgagaacagctggttcaacctgttcgtgatccaccagaacagaagcaagcacggcagcaccaacttcatccccgagcagttcctggacgacttcatcgacctggtgatctggggccacgagcacgagtgcaagatcgcccccaccaagaacgagcagcagctgttctacatcagccagcccggcagcagcgtggtgaccagcctgagccccggcgaggccgtgaagaagcacgtgggcctgctgagaatcaagggcagaaagatgaacatgcacaagatccccctgcacaccgtgagacagttcttcatggaggacatcgtgctggccaaccaccccgacatcttcaaccccgacaaccccaaggtgacccaggccatccagagcttctgcctggagaagatcgaggagatgctggagaacgccgagagagagagactgggcaacagccaccagcccgagaagcccctggtgagactgagagtggactacagcggcggcttcgagcccttcagcgtgctgagattcagccagaagttcgtggacagagtggccaaccccaaggacatcatccacttcttcagacacagagagcagaaggagaagaccggcgaggagatcaacttcggcaagctgatcaccaagcccagcgagggcaccaccctgagagtggaggacctggtgaagcagtacttccagaccgccgagaagaacgtgcagctgagcctgctgaccgagagaggcatgggcgaggccgtgcaggagttcgtggacaaggaggagaaggacgccatcgaggagctggtgaagtaccagctggagaagacccagagattcctgaaggagagacacatcgacgccctggaggacaagatcgacgaggaggtgagaagattcagagagaccagacagaagaacaccaacgaggaggacgacgaggtgagagaggccatgaccagagccagagccctgagaagccagagcgaggagagcgccagcgccttcagcgccgacgacctgatgagcatcgacctggccgagcagatggccaacgacagcgacgacagcatcagcgccgccaccaacaagggcagaggcagaggcagaggcagaagaggcggcagaggccagaacagcgccagcagaggcggcagccagagaggcagagacaccggcctggagaccagcaccagaagcagaaacagcaagaccgccgtgagcgccagcagaaacatgagcatcatcgacgccttcaagagcaccagacagcagcccagcagaaacgtgaccaccaagaactacagcgaggtgatcgaggtggacgagagcgacgtggaggaggacatcttccccaccaccagcaagaccgaccagagatggagcagcaccagcagcagcaagatcatgagccagagccaggtgagcaagggcgtggacttcgagagcagcgaggacgacgacgacgaccccttcatgaacaccagcagcctgagaagaaacagaagatag

SEQ ID NO: 292054 - DNA, 2124 bp, Artificial Sequence
  derived and/or modified sequence
atgtccacagccgacgctttggatgatgaaaatacctttaaaattcttgtggccaccgatatccacctagggtttatggaaaaagacgctgtgaggggaaatgacacctttgttactctggatgaaatccttagattggctcaggaaaacgaggtggatttcattctacttggaggggatctgttccacgagaataaaccctctaggaagacgctgcatacctgtctggagctgctcagaaaatattgtatgggggaccggcccgtgcaattcgagattttatctgatcagagtgttaacttcggatttagcaagtttccttgggttaactaccaggacggcaatctgaatatcagtattccggtttttagcatacatggcaaccatgatgatcctaccggagccgacgcactgtgcgccttggacatcttgtcctgtgcaggctttgtaaaccatttcggccgaagtatgtccgtcgagaaaattgacataagtccagtgctactccagaaggggtcaacgaagatcgccttatacggcttggggtccatccctgacgaacggctctacaggatgtttgtgaacaaaaaggtcacaatgctccgacctaaagaagatgagaattcctggtttaatctcttcgtaatacaccagaataggagcaagcatggttcaactaatttcatccctgagcagttcttggatgactttattgacctcgtcatctggggacatgaacatgagtgtaaaatcgcaccgaccaaaaatgaacaacagctcttctacatttcccagcccgggtcaagcgtggtaacaagtctgtccccaggagaggcagtgaagaagcatgttgggctgctgaggataaagggccggaaaatgaacatgcacaagattccactgcacacggttcgccagttcttcatggaagacatcgtcctggccaatcacccagacatctttaaccccgacaatcccaaagttacgcaagctattcagagtttctgtctcgagaagattgaagagatgctcgagaacgcagagagggaacgcctcggaaattcacatcagccagaaaaaccactggtgagattgagagtggactactcaggtggatttgagccattctcagtgcttagattttcgcaaaagttcgtggatagagtcgccaatccaaaggacatcattcacttctttcgccatcgggagcaaaaggaaaagactggagaagagataaactttgggaaacttataaccaagccctcagaaggcacgacccttcgcgtggaagatctcgtgaagcagtacttccagacagcagagaagaatgtgcagctgagtctgctcaccgaaagggggatgggcgaggccgtccaggaattcgtggataaagaggaaaaggatgcgattgaggagttagtgaagtaccagctggagaagacgcaacggtttctgaaagagcgtcatatcgacgcccttgaggataagattgatgaggaagtgcggcgttttagagaaactaggcaaaagaataccaacgaagaggatgacgaagttcgggaagcaatgacaagggcccgcgccctgagaagccagtctgaggaatccgcatcagcattttccgctgatgacctcatgagtatcgatctggctgagcagatggcgaacgactccgatgactccatttctgccgccactaataagggtcgcggcagaggcaggggtagaaggggaggaagaggacagaactctgcttcacgaggcggctcacagcgggggcgagacacaggcctggagaccagtaccagatcccgtaacagtaagaccgccgtgtcagccagccgaaatatgtccatcattgatgcctttaaatccacaagacagcaaccttctcgcaatgtaaccactaaaaactactccgaggtgatagaggtcgatgagagcgatgtcgaagaagatatatttcccactacctccaagacagatcagcgctggtctagcacgtcttcaagcaagatcatgtcgcaatcccaggttagtaagggggtcgactttgaatcctcggaagacgacgacgatgacccattcatgaatacatcgtcactgagacgaaatcgtcgttag

SEQ ID NO: 292055 - DNA, 2124 bp, Artificial Sequence
  derived and/or modified sequence
atgagcacagcagatgccctggatgatgagaacaccttcaagatcctggtggccacagacatccacctgggcttcatggagaaggatgctgtgagaggaaatgacacctttgtgaccctggatgagatcctgcggctggcccaggagaatgaggtggacttcatcctgctgggcggggacctcttccacgagaacaagcccagcaggaagaccctgcacacctgcctggagctgctgaggaagtactgcatgggagacaggcctgtgcagtttgagatcctgagtgaccagagcgtgaactttggcttcagcaagttcccctgggtgaactaccaggacggcaacctgaacatcagcatccctgtgttcagcatccacggcaaccatgatgaccccactggagcagatgccctgtgtgccctggacatcctgagctgtgccggctttgtgaaccacttcggccgctccatgtctgtggagaagattgacatcagccctgtgctgctgcagaagggcagcaccaagatcgccctgtatggcctgggcagcatcccagatgagcggctgtacaggatgtttgtgaacaagaaggtgaccatgctgcggcccaaggaggatgaaaattcctggttcaacctcttcgtcatccaccagaacagaagcaagcacggcagcaccaacttcatccctgagcagttcctggatgacttcatcgacctggtgatctggggccatgaacatgagtgcaagatcgcccccaccaagaatgagcagcagctgttctacatcagccagcccggcagctctgtggtgaccagcctgagccctggagaggccgtgaagaagcacgtgggcctgctgcgcatcaagggcaggaagatgaacatgcacaagatccccctgcacacagtgcggcagttcttcatggaggacatcgtgctggccaaccacccagacatcttcaacccagacaaccccaaggtgacccaggccatccagagcttctgcctggagaagattgaggagatgctggagaatgctgagcgggagcggctgggcaacagccaccagcctgagaagcccctggtgcggctgcgggtggactacagcggcggctttgagcccttctctgtgctgcgcttcagccagaagtttgtggacagagtggccaaccccaaggacatcatccacttcttccgccaccgggagcagaaggagaagacaggagaggagatcaactttgggaagctgatcaccaagcccagcgagggcaccaccctgcgggtggaggacctggtgaagcagtacttccagacagctgagaagaatgtgcagctgagcctgctgacagagcggggcatgggagaggccgtgcaggagtttgtggacaaggaggagaaggatgccatcgaggagctggtgaagtaccagctggagaagacccagcgcttcctgaaggagcggcacattgatgccctggaggacaagattgatgaggaggtgcggcgcttccgggagacccggcagaagaacaccaatgaagaagatgatgaggtgcgggaggccatgacccgggcccgggccctgcggagccagagcgaggagagcgccagcgccttcagcgcagatgacctgatgagcattgacctggccgagcagatggccaatgacagtgatgacagcatctctgctgccaccaacaagggccggggccggggccggggccggcggggcggccggggccagaacagcgccagccggggcggcagccagaggggccgggacaccggcctggagaccagcaccaggagcaggaacagcaagacagctgtgtctgccagcaggaacatgagcatcattgatgccttcaagagcacccggcagcagcccagcagaaatgtgaccaccaagaactacagcgaggtgattgaggtggatgaaagtgatgtggaggaggacatcttccccaccaccagcaagacagaccagcgctggagcagcaccagcagcagcaagatcatgagccagagccaggtgtccaaaggagtggactttgagagcagtgaagatgatgatgatgaccccttcatgaacaccagcagcctgcggaggaacagaagatag

SEQ ID NO: 292056 - DNA, 2124 bp, Artificial Sequence
  derived and/or modified sequence
atgagcaccgccgacgccctggacgacgagaacaccttcaagatcctggtcgctaccgatatccacctcggtttcatggagaaggacgccgtccgggggaacgatacgtttgtcaccttagacgagatcctgagactggcgcaggagaatgaggttgattttattctactgggcggtgacctgttccatgagaacaagcccagcagaaagacacttcacacgtgcctggaactgttaagaaaatattgcatgggagaccgccctgtgcaattcgagatcttaagtgaccaatcggtgaattttggattctctaagtttccttgggtaaattaccaggacggcaatctgaacatttcaatacctgttttctcaatacatggaaatcacgatgacccaacaggagcagatgcactgtgcgcactcgatatcttgagctgcgctggcttcgtcaaccattttggcagatccatgtctgttgaaaagatcgatattagccccgtattgctgcaaaagggttcaacaaagatcgctctgtatggcctcggctccattccagacgagcgcctgtacaggatgttcgtgaataaaaaagtgaccatgctgcggccaaaggaagatgagaattcctggtttaatctcttcgtaatccaccagaacagatcaaaacacggcagtaccaactttattcccgaacaattcctggatgatttcatcgacctcgttatttggggacacgagcacgaatgtaaaatcgcccctactaaaaacgaacagcagctgttttacatttcccagccaggctcttccgtggtcacctctctatcacctggcgaggccgtcaagaaacacgtgggtctgttgaggattaaggggcgaaagatgaatatgcacaaaattcccctgcatactgtgcgccagtttttcatggaagatatcgtgctcgccaaccacccggatatttttaatcccgataaccctaaggtgacccaggccattcagagcttctgcttggagaagattgaggagatgctcgaaaatgcagaaagggagagactcggaaacagccaccagccagagaaaccgctcgtgaggcttcgcgtggactattcaggagggtttgagccattttctgtgttacgcttttcacagaagttcgtggaccgcgtggctaatcctaaggatatcattcatttctttcggcaccgagaacaaaaagagaagacaggtgaagagattaatttcgggaagctcattactaaaccaagcgagggcaccactctcagggtggaggacttggttaaacaatacttccagaccgccgagaagaatgttcagctgagcctgcttaccgaacggggcatgggcgaggccgtccaggaattcgtcgataaagaagagaaggacgctatcgaagagctcgttaagtatcagttggaaaaaacacaacggtttctgaaggagcgacacatagatgctcttgaagacaaaattgatgaagaagtgcgccggttccgggagaccaggcagaaaaacactaatgaagaagatgatgaggtcagagaagccatgactcgagccagggccttaagatctcagtccgaggaatccgccagtgcattctctgcggatgaccttatgtctatagatctcgctgagcaaatggctaacgattccgatgatagtatcagcgctgccactaacaaggggcgtggacgaggccgcggacgccgcgggggcaggggacaaaattcggcctccagggggggctcccagagagggcgcgacaccggactagagacatccactagatctcgcaattctaaaactgctgttagcgcctcccggaatatgtctatcatagatgcatttaagagtactcggcaacagccctccagaaatgtgactaccaagaactactccgaggttattgaagtggatgaatccgatgtggaagaggacattttccccaccacatcaaaaaccgatcagagatggtctagcactagttcctcaaagattatgagtcagtctcaggtgtcaaagggcgtagatttcgagagcagtgaagatgatgacgacgatcccttcatgaatacatccagcttgagaagaaatcggcgttag

SEQ ID NO: 292057 - DNA, 2604 bp, Artificial Sequence
  derived and/or modified sequence
aaacggacgccgttctctcccgcggaattcaggtttacggccctgcgggttctcagaggcaagttcagaccgtgttgttttcttttcacggatcctgccctttcttcccgaaaagaagacagccttggaatttctagaatttggaatcgagtgcattttctgacatttgagtacagtacccaggggttcttggagaagaacctggtcccagaggagcttgactgaccataaaaatgagtactgcagatgcacttgatgatgaaaacacatttaaaatattagttgcaacagatattcatcttggatttatggagaaagatgcagtcagaggaaatgatacgtttgtaacactcgatgaaattttaagacttgcccaggaaaatgaagtggattttattttgttaggtggtgatctttttcatgaaaataagccctcaaggaaaacattacatacctgcctcgagttattaagaaaatattgtatgggtgatcggcctgtccagtttgaaattctcagtgatcagtcagtcaactttggttttagtaagtttccatgggtgaactatcaagatggcaacctcaacatttcaattccagtgtttagtattcatggcaatcatgacgatcccacaggggcagatgcactttgtgccttggacattttaagttgtgctggatttgtaaatcactttggacgttcaatgtctgtggagaagatagacattagtccggttttgcttcaaaaaggaagcacaaagattgcgctatatggtttaggatccattccagatgaaaggctctatcgaatgtttgtcaataaaaaagtaacaatgttgagaccaaaggaagatgagaactcttggtttaacttatttgtgattcatcagaacaggagtaaacatggaagtactaacttcattccagaacaatttttggatgacttcattgatcttgttatctggggccatgaacatgagtgtaaaatagctccaaccaaaaatgaacaacagctgttttatatctcacaacctggaagctcagtggttacttctctttccccaggagaagctgtaaagaaacatgttggtttgctgcgtattaaagggaggaagatgaatatgcataaaattcctcttcacacagtgcggcagtttttcatggaggatattgttctagctaatcatccagacatttttaacccagataatcctaaagtaacccaagccatacaaagcttctgtttggagaagattgaagaaatgcttgaaaatgctgaacgggaacgtctgggtaattctcaccagccagagaagcctcttgtacgactgcgagtggactatagtggaggttttgaacctttcagtgttcttcgctttagccagaaatttgtggatcgggtagctaatccaaaagacattatccattttttcaggcatagagaacaaaaggaaaaaacaggagaagagatcaactttgggaaacttatcacaaagccttcagaaggaacaactttaagggtagaagatcttgtaaaacagtactttcaaaccgcagagaagaatgtgcagctctcactgctaacagaaagagggatgggtgaagcagtacaagaatttgtggacaaggaggagaaagatgccattgaggaattagtgaaataccagttggaaaaaacacagcgatttcttaaagaacgtcatattgatgccctcgaagacaaaatcgatgaggaggtacgtcgtttcagagaaaccagacaaaaaaatactaatgaagaagatgatgaagtccgtgaggctatgaccagggccagagcactcagatctcagtcagaggagtctgcttctgcctttagtgctgatgaccttatgagtatagatttagcagaacagatggctaatgactctgatgatagcatctcagcagcaaccaacaaaggaagaggccgaggaagaggtcgaagaggtggaagagggcagaattcagcatcgagaggagggtctcaaagaggaagagacactggtctggagacttctacccgtagcaggaactcaaagactgctgtgtcagcatctagaaatatgtctattatagatgcctttaaatctacaagacagcagccttcccgaaatgtcactactaagaattattcagaggtgattgaggtagatgaatcagatgtggaagaagacatttttcctaccacttcaaagacagatcaaaggtggtccagcacatcatccagcaaaatcatgtcccagagtcaagtatcgaaaggggttgattttgaatcaagtgaggatgatgatgatgatccttttatgaacactagttctttaagaagaaatagaagataatatatttaatggcactgagaaacatgcaagatacaggaaaaatgaaaatgttacaagctaagagtttacagtttaagattttaagtattgtttcctgagcataactccataagtaagaaatttctagttcacagacatacaatagcattgattcaccttgtttttttaacctggttgttgtagtaagagctttgtttcaatatcactcttgagtaaagattaaaataaagctaccattttacatttc

SEQ ID NO: 292058 - DNA, 2124 bp, Artificial Sequence
  derived and/or modified sequence
atgagcacagcagatgcgttggacgacgaaaacacctttaaaatattggtggcaacagatattcaccttgggttcatggaaaaggacgccgttaggggcaacgatacctttgttactctggacgaaattctgaggctggcccaggaaaatgaagtggactttattctgctgggaggcgacctttttcacgaaaataagccctcgcgtaagaccttgcatacatgtcttgagttgttgaggaaatactgcatgggagatcgcccagtgcaattcgaaattctgtcagaccagtcagtaaactttggattctccaaattcccatgggtaaattatcaggacggtaacctgaatatcagcatccctgtgttcagcattcatggcaatcacgatgacccaaccggggcagacgcactgtgtgccttagacatactttcttgcgcaggcttcgttaatcacttcggacgatcaatgagtgtcgagaagattgatatatccccagtcctgctgcaaaaaggctccactaagatcgccctgtatggcctagggtcgatccctgacgagcgactctatcgaatgtttgtgaacaaaaaagttacaatgcttcgtcctaaagaggacgaaaacagctggtttaatctgtttgtgatacaccagaataggtctaaacatggatccacgaatttcattcccgaacagttcctggatgattttattgatctggtgatttggggccatgagcatgaatgcaagatcgcacccaccaagaatgaacagcagctgttctacattagccagccgggttcatctgtggttacatctctgagtccaggagaagccgttaaaaaacacgttggccttcttcggatcaaaggccgtaaaatgaatatgcataagatccctttacatacagtaaggcagtttttcatggaggacatcgtgctcgcaaatcaccccgacatctttaacccagataatccaaaagttacccaggcaatccagagcttttgtcttgaaaagattgaagagatgctggaaaatgcagaaagagaacgcctcggcaactcgcaccagccggaaaaaccacttgtgaggctgagggtggattactctggaggctttgagcccttttccgtgctgcggttcagtcagaagttcgtggaccgggtggccaaccctaaagacattattcactttttcagacacagggaacagaaagaaaaaaccggggaagagatcaacttcggaaagttgataacaaagcccagcgaaggaacaacactgcgtgtcgaagatctggttaaacagtatttccagacagccgagaagaacgtgcaactgtcccttctcaccgaaagggggatgggggaagccgttcaggagtttgtggataaagaagaaaaggatgccattgaagaactggtcaaataccagctggagaagacccagaggtttctaaaggaacgtcatatagatgctctggaggataaaatagatgaggaagtgcgacgattccgcgaaactcggcagaaaaataccaacgaggaggatgacgaggttcgcgaggcaatgaccagagcaagggcactgagatcacaatctgaagagagtgccagtgctttctctgccgacgatctgatgtctatcgacttagccgagcaaatggcaaatgatagtgatgatagcatcagcgctgcaactaataaagggaggggcaggggacggggtcgcagaggcggtcgcggacagaactctgcgtcccggggtgggagtcagcgtggacgcgatacagggttggaaacctcgaccaggtcccggaactccaagacagctgtgtctgcctctaggaacatgtcgatcatcgatgcgttcaagtccactaggcagcaacctagtcgcaacgtcactacaaagaactatagtgaggtgatagaggtggatgagtccgacgtggaagaggacatttttcctacaacttctaaaaccgatcaaagatggtcatctacatcatcctccaagatcatgtctcagagccaagtttcaaagggcgtggacttcgagtcctcagaggacgatgatgacgaccccttcatgaacacatcatccctgcggagaaatcgacgctag

SEQ ID NO: 292059 - DNA, 879 bp, Artificial Sequence
  derived and/or modified sequence
atggcccaaccccagctgtatctcccggagcctttcaagatcgcctatcggaaagttggccagtgtcgacggttccagcagcttaagaaaaaaaatgggtcgttcaagaggaaaggcatcgagaggtggcaccgtgcagtttccacaaacctgctcaaacagaacgttctggttccgaaggaagaaagttcatccgatagcgacatgggcttccatgaatcccagcagaatcagaaatccaatctcaaaacaaaggtgaaaaccgccttcggccgcatgttgtcatataagtataggtccaaacccgcatgcgcctcacaggagggttccaccgaccacaaggaagctctgcttagtaacacccagtctcttctgccccgcatcgttaaagagttctcaagcccgaagttgtttacagctaagatgaggaaactaagtgagaacgcaaccatccagctggatgtcgtggaggcagaaacagaggaaattacacagggcaacaccttgctgagggctcgacgaacgacaaaacggctgtccgtaacctctctcccgtcagggcttcaaaagggtccctacagtcctaagaagagacctcattttccagcacttaagaaaaagaagagaggtatggagaacatactcagaaagtctgacctcaccgtgggaaaactgcagatgcaagtggacgatcttatagagacggtgacagacaaaagcatgaaattgctggctcaacgacatgctgaactccaacagtgtgagttcctgggagacgagatactccagtccagcaagcaattccagcggatttctaagcgcacgatgcggaagtataaactcaagaatatgaccacgaagggacccggggattcctag

SEQ ID NO: 292060 - protein, 3056 aa, Artificial Sequence
  derived and/or modified sequence
MSLVLNDLLICCRQLEHDRATERKKEVEKFKRLIRDPETIKHLDRHSDSKQGKYLNWDAVFRFLQKYIQKETECLRIAKPNVSASTQASRQKKMQEISSLVKYFIKCANRRAPRLKCQELLNYIMDTVKDSSNGAIYGADCSNILLKDILSVRKYWCEISQQQWLELFSVYFRLYLKPSQDVHRVLVARIIHAVTKGCCSQTDGLNSKFLDFFSKAIQCARQEKSSSGLNHILAALTIFLKTLAVNFRIRVCELGDEILPTLLYIWTQHRLNDSLKEVIIELFQLQIYIHHPKGAKTQEKGAYESTKWRSILYNLYDLLVNEISHIGSRGKYSSGFRNIAVKENLIELMADICHQVFNEDTRSLEISQSYTTTQRESSDYSVPCKRKKIELGWEVIKDHLQKSQNDFDLVPWLQIATQLISKYPASLPNCELSPLLMILSQLLPQQRHGERTPYVLRCLTEVALCQDKRSNLESSQKSDLLKLWNKIWCITFRGISSEQIQAENFGLLGAIIQGSLVEVDREFWKLFTGSACRPSCPAVCCLTLALTTSIVPGTVKMGIEQNMCEVNRSFSLKESIMKWLLFYQLEGDLENSTEVPPILHSNFPHLVLEKILVSLTMKNCKAAMNFFQSVPECEHHQKDKEELSFSEVEELFLQTTFDKMDFLTIVRECGIEKHQSSIGFSVHQNLKESLDRCLLGLSEQLLNNYSSEITNSETLVRCSRLLVGVLGCYCYMGVIAEEEAYKSELFQKAKSLMQCAGESITLFKNKTNEEFRIGSLRNMMQLCTRCLSNCTKKSPNKIASGFFLRLLTSKLMNDIADICKSLASFIKKPFDRGEVESMEDDTNGNLMEVEDQSSMNLFNDYPDSSVSDANEPGESQSTIGAINPLAEEYLSKQDLLFLDMLKFLCLCVTTAQTNTVSFRAADIRRKLLMLIDSSTLEPTKSLHLHMYLMLLKELPGEEYPLPMEDVLELLKPLSNVCSLYRRDQDVCKTILNHVLHVVKNLGQSNMDSENTRDAQGQFLTVIGAFWHLTKERKYIFSVRMALVNCLKTLLEADPYSKWAILNVMGKDFPVNEVFTQFLADNHHQVRMLAAESINRLFQDTKGDSSRLLKALPLKLQQTAFENAYLKAQEGMREMSHSAENPETLDEIYNRKSVLLTLIAVVLSCSPICEKQALFALCKSVKENGLEPHLVKKVLEKVSETFGYRRLEDFMASHLDYLVLEWLNLQDTEYNLSSFPFILLNYTNIEDFYRSCYKVLIPHLVIRSHFDEVKSIANQIQEDWKSLLTDCFPKILVNILPYFAYEGTRDSGMAQQRETATKVYDMLKSENLLGKQIDHLFISNLPEIVVELLMTLHEPANSSASQSTDLCDFSGDLDPAPNPPHFPSHVIKATFAYISNCHKTKLKSILEILSKSPDSYQKILLAICEQAAETNNVYKKHRILKIYHLFVSLLLKDIKSGLGGAWAFVLRDVIYTLIHYINQRPSCIMDVSLRSFSLCCDLLSQVCQTAVTYCKDALENHLHVIVGTLIPLVYEQVEVQKQVLDLLKYLVIDNKDNENLYITIKLLDPFPDHVVFKDLRITQQKIKYSRGPFSLLEEINHFLSVSVYDALPLTRLEGLKDLRRQLELHKDQMVDIMRASQDNPQDGIMVKLVVNLLQLSKMAINHTGEKEVLEAVGSCLGEVGPIDFSTIAIQHSKDASYTKALKLFEDKELQWTFIMLTYLNNTLVEDCVKVRSAAVTCLKNILATKTGHSFWEIYKMTTDPMLAYLQPFRTSRKKFLEVPRFDKENPFEGLDDINLWIPLSENHDIWIKTLTCAFLDSGGTKCEILQLLKPMCEVKTDFCQTVLPYLIHDILLQDTNESWRNLLSTHVQGFFTSCLRHFSQTSRSTTPANLDSESEHFFRCCLDKKSQRTMLAVVDYMRRQKRPSSGTIFNDAFWLDLNYLEVAKVAQSCAAHFTALLYAEIYADKKSMDDQEKRSLAFEEGSQNTTISSLSEKSKEETGISLQDLLLEIYRSIGEPDSLYGCGGGKMLQPITRLRTYEHEAMWGKALVTYDLETAIPSSTRQAGIIQALQNLGLCHILSVYLKGLDYENKDWCPELEELHYQAAWRNMQWDHCTSVSKEVEGTSYHESLYNALQSLRDREFSTFYESLKYARVKEVEEMCKRSLESVYSLYPTLSRLQAIGELESIGELFSRSVTHRQLSEVYIKWQKHSQLLKDSDFSFQEPIMALRTVILEILMEKEMDNSQRECIKDILTKHLVELSILARTFKNTQLPERAIFQIKQYNSVSCGVSEWQLEEAQVFWAKKEQSLALSILKQMIKKLDASCAANNPSLKLTYTECLRVCGNWLAETCLENPAVIMQTYLEKAVEVAGNYDGESSDELRNGKMKAFLSLARFSDTQYQRIENYMKSSEFENKQALLKRAKEEVGLLREHKIQTNRYTVKVQRELELDELALRALKEDRKRFLCKAVENYINCLLSGEEHDMWVFRLCSLWLENSGVSEVNGMMKRDGMKIPTYKFLPLMYQLAARMGTKMMGGLGFHEVLNNLISRISMDHPHHTLFIILALANANRDEFLTKPEVARRSRITKNVPKQSSQLDEDRTEAANRIICTIRSRRPQMVRSVEALCDAYIILANLDATQWKTQRKGINIPADQPITKLKNLEDVVVPTMEIKVDHTGEYGNLVTIQSFKAEFRLAGGVNLPKIIDCVGSDGKERRQLVKGRDDLRQDAVMQQVFQMCNTLLQRNTETRKRKLTICTYKVVPLSQRSGVLEWCTGTVPIGEFLVNNEDGAHKRYRPNDFSAFQCQKKMMEVQKKSFEEKYEVFMDVCQNFQPVFRYFCMEKFLDPAIWFEKRLAYTRSVATSSIVGYILGLGDRHVQNILINEQSAELVHIDLGVAFEQGKILPTPETVPFRLTRDIVDGMGITGVEGVFRRCCEKTMEVMRNSQETLLTIVEVLLYDPLFDWTMNPLKALYLQQRPEDETELHPTLNADDQECKRNLSDIDQSFNKVAERVLMRLQEKLKGVEEGTVLSVGGQVNLLIQQAIDPKNLSRLFPGWKAWV

SEQ ID NO: 292061 - DNA, 9171 bp, Artificial Sequence
  derived and/or modified sequence
atgagtctggtgttgaatgacctgcttatctgttgcagacagctggagcatgacagggcaaccgagcgtaagaaggaggtggaaaaatttaaacgcctgatccgtgacccagagactattaaacatctcgaccgccactccgactctaagcagggcaaatatctgaactgggacgccgtatttagatttttgcaaaagtatatccaaaaggagaccgagtgtttgcgtatcgcaaaaccaaacgtctcagctagtacccaggctagtcgacagaaaaagatgcaggaaattagctcactcgtgaagtattttataaaatgcgctaacagaagggccccgcggcttaagtgccaggagcttctgaactacatcatggacactgtaaaagatagttctaacggcgctatctacggcgccgattgtagcaatatattacttaaagatattttatcagtgcgcaagtactggtgcgagataagtcagcaacaatggctggagctgtttagcgtgtattttagactctatctgaaaccaagccaggatgtgcacagagtgctggtagcccgtatcatccatgcagtgactaaaggatgctgttcgcagactgatggccttaacagcaagtttttggatttcttttcgaaggctattcaatgtgcaaggcaggagaagtcgagcagtgggttgaaccatatcctggctgcactcaccattttccttaagacactggccgttaactttcgaattcgcgtgtgtgagttgggggacgaaattctccccacactgctgtacatctggacacagcacaggttgaatgacagtctcaaagaggtgatcatcgagctcttccaactgcagatctatatacatcaccccaagggcgccaagacacaggaaaagggggcatatgagagcaccaagtggcgtagcattctgtacaacctctatgacctcctcgtgaacgagataagtcatatcggcagcaggggcaagtactcctccggcttcagaaatatcgctgtgaaggagaaccttatagaactgatggcggatatatgtcaccaggtgttcaacgaagacaccaggagcttagagatttcacaaagctatactaccacacagagggaatcctcagactattccgtgccttgtaagcgcaagaaaatcgagcttggctgggaagttattaaagatcacctccagaagtcccaaaatgattttgatctggttccttggctccagatagccacccagctgatcagcaagtatccagcctctctaccgaattgcgagctgtcccccttactgatgatcttatcacaacttctgccacagcagcgccatggtgagcggacaccctacgtgctacgatgtttgactgaagtggccctttgtcaggataaacgaagtaacctagaaagtagccagaaatccgacctgcttaagttgtggaataagatctggtgcatcacttttcgcggcatctctagcgagcaaattcaggccgagaattttggcctgctgggcgcaatcattcagggctctctcgtagaggtagaccgcgaattctggaaactgtttacaggctccgcttgccgtccttcctgccctgcggtgtgttgccttacacttgctctcaccacctctatagtacctggaactgtcaagatggggattgagcagaacatgtgcgaagtcaataggtctttctcactgaaggagagcatcatgaagtggctgcttttttatcaactcgagggggatctggaaaatagcacagaggtgccacccattctccacagtaattttcctcatctggtgcttgaaaagatcttagtcagtttgacaatgaaaaattgcaaagcggcaatgaactttttccagagtgtcccagaatgtgagcaccaccagaaggataaagaggagctaagcttcagcgaggtggaggagctctttctgcaaactacttttgataagatggacttccttacgatcgtgcgcgagtgtggcattgaaaaacaccagagctcaattgggttctctgtgcaccagaatttgaaagagagcctcgacaggtgcttattggggctgtcggagcagttgctcaacaattactcctccgagattacaaactcggagacattggtgcggtgttcacgtttgctggtgggcgtgctaggctgttattgttacatgggcgtcatcgcagaagaggaggcctataagtccgagctgttccaaaaggctaagagtctgatgcaatgcgctggggagagcatcactctgtttaagaacaagactaatgaagagtttcgaatcggatctcttcgaaacatgatgcaattatgcactcgctgcctgtcaaattgtacgaaaaagagccctaataagattgccagtggcttctttcttcgactcctcacgtctaagctcatgaatgacattgctgacatctgcaaatccttggcttcatttatcaaaaaaccattcgatcgcggtgaggtggaaagtatggaagacgataccaacggcaacttgatggaagtggaggatcagagcagtatgaacctattcaacgattaccctgatagcagcgtctccgatgctaacgagcccggggagtctcaaagcactattggggctatcaacccattggccgaggagtacctgtctaagcaagatttgctctttctggatatgctaaaattcctctgcttatgtgtgaccacagctcagactaacacagtgtcatttcgagcagctgatattcggcggaagcttctgatgttaatcgactctagcactctggaacccaccaagagccttcatctacacatgtacctaatgcttctaaaagaattacctggcgaggagtaccccctccccatggaggatgtccttgagctactgaagccactctctaatgtatgctctctgtatcgtcgggatcaggatgtgtgcaaaactatcctgaatcatgttctgcacgttgtcaaaaacctcggacaaagtaatatggattctgagaatacacgtgacgcccaaggccagtttctgaccgttatcggagctttttggcacctaacgaaggagaggaaatacattttttctgtacgcatggctctcgtaaactgtttgaagacacttctggaggctgatccctacagtaaatgggctatcttaaatgtaatggggaaggatttccccgtaaacgaggttttcactcaatttctggctgacaatcatcatcaagtgagaatgttggctgcggagagtatcaaccgcctgttccaagacaccaagggggactccagcaggttgcttaaagctctccctctgaagctgcaacagactgcattcgaaaacgcatacctgaaggcccaggagggcatgcgtgaaatgagtcattctgcagaaaacccagagaccttggatgaaatatataataggaaatcggtactcctgaccctgatcgctgtggtgctctcctgtagccccatttgtgagaagcaggctctcttcgcgctgtgcaagtccgtcaaagagaacggactcgaaccgcatcttgtgaagaaagtcctagaaaaagtgagtgaaacctttggctatcgtcgcctggaggattttatggctagccacttagactatctggtgctggaatggctgaatttacaggacacagaatataaccttagttcatttcctttcatccttttaaattataccaacatcgaggacttttacagaagctgttacaaggtactcattccccatctggttatccgcagccatttcgacgaagttaagagcatcgcaaaccaaatccaagaggactggaagtccctcctgacggactgcttccctaaaatcttagtgaatatcctcccatacttcgcttatgaaggcacaagagatagcggcatggctcagcaacgagagaccgctacaaaggtctacgatatgctcaaatcagagaaccttttgggaaaacagatcgatcatctcttcatatcaaaccttccggagatagtagtagagctcttgatgacgctccacgaaccggcaaatagctccgcatcacagagcaccgacctgtgtgatttcagcggtgacctggatcccgccccgaatccacctcacttcccgagtcacgtgatcaaggccacgtttgcatatatcagcaactgtcacaagaccaagctgaaatccattctcgaaatactctctaaaagtcctgactcctaccagaagatcctgctcgcgatttgcgaacaggctgcagagacaaacaacgtctacaaaaagcatcggatcctaaaaatctatcacttgttcgtttcactgctgctgaaggatattaaatctggactgggcggtgcttgggcctttgttctgcgggacgttatttacactctgatccattacattaaccagcggccaagctgtattatggacgtctcccttcgctcgttttctctttgttgtgatctgctgtcacaggtatgtcagaccgccgtcacctactgtaaagacgctctggagaatcacttgcatgttatcgtcggcaccctgattccactagtttacgaacaggtagaagtccagaaacaggtgctcgatcttttaaagtacctagtgatcgataacaaggataacgaaaacctgtatattacgatcaagctcttggacccatttccagaccatgtggtttttaaggatcttagaattacgcagcagaagattaaatattccaggggtcccttctcactactggaggagattaaccacttcctgagcgtttcagtctacgacgctctcccgcttacacgcctggagggccttaaagatttacggcgtcagctggagcttcataaagatcagatggtagacattatgcgggcgtcccaggataaccctcaagatggcattatggtaaagctggtcgtaaatctgttgcaactgtcgaaaatggcaatcaatcataccggtgaaaaagaggtgctcgaagccgtgggctcctgccttggagaagtcgggcccatcgactttagcacaatcgcaattcagcacagcaaagatgcttcctacaccaaggccctcaagttgtttgaggataaggagctccagtggacatttatcatgttgacttatttgaacaacacactggtggaggattgtgttaaagtgcggagcgcagctgtcacctgtctgaaaaatatcttggccaccaaaactggccatagcttctgggaaatttataagatgacaaccgaccctatgttagcctatcttcagccattcaggacatctaggaaaaagtttctggaagtgcctaggttcgataaagagaaccccttcgaaggtctagacgacataaatctttggatcccactctccgagaaccacgacatttggatcaagacactcacatgcgcttttctagattccggcggcactaagtgtgagatcctgcaactcctaaagccgatgtgcgaagttaagactgacttctgtcagaccgtgttaccgtacctgattcatgatattctcctgcaggatactaatgagagctggcggaacctgctgtccacccacgtccagggcttcttcacaagctgcctacgacacttttctcagacatctaggtccacgaccccagctaacctcgattccgagtcagagcacttctttagatgctgcctcgacaaaaaatcacagcgtaccatgctggccgtcgtggactatatgcggcgccagaagcgcccgagtagcggcactatattcaatgacgccttttggctcgatctgaactacctggaggtcgcaaaagtcgcgcaatcatgcgcagcccacttcacggccttgctgtatgctgagatttatgcagacaaaaaatccatggacgatcaggagaaacgcagtctggcattcgaagaaggctctcagaacaccactatttcctccctgtcagaaaaatctaaggaggagaccggaatttccctccaggacttacttctcgagatttacagatctattggggagcctgacagtctgtacggctgcggcggtggtaaaatgttacagccgatcactagactgaggacctacgagcatgaagccatgtggggcaaagcccttgtgacatatgacctggagaccgccattcccagtagtacccgccaggccggtattatccaagccttgcagaatctcgggttgtgtcatatcctcagcgtgtatctgaaaggtctggactacgagaacaaagactggtgtcctgagcttgaggaactgcactaccaagcagcgtggaggaacatgcagtgggatcattgcacatccgtgtccaaggaggttgagggaaccagttaccacgagtctctgtataacgcacttcagagtctgcgagaccgtgagttctctacattttatgagtcattaaaatacgctcgcgtgaaagaagtggaggagatgtgcaagagatcactcgaatcagtgtactcactgtacccgacccttagcaggttgcaggctatcggagagcttgaatccattggcgaacttttttctcggtcagtcacccacaggcagttatctgaggtgtacattaaatggcagaagcatagtcaactcctgaaggactccgacttctcttttcaagagcctatcatggcactccgaaccgtcatcctagaaatccttatggagaaagaaatggacaacagtcagcgagagtgcataaaagatattcttactaaacatctagtagaattgtctatcctggcacgaactttcaagaatacgcagctccctgagagggcaatctttcagattaaacagtataactcagtgtcttgtggagtctcagagtggcagttggaagaggctcaggtattctgggccaagaaagaacagagcctggccttgtccatactgaagcaaatgatcaaaaaacttgacgcctcttgcgccgccaataacccgtcactgaaactgacctatacagaatgtctcagggtttgcgggaactggctcgcggagacatgtcttgagaaccctgccgtgataatgcaaacttacttggaaaaggcggtggaggtggccggcaattacgatggagaatcgtccgatgaactgcggaacggcaagatgaaagccttcctgtccttggccaggttttcggacactcagtaccagagaattgagaattacatgaagtcatcggagttcgagaacaaacaggccttgctgaaacgcgctaaagaagaggtaggcctgttacgggagcacaagatccagacgaacagatacacggtgaaggtccaacgcgagttggagctggatgaactggccctgcgcgcccttaaggaagatcgcaagaggtttctctgcaaggccgtggagaattatatcaattgcctgttgtccggcgaggaacatgacatgtgggtgtttcgactgtgtagcctctggctagaaaacagtggagtgtctgaggtgaacggcatgatgaaacgagacggcatgaaaattccaacatataagttcctgcccctcatgtaccaactcgccgccaggatgggcaccaagatgatggggggcctggggttccacgaggtgctgaacaatcttatctctaggatctcaatggaccatccgcaccataccttgtttattattcttgctctggctaacgcaaaccgcgatgaattcctgacaaagccggaggtagctagacgctccaggataaccaagaacgtccctaagcagagctcccagttggatgaggaccgcactgaagcagcaaataggatcatttgcacaataagatccaggcgaccccagatggttcgcagtgtagaggccctctgtgacgcatatatcattctggccaatttagatgccacccagtggaagactcaaaggaaaggcattaatatccccgccgaccagccaattactaaactgaaaaatcttgaggacgttgtggtccctacaatggaaatcaaggtcgaccatacaggcgagtatggcaatctggtgactattcagtcttttaaagcagagtttcggctagccgggggggttaacctccctaaaattatcgattgcgtggggtcagacggaaaagagaggcgacagttagtgaagggacgggatgaccttcgacaggatgcggtgatgcaacaagtttttcagatgtgcaacacactgctgcagagaaatacagagacacgaaagaggaaactcactatttgtacatacaaagttgtccccctgagccagaggtcaggtgtcttggaatggtgtaccggcactgtgcctattggcgaatttcttgtgaacaatgaggatggcgcacacaaacgatatagacctaatgacttttcagcctttcagtgccagaaaaaaatgatggaagtacagaaaaagtccttcgaggagaagtatgaggtgttcatggatgtctgccagaacttccagcccgtgtttaggtacttctgtatggaaaagtttcttgatcccgccatatggtttgagaaacgcttggcttataccaggtctgtggctacttcaagcatcgtaggttatatactgggtctgggggaccgccatgtgcaaaacatcctcataaacgagcagtctgcagagctcgttcacattgacctgggcgtggccttcgaacaaggtaaaatactgccgacccccgaaaccgttccctttagactgacacgggatatcgtggatgggatgggtatcactggggtcgaaggcgtttttcgccgatgttgtgagaaaacaatggaggtcatgagaaactctcaggagactttactgacaatagtggaggtcctgctgtacgatcctctgttcgattggacgatgaatcccctgaaggctctgtacctccaacagagaccggaggatgagaccgagctgcacccgacgttgaatgcggacgatcaggagtgcaaacggaaccttagtgacattgaccaaagtttcaacaaagttgccgagcgtgtgctgatgagactgcaggaaaagctgaagggggtcgaagaaggcacagtgctgagtgtaggagggcaggtcaatctgctgatccagcaggcgatcgatcccaaaaatttatctcgactgtttcctggctggaaagcatgggtgtag

SEQ ID NO: 292062 - DNA, 417 bp, Artificial Sequence
  derived and/or modified sequence
atgactctgcacgaacctgccaactcaagtgcatcccagtctacagatctctgtgacttcagcggagatcttgaccccgctccaaatcctccccactttccatcgcacgtcataaaagctacattcgcttacatcagtaattgtcataaaaccaagctgaagagtatcctggaaatcctgtccaaaagtcccgattcctaccagaaaattctactggccatctgcgagcaggcagccgaaaccaacaatgtgtataaaaaacatcgcatcctcaaaatctaccatctgttcgtgtctttactattgaaagacattaagagcggattaggcggggcctgggctttcgtgctgcgcgatgtgatctacacacttatccattacattaatcagcgcaaactaactatcttctctcaatag

SEQ ID NO: 292063 - DNA, 9171 bp, Artificial Sequence
  derived and/or modified sequence
atgtcgctggtgctgaacgatctgctcatctgctgcagacaacttgagcatgacagagcaaccgagaggaaaaaagaagtggagaagtttaagcgactgatccgcgatccagagacaatcaagcatctggacaggcacagcgacagtaagcaaggtaagtaccttaactgggacgctgtatttcgcttcttacagaagtacatacagaaggagactgagtgcctgaggattgccaaacctaacgtgagtgcaagcacccaggcaagtagacagaagaaaatgcaggagatctcctcactcgtcaagtactttatcaagtgcgccaaccgccgggctccacgcctcaaatgccaggagctgctgaattatattatggacacggtcaaggacagtagcaacggcgctatatacggagctgactgctctaacatcctcctgaaggacatcctgtcggtgcgcaaatactggtgcgaaatttcacagcagcagtggcttgagttgtttagcgtatattttagactgtatctgaagccaagtcaagatgttcatcgggtgctggtcgctagaatcatccacgctgtgaccaaaggatgctgcagtcagaccgacggactgaattccaagttcttggatttcttctctaaggctatccagtgtgcgagacaggaaaagagttcatctgggcttaaccacatcctggccgcactgactatcttcctgaagacactggccgtcaactttcggatccgggtctgtgagctgggggatgagattctgcccacacttctctatatttggacgcagcatagattgaatgactccctaaaagaggtgatcatagagctgttccagctacagatctacatccaccatcccaagggagccaaaacccaggagaaaggagcgtacgagagcactaagtggcgcagcatcttgtacaacctgtacgacctgcttgtgaacgaaatctcgcacattggcagtagaggcaagtatagctccggcttcaggaacattgccgttaaagaaaacttgattgagcttatggctgatatttgccatcaggtttttaatgaggacacccgatcgctggagatctctcaaagttatacgactacccaacgcgaaagtagtgactacagtgtgccttgcaaaaggaagaagatagagttaggctgggaggtaatcaaggaccaccttcagaagagccaaaacgacttcgatctggttccttggttacaaattgcaacacaacttattagcaaatatccagccagcctccctaattgtgagctgtccccactcctcatgattctgtcgcagctgctgccacagcaacgccatggggaacgtacaccatatgtcttgcgatgtcttactgaagtcgcactctgccaggacaagcgatcaaatctggagtcctcgcaaaagtccgatttgctgaagctgtggaataagatctggtgcattacattccgcggcattagctcagaacagattcaggccgaaaactttggtctgctcggtgccatcattcaaggctcgctcgtggaggtggacagagagttttggaaactcttcacagggtccgcctgtcggccatcctgcccggctgtttgttgtcttaccctcgcactgacaactagcatagttccaggcaccgtaaaaatgggcatcgaacaaaatatgtgcgaagtgaacaggagcttcagcctgaaagagagcatcatgaagtggctgctgttctaccaattggagggcgatctggagaactcgaccgaagtccctcctatcctgcattccaattttcctcatctggtcctcgagaagatccttgtatccctgaccatgaagaattgtaaggctgctatgaacttttttcagagtgtaccagagtgcgaacaccaccagaaggacaaggaagagctgtcattcagcgaggtcgaagaactcttcttacagactaccttcgataagatggactttttgacgattgtccgcgagtgcggcattgagaagcaccagtcttctataggattcagcgtgcatcagaatctgaaggagtccctggacaggtgccttcttggtctctcggaacagttgctcaataattacagtagcgaaatcactaactctgagactcttgtgcgatgttctaggctgctcgtcggagtgctagggtgttactgctacatgggtgtgattgctgaggaggaggcttacaagtccgaacttttccagaaggccaagtctctgatgcagtgcgccggtgagtccattacactcttcaaaaacaagaccaacgaagaatttagaattggttccctccggaatatgatgcaattgtgtacccgctgcttgagtaattgcacgaagaaaagtcctaataagatagcaagcgggttttttctgaggctgcttacgagcaagctcatgaatgatattgctgacatttgtaagagcctggctagcttcataaaaaagccttttgacaggggagaggtcgaatcaatggaagacgatacgaatggaaatctaatggaggtggaagatcagagttctatgaacctttttaatgactatccggatagcagtgtgagcgacgctaacgaacccggcgagtcgcagtcgaccataggcgctatcaaccctctggccgaagagtacctgtccaaacaggacctgctgttcttagacatgctgaagttcctgtgtttatgtgtgacaaccgcccagaccaacaccgtctcattccgcgccgctgatatcagaagaaagctgcttatgctgatcgattcttctactctggaacccaccaaatcccttcacttgcacatgtatctgatgctcctgaaagagttgcccggcgaggagtatccactacctatggaggacgtcctggaactgctgaagcccctgtctaatgtgtgttctctttacagaagggatcaggatgtgtgtaaaaccattctcaaccacgttttgcatgtcgttaagaatctgggtcagagtaacatggatagcgaaaacaccagggatgcgcagggtcaattcctcactgtgatcggtgcgttctggcatctgaccaaggaacgcaagtatatcttttctgtgcggatggccctcgtgaattgcctcaagactctgctggaggccgacccatattcgaaatgggccattctgaatgtcatgggcaaggattttcccgtaaacgaagtgtttactcagttcttagctgacaaccatcatcaagtgagaatgctggcggccgagtccatcaatcggttattccaggataccaagggagacagtagcaggttactgaaggcactacctctgaagctgcaacagaccgcatttgagaatgcatacctgaaggcccaggaaggcatgagggagatgtcccactctgccgagaatcccgaaactctggatgagatctacaatcgcaaatccgtattattgactctgatcgccgtggtcctgtcatgtagtcccatctgcgagaagcaggccctctttgccctgtgcaagagcgtcaaagaaaatgggctcgagccgcaccttgttaagaaagtgcttgagaaggtgagcgaaacgttcggttaccggcggcttgaggacttcatggcatctcatctggactacctggttcttgagtggcttaacctccaggatacagagtacaacctgtcctcattcccgtttatcctgcttaactataccaatatcgaggatttttatcgttcctgttataaggttttgataccgcatcttgtgattcggagccactttgacgaggtgaaatccattgctaaccagattcaggaggactggaagtctcttttaaccgattgctttccaaaaatactcgttaacatcctgccctacttcgcatatgaaggaacacgggattccggcatggcgcagcagcgcgagaccgctacaaaggtgtatgacatgctaaaatcagagaacttactgggaaagcagattgaccacttgttcattagcaacctcccagaaattgtggtggaattgctgatgaccctgcatgagcccgccaattcctctgcttcacagtcaacagacttgtgcgactttagcggagatttggaccccgctcctaacccgccacatttccctagtcatgtaatcaaagctactttcgcatatatctctaattgtcacaagactaagctgaagagtatcttagagatcctttccaagtcccctgactcttatcaaaaaatactcctcgctatatgcgagcaggcagccgaaaccaacaacgtgtacaagaagcatcgcattttaaagatctaccatctatttgttagtttactgctgaaggacatcaaatctggattgggcggtgcctgggcattcgtgttgagggacgtaatttacaccttaatccactatataaaccaaagaccttcatgtatcatggatgtgtctctcagaagcttcagcctgtgttgtgatttgctgagtcaagtgtgccaaactgctgttacctactgcaaggacgcgctggagaatcatctccatgtgattgtaggaaccctgattcctttggtgtatgagcaggtggaggtgcagaagcaagttctggatctgctgaagtatttggttattgataacaaggataacgagaacctgtacataactatcaaattgctggatccttttccggaccacgtagtttttaaggacctgagaattacccagcagaaaataaaatattctcgcggaccctttagtctgctggaggagattaaccacttcctctcagttagcgtctacgatgcactgcccctcactcgactggagggattgaaggatctgaggcgacaactagagctgcataaggaccagatggtggatatcatgcgggcaagccaagacaacccgcaggacggaatcatggttaagctcgtcgtgaacctattgcagctctccaagatggccatcaaccacacaggagaaaaagaggtgctggaagctgtgggcagctgcctgggtgaggtgggcccaatagacttctcaactatcgctattcagcactctaaagatgcgtcatacaccaaggccctgaaactcttcgaagacaaggagctgcaatggacgttcataatgttaacttacctaaacaatacgctggtggaagattgcgtcaaggtcaggtccgcagcagtaacttgtctcaaaaacatcttagccacaaagacaggacattctttttgggaaatctacaagatgactacggacccaatgctggcctatctgcaaccattcaggaccagtcgtaagaaattcttggaagttcccaggttcgacaaggaaaaccccttcgaggggcttgatgatattaacctttggatccccctctccgagaaccacgatatatggattaagaccttgacctgtgcttttcttgactcgggaggtaccaagtgcgagattcttcaactgctgaagcccatgtgcgaggttaaaacagatttctgtcaaacagtgctcccctacctgatacatgacattctacttcaggataccaacgaatcttggagaaatttattatcaactcacgtccaaggcttcttcacgtcatgcctgaggcattttagtcaaactagcaggtctacgacccctgctaatctggattccgagtctgagcacttcttcaggtgttgtctggacaagaaatcccaacggaccatgctggcagtggtggactatatgcggagacagaagagacctagttcgggtaccatttttaacgatgctttttggctcgacctgaattatctggaggtcgcgaaggtggctcagagttgcgctgctcatttcacagctctgctctatgctgagatatatgcagataagaagagcatggatgatcaggagaaaagatctctggcctttgaagaggggagtcagaatacaactatctcctcactcagtgagaaaagtaaggaggaaaccggcataagcctgcaggacttactgttagagatatatagatctattggtgagcccgacagtctctatggctgcggcggagggaagatgctccagcctattacccgcctacggacatacgagcacgaggcgatgtgggggaaagccctggtgacttacgatctggaaactgcaattccctcctcaaccagacaagccgggataattcaggctctgcagaatttgggcctgtgtcatatattgtctgtgtatctgaaaggtttggactacgagaataaagattggtgtccagaactcgaggagctgcactaccaggccgcctggagaaatatgcagtgggatcactgtacaagtgttagtaaggaggtggaaggcacctcataccacgagagcctgtacaatgccctgcaaagtctccgggatagggaatttagtactttttatgaaagcttgaagtacgcccgcgtcaaggaggtggaagagatgtgtaaaagaagtcttgaaagtgtgtacagcctttaccctacgttgtctcgtcttcaggctataggggagctcgaatcgatcggcgagctgtttagccgcagtgtgacacaccgacagcttagtgaggtgtacattaagtggcagaagcattcacagctgctgaaagactctgacttttcattccaagagcccattatggccctgcgtaccgtaatacttgaaatacttatggagaaggagatggacaactcgcaaagggaatgtatcaaagacattctaaccaagcaccttgttgaactctcaatcttagctagaactttcaagaacacccaactgccagagagagccatcttccagataaaacaatacaacagcgtgtcctgtggagtctctgagtggcaacttgaagaagcccaagttttttgggcaaagaaggagcagtctttggcactgtctatcctgaagcagatgataaagaagctggacgccagctgcgctgctaataatcctagcttgaagctcacttataccgagtgtctgcgcgtgtgtgggaattggctggctgaaacatgcctcgagaaccctgctgtgatcatgcagacctacttagaaaaagccgtggaggtggccgggaactacgacggagagagctcagatgagttgaggaacggaaagatgaaagccttcctaagtttggcaaggttctctgacacacagtaccaaagaatcgaaaactatatgaaatcctcggaatttgagaacaagcaggctctgctgaagcgggccaaagaagaagtgggccttcttagagaacacaaaattcagactaatcggtacaccgtgaaagtacaacgcgagctggaactcgatgagctcgcattgcgggctttgaaagaagaccgaaaaaggttcctatgcaaggccgtggagaactacatcaattgtcttctatctggggaagagcatgacatgtgggtttttaggctgtgttcactgtggctcgagaattccggggtcagcgaagtgaacggcatgatgaaaagggacggtatgaagatacccacatacaagttcctgcccctgatgtaccaactagcagcgagaatgggaactaagatgatgggcggccttggtttccacgaagtgttaaataatctgatttctagaatcagcatggatcatccacaccacactctcttcataatcctcgccttggctaacgccaatcgcgacgaattcctaaccaaacccgaggtagcccgccggagtagaatcacaaaaaatgtgcccaagcagtcttcgcagctggacgaggatagaactgaagcagccaaccgcattatttgtaccatacgaagccgccgcccccagatggtacgctctgtagaggccctgtgcgacgcatatattatcttagcgaatctggacgcgacccagtggaagacacaacgcaagggtatcaacattcctgccgatcagcccattacgaaactcaagaacttggaagatgtggtagtgcctaccatggaaatcaaggtggatcacactggggagtacgggaatttggtcaccattcagtcctttaaggcggaatttaggctcgctggcggcgtgaacctgccaaaaatcattgattgcgtcggctccgacggcaaagaacggcgccagcttgtgaaagggagggacgatctgcgccaggatgccgttatgcagcaggtttttcaaatgtgtaacactcttctgcaacgtaacaccgaaaccaggaaacgcaaacttaccatttgtacatataaggtcgtgccgctttctcagaggtcaggggtgttagagtggtgcacaggtaccgtgccaattggtgagttcctagttaataacgaggatggcgcccataagaggtacaggcctaatgactttagtgctttccagtgccagaagaaaatgatggaagtgcaaaagaagtcgttcgaagaaaaatatgaagtctttatggacgtgtgtcagaatttccagccggtgttccgctacttttgtatggagaagtttctggaccccgccatctggtttgaaaagcgtttggcgtacacccgaagtgtcgccacctcaagtattgttggctacatcctggggctgggcgataggcacgtccagaatatccttataaatgaacagagtgcagagctcgttcatatcgatctaggcgttgccttcgagcagggtaagattctgcccacccctgagacagttccattccgactaacgcgtgacatagtggatggaatggggattacaggcgtggagggggtcttcaggaggtgctgcgagaagaccatggaggtcatgaggaattctcaagagaccttgctgaccattgttgaagtgctcctgtatgaccccctatttgactggactatgaaccccctgaaggcattgtatttacagcagaggccagaagacgagaccgagttacaccctaccctaaacgcagatgatcaggaatgcaagcgcaaccttagtgacatagaccagtcttttaataaagtggccgagcgggtgctgatgaggctccaagagaagctgaagggagttgaagaaggcaccgtgcttagtgtggggggacaggtcaatcttcttattcaacaagcgattgaccctaagaacttgtctagactgttccccggttggaaggcctgggtgtag

SEQ ID NO: 292064 - DNA, 282 bp, Artificial Sequence
  derived and/or modified sequence
atgagcctggtgctcaatgatttgctgatttgttgccgccaactggagcacgatagagcgacagagcgcaagaaagaagtggagaagttcaagagactgatcagggaccccgaaaccatcaagcacctcgataggcactccgatagcaaacagggaaagtacctcaattgggacgccgtgttcagatttctgcagaaatatattcagaaagagacggagtgtctcagaatagcaaaaccgaacgtgtcggcatcaactcaggccagccggcaaaaaaaatag

SEQ ID NO: 292065 - DNA, 9171 bp, Artificial Sequence
  derived and/or modified sequence
atgagcctggtgctgaatgacctgctgatctgctgccggcagctggagcatgaccgggccacagagaggaagaaggaggtggagaagttcaagaggctcatccgggaccctgagaccatcaagcacctggacagacacagcgacagcaagcagggcaagtacctgaactgggatgctgtgttccgcttcctgcagaagtacatccagaaggagacagaatgtctgagaattgccaagcccaacgtgtctgccagcacccaggccagccggcagaagaagatgcaggagatcagcagcctggtgaagtacttcatcaagtgtgccaacagaagagccccccggctgaagtgccaggagctgctgaactacatcatggacacagtgaaggacagcagcaatggagccatctatggagctgactgcagcaacatcctgctgaaggacatcctgtctgtgaggaagtactggtgtgagatcagccagcagcagtggctggagctgttctctgtgtacttccggctgtacctgaagcccagccaggatgtgcaccgggtgctggtggcccgcatcatccatgctgtgaccaagggctgctgcagccagacagatggcctgaacagcaagttcctggacttcttcagcaaggccatccagtgtgcccggcaggagaagagcagcagcggcctgaaccacatcctggccgccctgaccatcttcctgaagaccctggccgtgaacttccgcatccgggtgtgtgagctgggagatgagatcctgcccaccctgctgtacatctggacccagcaccggctgaatgacagcctgaaggaggtgatcatcgagctgttccagctgcagatctacatccaccaccccaagggggccaagacccaggagaagggggcctatgagagcaccaagtggaggagcatcctgtacaacctgtatgacctgctggtgaatgagatcagccacatcggcagccggggcaagtacagcagcggcttcagaaatattgctgtgaaggaaaatctcatcgagctgatggctgacatctgccaccaggtgttcaatgaagacaccaggagcctggagatcagccagagctacaccaccacccagcgggagagcagtgactacagcgtgccctgcaagaggaagaagattgagctgggctgggaggtgatcaaggaccacctgcagaagagccagaatgactttgacctggtgccctggctgcagatcgccacccagctgatcagcaagtacccagccagcctgcccaactgtgagctgagccccctgctgatgatcctgagccagctgctgccccagcagagacatggagagaggaccccctacgtgctgcgctgcctgacagaggtggccctgtgccaggacaagaggagcaacctggagagcagccagaagagtgacctgctgaagctgtggaacaagatctggtgcatcaccttccggggcatcagcagcgagcagatccaggctgaaaattttggcctgctgggcgccatcatccagggcagcctggtggaggtggaccgggagttctggaagctgttcaccggcagcgcctgccggcccagctgcccagctgtgtgctgcctgaccctggccctgaccaccagcatcgtgcccggcaccgtgaagatgggcatcgagcagaacatgtgtgaggtgaacagaagcttcagcctgaaggagagcatcatgaagtggctgctcttctaccagctggagggggacctggagaacagcacagaggtgccccccatcctgcacagcaacttcccccacctggtgctggagaagatcctggtgtccctgaccatgaagaactgcaaggccgccatgaacttcttccagagcgtgcctgaatgtgagcaccaccagaaggacaaggaggagctgtccttcagcgaggtggaggagctgttcctgcagaccacctttgacaagatggacttcctgaccatcgtgcgggagtgtggcatcgagaagcaccagagcagcatcggcttctctgtgcaccagaacctgaaggagagcctggaccgctgcctgctgggcctgtctgagcagctgctgaacaactacagcagcgagatcaccaacagcgagaccctggtgcgctgcagccggctgctggtgggcgtgctgggctgctactgctacatgggcgtgattgctgaggaggaggcctacaagtctgagctgttccagaaggccaagagcctgatgcagtgtgccggggagagcatcaccctcttcaagaacaagaccaatgaggagttcagaattggcagcctgaggaacatgatgcagctgtgcacccgctgcctgagcaactgcaccaagaagagccccaacaagatcgccagcggcttcttcctgcggctgctgaccagcaagctgatgaatgacattgctgacatctgcaagagcctggccagcttcatcaagaagccctttgacagaggagaggtggagagcatggaggatgacaccaatggaaacctgatggaggtggaggaccagagctccatgaacctcttcaatgactacccagacagctctgtgtctgatgccaatgagcccggggagagccagagcaccatcggggccatcaaccccctggccgaggagtacctgagcaagcaggacctgctcttcctggacatgctgaagttcctgtgcctgtgtgtgaccacagcccagaccaacacagtgtccttccgggctgctgacatccggaggaagctgctgatgctgattgacagcagcaccctggagcccaccaagagcctgcacctgcacatgtacctgatgctgctgaaggagctgcctggagaggagtaccccctgcccatggaggatgtgctggagctgctgaagcccctgagcaatgtgtgcagcctgtacagaagagaccaggatgtgtgcaagaccatcctgaaccacgtgctgcacgtggtgaagaacctgggccagagcaacatggacagcgagaacaccagagatgcccagggccagttcctgaccgtcatcggggccttctggcacctgaccaaggagaggaagtacatcttctctgtgaggatggccctggtgaactgcctgaagaccctgctggaggccgacccctacagcaagtgggccatcctgaatgtgatgggcaaggacttccctgtgaatgaggtgttcacccagttcctggccgacaaccaccaccaggtgaggatgctggccgctgagagcatcaacagactcttccaggacaccaagggggacagcagccggctgctgaaggccctgcccctgaagctgcagcagacagcctttgaaaatgcctacctgaaggcccaggagggcatgagggagatgagccacagcgcagaaaatcctgagaccctggatgagatctacaacaggaagtctgtgctgctgaccctgattgctgtggtgctgagctgcagccccatctgtgagaagcaggccctgtttgccctgtgcaagtctgtgaaggaaaatggcctggagccccacctggtgaagaaggtgctggagaaggtgtctgagaccttcggctaccgccgcctggaggacttcatggccagccacctggactacctggtgctggagtggctgaacctgcaggacacagagtacaacctgagcagcttccccttcatcctgctgaactacaccaacatcgaggacttctaccgcagctgctacaaggtgctgatcccccacctggtgatccgcagccactttgatgaggtgaagagcatcgccaaccagatccaggaggactggaagagcctgctgacagactgcttccccaagatcctggtgaacatcctgccctactttgcctatgagggcacccgggacagcggcatggcccagcagcgggagacagccaccaaggtgtatgacatgctgaagtctgagaacctgctgggcaagcagattgaccacctgttcatcagcaacctgcctgagatcgtggtggagctgctgatgaccctgcacgagcccgccaacagcagcgccagccagagcacagacctgtgtgacttcagcggggacctggaccctgcccccaaccccccccacttccccagccacgtgatcaaggccacctttgcctacatcagcaactgccacaagaccaagctgaagagcatcctggagatcctgagcaagagcccagacagctaccagaagatcctgctggccatctgtgagcaggccgctgagaccaacaacgtgtacaagaagcaccgcatcctgaagatctaccacctgtttgtgtccctgctgctgaaggacatcaagagcggcctgggcggggcctgggcctttgtgctgagagatgtgatctacaccctcatccactacatcaaccagaggcccagctgcatcatggatgtgtccctgcggagcttcagcctgtgctgtgacctgctgagccaggtgtgccagacagctgtgacctactgcaaggatgccctggagaaccacctgcacgtgattgtgggcaccctcatccccctggtgtatgagcaggtggaggtgcagaagcaggtgctggacctgctgaagtacctggtgattgacaacaaggacaatgaaaatctctacatcaccatcaagctgctggaccccttcccagaccacgtggtgttcaaggacctgcgcatcacccagcagaagatcaagtacagccggggccccttcagcctgctggaggagatcaaccacttcctgtctgtgtctgtgtatgatgccctgcccctgacccggctggagggcctgaaggacctgcggcggcagctggagctgcacaaggaccagatggtggacatcatgagggccagccaggacaacccccaggacggcatcatggtgaagctggtggtgaacctgctgcagctgagcaagatggccatcaaccacactggagagaaggaggtgctggaggccgtgggcagctgcctgggggaggtgggccccatcgacttcagcaccatcgccatccagcacagcaaggatgccagctacaccaaggccctgaagctgtttgaggacaaggagctgcagtggaccttcatcatgctgacctacctgaacaacaccctggtggaggactgtgtgaaggtgcgctctgctgctgtgacctgcctgaagaacatcctggccaccaagacaggccacagcttctgggagatctacaagatgaccacagaccccatgctggcctacctgcagcccttccgcaccagcaggaagaagttcctggaggtgcccaggtttgacaaggagaacccctttgagggcctggatgacatcaacctgtggatccccctgtctgagaaccacgacatctggatcaagaccctgacctgtgccttcctggacagcggcggcaccaagtgtgagatcctgcagctgctgaagcccatgtgtgaggtgaagacagacttctgccagacagtgctgccctacctgattcatgacatcctgctgcaggacaccaatgaatcctggaggaacctgctgagcacccacgtgcagggcttcttcaccagctgcctgcggcacttcagccagaccagccgcagcaccaccccagccaacctggacagcgagagcgagcacttcttccgctgctgcctggacaagaagagccagaggaccatgctggccgtggtggactacatgaggcggcagaagaggcccagcagcggcaccatcttcaatgatgccttctggctggacctgaactacctggaggtggccaaggtggcccagagctgtgccgcccacttcaccgccctgctgtatgcagagatctatgctgacaagaagtccatggatgaccaggagaagaggagcctggcctttgaggagggcagccagaacaccaccatcagcagcctgtctgagaagagcaaggaggagaccggcatcagcctgcaggacctgctgctggagatctaccgcagcatcggggagccagacagcctgtatggctgcggcggcggcaagatgctgcagcccatcacccggctgcggacctatgagcacgaggccatgtggggcaaggccctggtgacctatgacctggagacagccatccccagcagcacccggcaggccggcatcatccaggccctgcagaacctgggcctgtgccacatcctgtctgtgtacctgaagggcctggactatgagaacaaggactggtgcccagagctggaggagctgcactaccaggccgcctggaggaacatgcagtgggaccactgcacctctgtgtccaaggaggtggagggcaccagctaccacgagagcctgtacaatgccctgcagagcctgcgggaccgggagttcagcaccttctatgagagcctgaagtatgcccgggtgaaggaggtggaggagatgtgcaagaggagcctggagagcgtgtacagcctgtaccccaccctgagccggctgcaggccatcggggagctggagagcattggagagctgttcagccgctctgtgacccaccggcagctgtctgaggtgtacatcaagtggcagaagcacagccagctgctgaaggacagcgacttctccttccaggagcccatcatggccctgaggacagtcatcctggagatcctgatggagaaggagatggacaacagccagcgggagtgcatcaaggacatcctgaccaagcacctggtggagctgagcatcctggcccggaccttcaagaacacccagctgcctgagcgggccatcttccagatcaagcagtacaacagcgtgtcctgtggggtgtctgagtggcagctggaggaggcccaggtgttctgggccaagaaggagcagagcctggccctgagcatcctgaagcagatgatcaagaagctggatgccagctgtgccgccaacaaccccagcctgaagctgacctacacagagtgcctgcgggtgtgtggcaactggctggccgagacctgcctggagaacccagctgtgatcatgcagacctacctggagaaggctgtggaggtggccggcaactatgatggagagagcagtgatgagctgagaaatggcaagatgaaggccttcctgagcctggcccgcttcagtgacacccagtaccagagaattgagaactacatgaagagcagcgagtttgagaacaagcaggccctgctgaagagggccaaggaggaggtgggcctgctgcgggagcacaagatccagaccaaccgctacacagtgaaggtgcagcgggagctggagctggatgagctggccctgcgggccctgaaggaggacaggaagcgcttcctgtgcaaggctgtggagaactacatcaactgcctgctgagcggggaggagcatgacatgtgggtgttccggctgtgcagcctgtggctggagaacagcggcgtgtctgaggtgaatggcatgatgaagagagatggcatgaagatccccacctacaagttcctgcccctgatgtaccagctggccgccaggatgggcaccaagatgatgggcggcctgggcttccacgaggtgctgaacaacctgatcagccgcatctccatggaccacccccaccacaccctcttcatcatcctggccctggccaatgccaacagagatgagttcctgaccaagccagaggtggcccggcgcagccgcatcaccaagaatgtgcccaagcagagcagccagctggatgaggacagaacagaagctgccaaccgcatcatctgcaccatccgcagccggcggccccagatggtgcgctctgtggaggccctgtgtgatgcctacatcatcctggccaacctggatgccacccagtggaagacccagaggaagggcatcaacatcccagctgaccagcccatcaccaagctgaagaacctggaggatgtggtggtgcccaccatggagatcaaggtggaccacactggagaatatggcaacctggtgaccatccagagcttcaaggccgagttccggctggccggcggcgtgaacctgcccaagatcatcgactgtgtgggcagtgatggcaaggagcggcggcagctggtgaagggcagagatgacctgcggcaggatgctgtgatgcagcaggtgttccagatgtgcaacaccctgctgcagaggaacacagagaccaggaagaggaagctgaccatctgcacctacaaggtggtgcccctgagccagaggtctggagtgctggagtggtgcacaggaacagtgcccatcggggagttcctggtgaacaatgaagatggagcccacaagcgctaccggcccaatgacttcagcgccttccagtgccagaagaagatgatggaggtgcagaagaagagctttgaggagaagtatgaggtgttcatggatgtgtgccagaacttccagcctgtgttccgctacttctgcatggagaagttcctggaccctgccatctggtttgagaagaggctggcctacaccaggtctgtggccaccagcagcatcgtgggctacatcctgggcctgggggacagacatgtgcagaacatcctgatcaatgagcagagcgctgagctggtgcacatcgacctgggcgtggcctttgagcagggcaagatcctgcccaccccagagaccgtgcccttccggctgacccgggacatcgtggatggcatgggcatcactggagtggagggcgtcttccgccgctgctgtgagaagaccatggaggtgatgaggaacagccaggagaccctgctgaccatcgtggaggtgctgctgtatgaccccctgtttgactggaccatgaaccccctgaaggccctgtacctgcagcagaggccagaagatgaaacagagctgcaccccaccctgaatgctgatgaccaggagtgcaagaggaacctgagtgacatcgaccagagcttcaacaaggtggccgagcgggtgctgatgaggctgcaggagaagctgaagggcgtggaggagggcaccgtgctgtctgtgggcggccaggtgaacctgctgatccagcaggccatcgaccccaagaacctgagccgcctcttccctggctggaaggcctgggtgtag

SEQ ID NO: 292066 - DNA, 417 bp, Artificial Sequence
  derived and/or modified sequence
atgaccctgcacgagcccgccaacagcagcgccagccagagcacagacctgtgtgacttcagcggggacctggaccctgcccccaaccccccccacttccccagccacgtgatcaaggccacctttgcctacatcagcaactgccacaagaccaagctgaagagcatcctggagatcctgagcaagagcccagacagctaccagaagatcctgctggccatctgtgagcaggccgctgagaccaacaacgtgtacaagaagcaccgcatcctgaagatctaccacctgtttgtgtccctgctgctgaaggacatcaagagcggcctgggcggggcctgggcctttgtgctgagagatgtgatctacaccctcatccactacatcaaccagaggaagctgaccatcttcagccagtag

SEQ ID NO: 292067 - DNA, 282 bp, Artificial Sequence
  derived and/or modified sequence
atgagcctggtgctgaatgacctgctgatctgctgccggcagctggagcatgaccgggccacagagaggaagaaggaggtggagaagttcaagaggctcatccgggaccctgagaccatcaagcacctggacagacacagcgacagcaagcagggcaagtacctgaactgggatgctgtgttccgcttcctgcagaagtacatccagaaggagacagaatgtctgagaattgccaagcccaacgtgtctgccagcacccaggccagccggcagaagaagtag

SEQ ID NO: 292068 - DNA, 9171 bp, Artificial Sequence
  derived and/or modified sequence
atgagcctggtgctgaacgacctgctgatctgctgccggcagctggagcatgaccgggcaaccgaacgtaaaaaagaggtggagaaatttaaacgcctaattcgggatcccgagacgatcaaacacctggacaggcactcagacagcaaacagggaaagtatctgaattgggacgccgttttccgctttctgcaaaaatacatccagaaagagacagaatgtttgaggattgcaaagccaaacgtgtccgcatccacccaggcttcccgacagaagaagatgcaagagatttcaagcctcgttaagtatttcataaaatgtgccaatcgacgggcgcctcgattaaagtgccaggagctgctcaattacattatggatactgtgaaagattcttcgaacggtgcgatttatggtgctgattgcagtaacattttactcaaggatatcctgagcgtacgcaagtattggtgcgaaatttctcaacagcagtggctggagttattctcggtgtacttccggttatacctcaaaccatcccaagatgttcaccgggtactggtagcacgcatcattcatgccgtcaccaagggatgctgctcccagactgacggcctgaactcaaagttcttggattttttttccaaggctatacagtgtgcccgccaagagaaatcaagctccgggttgaaccacatcctggcagccctgacaatcttcctcaagactcttgctgtgaatttccgaattagggtttgcgagttgggcgacgagattctgcccaccctgctctatatctggacccagcaccggttgaacgactccttgaaagaagtgatcatcgagctgtttcagctgcagatttatattcaccaccccaaaggcgcaaaaacccaggagaagggggcttatgaaagcaccaagtggcggagcatcctctataacctctatgatctactagttaacgagatatcccatattggctcaaggggcaagtatagcagcgggttccgaaacatcgccgtaaaggaaaacctgattgaactgatggccgatatatgtcaccaggtttttaatgaggacactagaagcctggagatctctcaatcttatacgacaacacagagagagtctagcgactattctgtcccatgtaagcggaagaagattgagctgggttgggaggtcatcaaggaccatctgcagaagagccagaatgatttcgatttggtgccgtggctccaaatagcgacacaactcattagcaaatacccggcctctttgccgaactgcgagctttctccactccttatgatccttagccagcttctgccacagcagcgccacggagagcggaccccttacgtactgcggtgtttgaccgaagtggcattatgccaggacaaaagaagcaacttggaaagcagccagaaatctgacctgctcaagctgtggaataagatttggtgcattacattccgaggcatttcctccgaacaaattcaggctgagaatttcgggctcctgggcgccatcatccaggggtcgcttgtcgaggttgatagggaattttggaaactctttacagggtccgcatgtaggcctagttgtcccgccgtgtgctgcctgaccctagccttgaccacatccatcgtaccaggtactgtgaaaatgggtattgagcaaaatatgtgtgaggtcaatcgaagctttagcctgaaggaaagcatcatgaaatggcttttgttctatcaactcgagggcgatcttgagaacagcacagaggttccacctatacttcatagcaatttcccgcatctggttctagagaagatcctggtctcactcaccatgaagaactgtaaggcagccatgaacttttttcagtccgtgccggagtgcgaacatcaccagaaagacaaggaagagctttcctttagcgaagtggaagaactgttcctccaaacaacatttgacaagatggactttctgacaatcgtgagagaatgcggaatcgaaaagcaccagagcagtataggattcagtgtgcatcagaacctgaaagagtcactggacagatgcctgctggggctgagcgagcagctcctgaacaactattctagtgagataaccaacagcgaaactctggtgcgctgttcacgattactggtgggtgtcctaggctgttattgttacatgggggtcatcgctgaggaggaagcctataaatccgagcttttccagaaggcaaagagcttgatgcagtgcgctggcgaaagcatcactctcttcaagaacaagaccaacgaggagtttcggatcggtagcctgcgtaatatgatgcagctatgtacaaggtgcctgagtaattgcaccaaaaaatctccaaataagatcgccagcgggtttttcctgaggctccttacctctaaacttatgaatgatatcgccgacatctgtaaaagcctagcctctttcatcaaaaagccatttgaccgcggcgaggtggagtccatggaggatgacacgaatggaaatctcatggaagtcgaggatcagtcctccatgaatcttttcaacgattaccccgattcaagcgttagcgatgccaatgagccaggcgagagccagtctacaataggagctatcaatcctctagccgaggagtacctgagtaaacaggacctgctgtttttggacatgttgaagtttttatgcttgtgtgtaacgaccgcccaaacaaataccgtgtcgttccgcgcagccgacattagaaggaagctacttatgttaatcgatagcagcactttagaaccaacaaagtctttgcatctgcacatgtacctcatgttgcttaaggaactgcctggtgaagagtatccactgcctatggaagacgtgcttgagctgctcaagcccttgtcgaatgtttgttccctctacaggagggatcaggatgtgtgcaaaacgattcttaatcatgtgctgcacgttgtcaaaaatctaggacagtctaatatggactcagaaaacacacgcgacgcgcaagggcagtttctcacagtgataggcgctttttggcatctgacaaaggaacgtaagtacatcttttcagtgcggatggctctagtaaattgcttgaagactctgctcgaggccgacccctactcgaagtgggccatcctgaatgtgatgggcaaggatttccctgtgaatgaagtgttcacccagttcctggccgacaatcatcaccaggtccgtatgctcgctgccgaatctattaaccgactgtttcaggatacgaagggagattcctcccggctcctgaaagcgcttcctctcaagctgcagcagacagcctttgagaatgcatacctcaaggcgcaagaagggatgcgcgaaatgtctcacagtgctgagaaccccgaaactctggacgaaatttacaatcgcaaatccgtcctgctgaccctcattgcagtagtgttgtcgtgttctcctatatgcgaaaagcaagcactgttcgcactatgcaagagtgttaaggaaaatggcttggagcctcacctggtaaaaaaggtcctcgaaaaggtgagtgagacattcggctatcggcggctggaagattttatggcttctcacttggattatctcgtccttgaatggcttaacctgcaggacactgaatacaacctgtcttcatttcctttcatcttattgaactacacaaacatcgaggatttttaccgctcatgttacaaggtccttattcctcacttggtgatcagaagtcatttcgatgaggtcaagagtatcgctaaccaaatccaagaggattggaagtcacttctgactgactgtttcccaaagattttagttaacatcctgccttacttcgcgtacgagggaacccgcgacagcggaatggcccagcagagggagaccgcaacaaaggtgtacgatatgctgaaaagtgaaaaccttctaggtaaacagatcgatcacctgttcatttcaaatttgcccgaaattgtcgttgagctattgatgacactgcacgaacctgccaacagttccgctagccagtccacggacttgtgcgacttctccggcgatttggatccagctcccaaccccccgcacttcccaagtcacgtaatcaaggccacatttgcatacatcagcaattgtcacaagaccaaactcaagtccattctggaaattttgagcaagtcaccagactcataccagaagatcctgttagcaatctgtgaacaggcagctgagacgaacaatgtatacaaaaagcacaggatacttaagatctaccatctattcgttagtcttctcttgaaagatataaagtccggtctgggcggcgcgtgggcctttgttctgagggatgtcatctatacgctgattcactatattaaccagaggccctcatgtatcatggacgttagtctgcgctcgttctctctgtgttgcgatctgctttcccaagtatgtcaaacagccgtgacttactgcaaggatgccctcgagaaccatctgcacgttatcgtagggacactgattcccctggtgtacgaacaagtggaggtccaaaaacaggtcctagatttgctgaagtacctagtaattgataataaagataacgagaatctttatatcactattaaactgctggaccccttccctgaccacgtggtgttcaaagacttgagaatcacacagcagaaaataaagtactctagagggccatttagtctcctggaggagataaaccacttcctgtcggtgtctgtgtacgacgccttgcctctgaccagactggaaggcctcaaggacctgaggaggcagctggagctgcacaaggaccagatggtggacatcatgcgggcctcccaggacaatcctcaggatggcatcatggtgaaactcgtggtgaatcttcttcagttgagtaagatggctatcaatcacaccggtgagaaagaggtgttagaggcggtgggaagttgcctcggggaagtggggcccattgactttagtaccatcgcgatccagcacagcaaagacgctagctatacaaaggcgttaaaactctttgaagataaggagctacagtggacttttatcatgctgacatacctgaataatactcttgtggaagactgtgtgaaggtccggtccgccgccgtgacgtgccttaagaacatcctggccactaagactggccactcgttttgggagatttacaagatgactacggacccgatgcttgcttacctgcaaccttttagaactagtcgcaagaagttcctcgaggtgcccagatttgacaaagagaacccttttgagggattggacgatataaatctgtggatccccctttctgagaaccatgatatttggatcaagactttgacctgtgccttccttgattcgggcggtaccaagtgtgaaattctacagctgctgaagcctatgtgtgaggtgaagacagatttctgccaaactgtccttccttacctgatccatgacatcttactgcaggacaccaacgagagctggcgcaatctgctttcaacacacgtccaggggttctttacaagctgcctccgccacttttcgcaaacctccagatcaacgacgccagctaatcttgattcagagagcgagcacttttttcggtgctgtctggacaagaaatcacagcgcacgatgttggcggtggttgactatatgagacggcagaaacgccccagcagtggaaccattttcaacgacgccttttggctagacctgaattatctggaggtggccaaggtggcccaatcatgcgctgctcacttcaccgcattgctatacgcagagatctacgctgataagaagtccatggacgaccaggagaagcgatctctcgcattcgaggaagggtctcagaataccacaatctcttccctgagtgagaagagtaaagaggaaacgggtattagtcttcaagacctgttgcttgaaatctataggagtatcggagagccggactcgttatatggctgcggcggcgggaaaatgttgcagcctatcactcggttgcgaacgtacgagcacgaggccatgtgggggaaagcactcgtgacatatgacctcgagaccgcgattccttccagcacccggcaagccggcataattcaggccttgcagaacctgggactctgtcacatccttagcgtgtacttgaagggtctggactatgaaaataaggactggtgtcccgaattggaggaacttcactaccaggcagcctggcgcaatatgcagtgggatcattgcactagcgtgagtaaggaagtggagggaacaagttaccatgagtctctgtacaacgcgctgcagtcactgcgggatagagagttttctactttctatgagagtctgaagtacgcccgcgtaaaagaggtcgaagagatgtgcaaacgaagtctggagtcagtgtactcactgtaccccaccctgtcgaggctccaggccatcggagagctcgagagcatcggcgagttgttcagtcgaagcgtcactcaccggcaactttctgaggtatacatcaagtggcagaaacactcacagctccttaaagattccgacttttcctttcaagagcctattatggccctacggacagttatcctagaaattctgatggagaaggagatggataatagccagcgcgagtgtatcaaggatatcctcaccaaacaccttgtggagttgagcatcctggccaggacattcaaaaacacccagctgccggagagagccattttccaaatcaagcagtacaatagcgtgagctgtggcgtttccgaatggcagctggaggaggcacaggttttctgggccaaaaaagagcagtccctcgcacttagcattctcaagcagatgataaagaaactcgacgcatcctgcgctgctaacaatcctagtcttaagctgacctacacagagtgcctgcgagtctgcggaaactggctggccgagacctgcctggaaaacccagccgtcataatgcagacatacctggaaaaggccgtagaggtggccgggaactatgacggagagagttccgatgaactaaggaatggcaagatgaaggccttcctgtcgttagcacgctttagcgacacccagtaccagcgcattgaaaattacatgaagtcatccgagttcgaaaataagcaggccctcctcaagagagctaaggaggaggtgggcttattgagagaacacaagatccagaccaataggtatacagtgaaggttcagagggagctggaactagatgagctggcgcttcgtgcactgaaggaggacaggaaacgattcctttgcaaggccgtggagaactacattaattgcttattatctggggaggaacacgatatgtgggttttcaggctgtgtagtctatggctcgaaaactctggcgtgagcgaggtcaacggcatgatgaagagagacggcatgaagatacccacatataagtttctgcctctcatgtatcaattggccgcgcgcatgggaactaaaatgatgggcggattaggctttcacgaggtgctgaataatctgatttcacgtatttctatggaccacccacaccacaccctatttatcattttagcactcgcaaatgctaacagagatgaatttctgacaaaaccagaagtggctaggaggtctcgtataacaaagaatgttccaaaacagtcttctcaacttgatgaagataggactgaagccgcaaatagaattatttgcacaatccgaagccggagaccacagatggtgcgaagtgtggaagctctatgtgacgcgtacataatcctggcaaatcttgatgccacacagtggaagacccaacggaagggcatcaatatacctgccgaccagccaattacaaagctcaaaaatttagaggatgtggtagtgccgaccatggaaatcaaagtggatcacacaggtgagtatgggaacttagtgacaatccagagttttaaagccgagtttagactggccgggggtgtgaatctgccaaagattattgattgcgtggggagtgatgggaaagagaggaggcaactcgtgaagggaagagacgacctgagacaggatgcggtgatgcagcaggtttttcagatgtgcaacacactgttacaaagaaatacagagaccaggaaacggaaattaaccatttgcacgtacaaggtggttcctttaagccagcggagcggggttcttgaatggtgtacagggaccgttcctatcggggaattccttgtgaataatgaggatggagctcacaagaggtaccggcctaatgactttagcgctttccagtgccagaaaaagatgatggaagtgcagaaaaaatctttcgaggagaagtacgaggtgtttatggatgtctgccagaatttccagccggtgttccggtacttttgtatggagaaatttctggaccccgccatctggttcgagaaacggctggcatacacccggtcagtagccacttcgtccattgtcgggtatatactcgggctgggcgaccgccacgtacagaatatcctcatcaatgagcaatccgcagagctggttcacatcgacctgggcgtcgccttcgagcagggcaagattctgcctacacctgaaacagtcccgttcaggctgactcgagacatagtcgacggcatggggatcactggggtggagggtgtctttaggcgctgctgtgaaaagacaatggaggtcatgcggaactctcaggagacattactaactatcgtcgaggtcctactgtatgaccccctgtttgactggactatgaaccctcttaaggctctgtatctgcagcagcggcctgaggacgaaaccgaactgcatcccactctcaacgcggatgatcaggagtgcaaacggaatctgtccgacatcgatcagtcatttaacaaagtggctgagcgtgtgctgatgcggctacaagagaagctgaagggagtggaagagggcacagtcttatccgtgggcggacaagtaaacttgctgattcagcaggctatcgacccaaagaacctcagccgtctgttccccggttggaaagcgtgggtgtag

SEQ ID NO: 292069 - DNA, 417 bp, Artificial Sequence
  derived and/or modified sequence
atgaccctgcacgagcccgccaacagcagcgccagccagagcaccgacctgtgcgatttctcgggggacctcgatcctgcccctaatccacctcattttccaagccacgtcataaaagctacgtttgcctatatctcaaattgtcataaaaccaagctgaaatccattctcgaaattctcagcaagtctcctgattcttaccaaaagatactgctggccatctgcgagcaggccgccgagaccaacaatgtgtataagaagcacagaatcctgaagatataccaccttttcgtgtctctgctgctcaaggacatcaaatcagggctaggcggcgcttgggccttcgttttacgcgatgtaatttatacccttatccactatattaaccaaaggaaactgaccattttctcccagtag

SEQ ID NO: 292070 - DNA, 9171 bp, Artificial Sequence
  derived and/or modified sequence
atgagcctggtgctgaacgacctgctgatctgctgccggcagctggaacatgacagggccacagagagaaagaaggaagtcgagaagtttaagcgtcttattcgcgatcccgagacaatcaagcacctggaccggcattccgactccaagcagggcaagtacctgaactgggatgcagtgttccggttcctgcaaaagtatatacaaaaggagactgagtgcctgcggatagccaagcctaacgtttctgcctccactcaggcctcacggcagaagaagatgcaagaaatctcaagcttggtgaaatacttcattaaatgcgcgaatagacgggctccaagactaaaatgtcaggagctgctgaattacatcatggatactgtaaaggatagctcaaatggcgctatctacggcgcggactgcagtaatatcctactgaaagacattttatcagtgcggaagtactggtgtgagattagccaacaacagtggctggaactgttctccgtatatttccggctctatctcaaaccgagtcaggatgtgcatagggttcttgtggcaaggataatccacgccgtcacaaaagggtgctgttcacagaccgacggcctgaattcaaagtttctggatttcttcagtaaggctattcagtgcgcaagacaggagaagtccagcagtggcctcaaccacatcctcgctgctctcacaatcttcctgaagacgttagctgtgaacttcagaatcagggtttgtgaattgggggacgagattctgcccactctgctctatatctggacccaacatcgtcttaatgactccctgaaggaagttattatcgagctttttcagctgcagatctacattcatcaccctaagggcgcaaagacccaggagaagggtgcctatgagagcacaaaatggcggtctatcttatataacttgtatgacttactggtaaatgagataagtcatattgggtcgaggggtaagtacagctccggcttccgcaacatcgccgtaaaagagaaccttatcgagctgatggctgacatttgtcatcaggtctttaacgaagataccaggagtttggaaatttcccaatcctacacgaccacccagagggaatcttctgactattccgtcccatgtaagagaaagaagatcgaacttggctgggaagtgataaaagaccacctccagaagagccagaatgattttgacctcgtgccttggcttcaaatcgccacacagctgattagcaaatatccagcctcactgcctaactgtgaacttagccccctgctgatgatcttaagccagctcctgcctcagcagagacatggtgaacgcactccatacgtgcttagatgtctgacagaagtcgctctctgccaggacaaaaggtcgaatcttgaatccagccaaaaatcagatctgctgaagctgtggaataaaatatggtgtatcacatttagaggtatcagctcggaacagattcaggccgaaaacttcggcctgctgggggcgatcatccagggtagtctggtcgaggtggatcgcgagttctggaagttattcaccgggtcggcctgcaggccatcctgtccggccgtgtgttgcctcaccctagccctcaccacatccatcgtccccgggaccgtaaagatggggattgaacagaatatgtgcgaggtgaaccggtcattttctctgaaggagagtataatgaagtggctgctcttttatcagctggaaggcgatcttgagaatagcaccgaagtgccccccatcttacattctaatttcccccacctggtcctggaaaagatcctggtgtcactcaccatgaagaactgtaaagcggcaatgaacttcttccagtctgtgcccgagtgtgagcaccaccagaaggataaggaagagttgtctttctcagaggtcgaagagctgttcctgcagactacttttgacaagatggacttcctgaccatcgtgcgtgagtgtggaatagagaagcaccagtcatccatcggcttttcggtgcatcaaaatttgaaggagtcactggacaggtgcttgttaggcctgtctgagcagctcctgaataattacagcagtgagattactaacagcgagacattggtgcgctgctctaggctactggtaggcgtcctcgggtgttattgttacatgggcgtgattgccgaggaagaggcctataaatctgagctcttccagaaggccaagagccttatgcagtgcgccggagagagcataaccttatttaagaacaagactaatgaggagtttcgtataggcagtttgagaaatatgatgcagttgtgtacacgatgtctgtccaactgcaccaaaaagtcaccaaataaaatcgccagcgggttcttcctccgtctccttaccagcaagcttatgaatgacattgcggatatctgcaagtcactggcttccttcatcaagaagccctttgataggggagaagtggaatccatggaagacgatacaaacgggaacctgatggaggtcgaggaccagagttcaatgaacttgtttaatgactacccagattcaagtgtcagtgacgcaaacgagcccggagagtcacaatctacaatcggtgccattaaccccctcgctgaagaatatctgtccaaacaggatctcttgtttctggacatgcttaaattcctgtgtctgtgcgtaactactgcccaaacgaacactgttagcttcagggctgccgatatccgacgcaaactacttatgctgatcgactcatctactcttgagcccactaaaagcctccacctccacatgtatctcatgttgctgaaggaactgcctggtgaagagtatcccttgcctatggaggacgttctggaacttcttaaaccgctgagcaatgtgtgctctttgtacagacgcgaccaggatgtgtgcaagacaattttgaatcacgtgctgcatgtggtcaaaaatttgggtcaatcaaatatggactctgagaacactcgagatgcacagggccaatttctgaccgtgatcggggcattttggcacctgacgaaggagaggaaatatatttttagtgtgagaatggccttggtcaattgtcttaaaacgctgttggaggccgatccgtatagtaagtgggccatcttgaatgtgatgggcaaggattttcccgtgaacgaagtttttacgcagttcctggccgacaaccaccaccaggtccggatgcttgctgccgaatccatcaacaggctgttccaggataccaagggagacagttcgcgactattgaaggctttgccactcaaactccagcagacggcgttcgaaaacgcctaccttaaagcacaagagggcatgagagaaatgtcgcactccgccgaaaatccagagaccctcgatgaaatctataatcggaaatccgtactgctcaccctgatcgccgtggtgctgtcttgttctcctatttgcgaaaagcaggctctcttcgccctctgtaaatccgtgaaggagaacggactggagccccacttagtcaaaaaagtcttggagaaggtctccgagacgttcggctaccgcagactggaggatttcatggcctcgcacctggattatctggtgcttgagtggttgaacctccaggataccgagtacaacctatccagctttcccttcatactgttgaattatacaaacattgaggacttttataggagttgctataaggttcttattccacatttagtcatacgctctcattttgatgaggtcaagtccattgccaaccagatccaggaggactggaagagtctcctgacggactgttttcctaagatccttgttaacatactgccatatttcgcatatgaaggaacgcgagatagtgggatggcacagcagcgcgagaccgctaccaaggtatatgacatgttgaaatccgaaaacttgctcggaaaacagatcgatcacttgtttatttcaaatctgcccgagatcgtcgtggagttgctgatgaccctgcacgaaccggcaaattcaagtgcaagccaatctactgacctgtgtgacttctctggggacctcgacccagctccgaaccctcctcacttcccaagccatgtgatcaaggccacctttgcgtacattagcaattgccataagaccaaacttaagagcatcctcgaaatcctgagtaagtctcccgacagttatcagaagatcctactcgccatttgcgagcaggcagctgagacaaacaatgtctacaaaaagcataggatcctcaagatctaccatctctttgtgtccctattactgaaggatatcaaaagcgggctaggcggggcctgggctttcgtccttcgggacgtgatatacaccttgattcattatattaaccagcggcccagctgcataatggacgtatctctgcggtcttttagcctttgctgcgaccttctaagtcaggtctgccagacggccgtcacgtactgtaaagacgctttggaaaaccatctccacgtgattgtgggaacattgatccccttggtgtatgaacaagtcgaggtccagaaacaggttttggatcttctgaaatatctggttattgataacaaggacaatgagaacctatacattaccatcaagctcttggacccattccctgatcacgtggtgttcaaggacctccgaattacacagcaaaagatcaaatacagcagggggcccttttctctgctcgaggaaattaatcacttcttatccgtgagtgtgtatgatgctctgcccctgacgagactcgagggacttaaagacttgagacgccaacttgagctccacaaagaccaaatggtcgatattatgcgcgctagtcaggacaaccctcaggacgggatcatggtcaagctggtagtgaacctccttcagctgtctaagatggctattaatcatactggagaaaaggaggttctggaggccgtgggaagttgcctcggcgaggtggggcctattgactttagcaccattgccatccagcattccaaggacgcctcctacacaaaggctcttaaactgttcgaggacaaggagctccagtggacttttattatgttaacttatctgaacaatactctggttgaggactgtgtgaaggtccggtctgcagctgtgacctgcctgaagaacatcctagccacaaaaaccgggcattccttttgggagatatacaaaatgaccaccgatcctatgctggcctatctgcagccttttagaacttcacgcaagaaatttctagaggtccctaggtttgataaggagaatccattcgaaggcctcgacgacatcaacctctggattccgctttctgagaatcatgatatctggattaaaactctcacatgtgctttcctcgatagcggcggtactaagtgcgagatcctccagctgttaaagcctatgtgcgaagtgaagaccgacttttgtcagactgttcttccatatctcatccatgatatcttgctccaggacaccaatgaatcgtggaggaatctgctgtctactcacgtgcaggggttcttcacaagctgtctccggcatttctctcagacttctcgctccactacacctgcaaatctggattctgagagtgagcacttttttcggtgttgcctggataaaaagagtcaaagaactatgttggctgtggtggattacatgaggaggcagaagaggccaagcagtggtactatctttaacgacgccttttggcttgacctaaattaccttgaagtggccaaggtcgcgcaaagttgcgcggcccattttacggcccttttgtatgccgagatttacgccgacaagaaaagtatggacgatcaggagaagaggagcctggcctttgaagaagggagccaaaatacaaccatttcttcgctcagtgagaaaagcaaggaggagactggcatatccctgcaggatttgttgctggagatctatagaagcatcggcgagccagattccctttacgggtgcggaggcggcaagatgctccagccaatcactcggcttcggacttatgagcatgaagccatgtggggtaaggccctggttacatacgatttggaaactgctattccttcgagtacgcgtcaggccgggattatccaggccctacagaacttaggcctctgtcacatcctgtctgtgtacttaaaggggcttgattacgagaacaaggactggtgtccagaattggaagaactccattatcaggcagcctggcggaacatgcagtgggatcactgcaccagcgtgagcaaggaggttgaaggtactagttatcacgagtccctctacaacgccctccagtcccttcgcgacagggaattttccacattctatgaaagcttgaagtacgcccgggttaaagaggtggaagaaatgtgtaagcgcagcttggagagtgtgtactcactttatcctactctgtctaggctgcaggccatcggggagcttgagtctattggcgagctgttttcccgatccgtgacccaccgccaactatccgaagtttatattaaatggcagaagcattcccagctgctgaaagacagcgacttttcctttcaggaaccaatcatggcactgaggacagtgatacttgagatcttaatggagaaggagatggacaactcccagcgcgagtgtattaaagatatcctcacgaagcacttagtagagctatcgatcctggcacggaccttcaagaacacacagcttccggagcgggctatatttcaaattaagcaatataattcagtgtcttgcggggtaagcgaatggcaactcgaagaggcccaggttttctgggctaagaaggaacagagccttgcgctgtccattctcaaacagatgattaagaaactcgacgctagttgcgcagccaacaacccatctttaaaacttacctatactgagtgtttgagagtgtgcggcaactggctcgctgaaacctgcctagagaaccccgcagtgattatgcagacctaccttgaaaaggctgtggaggttgccggaaactatgatggtgaaagctccgatgaactcaggaatggaaaaatgaaagcatttctgtcccttgcccggttttccgatacccaatatcaacgtatcgagaattacatgaagagctctgaatttgaaaataaacaggcgttactgaaacgcgctaaggaggaggtggggctactgcgggagcacaagattcagaccaaccggtacaccgtgaaagttcagcgcgagttagagttggacgaactcgccctccgggctctgaaagaagaccgcaagagatttctgtgtaaagcagtcgagaactacatcaattgccttttgtcaggggaggagcatgacatgtgggtcttccggctctgttctctgtggttagaaaactcaggcgtcagtgaggtgaacggtatgatgaaacgggatggtatgaaaattcccacgtacaagttcctcccactaatgtaccagcttgccgctagaatgggaaccaagatgatggggggtttaggctttcacgaggtgcttaacaatctgataagcagaatttccatggaccacccgcatcacactctatttattatactcgccctggcgaacgcaaatcgggacgagttcctcaccaagcctgaggtagcgcgcaggtccagaataacgaaaaacgtgcccaagcaatcctctcagttggacgaagatcgcacggaggccgcgaaccggatcatctgtactatacggtcgcgcagacctcagatggtacgctctgttgaggccctgtgcgacgcatatattatcctcgctaacctcgacgccacacagtggaagacccagcgaaaagggatcaacatccccgcagaccagcccatcacgaaactgaagaatcttgaggacgtcgtggtccctacaatggaaattaaggttgatcacacaggtgagtacggaaaccttgtgaccatccagtcatttaaggctgagttccgactggccggcggagtcaatctcccgaagattattgactgtgtgggaagcgacggcaaggagaggagacaactagtaaaggggagggacgacctgcgccaggacgccgtcatgcagcaagtcttccagatgtgcaatactctgctccaacgaaacacagagacacggaagagaaagctgacaatctgtacatataaagtggtccctctgtcccagcgctccggcgtcctggagtggtgtaccggcactgtaccaattggcgaattcttggtgaataatgaagacggggcccacaagagatatcgtcccaacgacttttccgccttccagtgtcagaaaaagatgatggaggtccaaaagaagtccttcgaagagaagtacgaagtgtttatggacgtttgtcagaattttcagcctgtgttccggtacttctgcatggagaagttcctggatcccgccatctggttcgagaaaaggttggcttataccagatccgtggctacttctagtattgtcggttatatcctgggactcggcgacaggcacgtccaaaacattctgattaatgagcagagtgctgaactcgttcatattgacctgggtgtcgcattcgagcagggcaaaattctaccaacacctgagacggtgccattccggctgacccgggatattgttgacggcatgggcataaccggcgtagaaggggttttccgacgttgctgtgaaaaaacgatggaagttatgagaaattcacaggagacactcctcaccattgtagaagtgctgctttatgaccccttattcgactggacaatgaaccctctcaaagcattgtacttgcagcagagaccagaggacgaaacggagctacatccaaccctgaatgcagacgatcaagagtgtaaaaggaatctgagcgatatagatcaatcattcaacaaagtggctgagcgcgtactcatgcggctgcaggaaaagctaaagggggtcgaagaaggtaccgtgttgagcgtggggggacaggtgaatctgttgattcagcaagccatcgatcccaaaaacctgtcccggctgtttccaggttggaaggcctgggtgtag

SEQ ID NO: 292071 - DNA, 282 bp, Artificial Sequence
  derived and/or modified sequence
atgagcctggtgctgaacgacctgctgatctgctgccggcagctggagcatgaccgtgcaacagaacgtaaaaaggaggtagaaaagtttaaacgccttattagagatccagagacgatcaaacatctggatcggcacagtgactccaaacaaggaaagtatctcaattgggacgccgtcttcaggtttctgcagaagtacatacagaaagagaccgaatgcctgcgaatagccaagccgaacgtgagcgcgagtacacaggcaagtcggcagaaaaagtag

SEQ ID NO: 292072 - DNA, 9171 bp, Artificial Sequence
  derived and/or modified sequence
atgagtctggtgttaaacgacctgctaatctgctgccggcagcttgaacacgacagagctaccgaaagaaagaaagaggtggagaagtttaagaggctcatcagggacccagagactataaagcacctcgatcggcacagcgattccaaacagggaaaatatttgaactgggacgctgtgttcaggtttcttcagaaatatattcaaaaagagaccgagtgtctgcggattgcaaagcccaatgttagtgcgtcaacacaggcaagcaggcagaagaagatgcaggaaatcagttccctggtaaaatattttatcaagtgcgcaaaccggcgtgcccctagactgaagtgtcaggagctgctcaattatattatggacacagttaaggacagttccaatggagccatctacggggctgattgttccaatatcctcctgaaagacatattatcagtgcgaaaatactggtgcgagattagccagcagcagtggctagagctgttctctgtctacttccggttatacctgaagcccagccaggacgttcacagggtgctggtggccaggatcatccacgcagtgaccaagggctgctgcagccagactgacggattaaatagtaagtttcttgacttttttagcaaggccatccagtgtgcccgacaggagaaatcatcttcgggcctgaaccacatattggccgctttgacaatctttcttaaaacattggccgtgaattttagaatcagggtttgcgagcttggcgatgagatactgccaacgctgctatatatctggacgcagcataggcttaatgattctttgaaggaagtgataatagagctgtttcagttgcagatatacatccaccaccccaagggggctaagactcaagaaaagggggcatacgaatcaaccaagtggcgatctatactgtataacctctatgacctcctggtgaatgaaatctcccatatcggttcccgcggtaagtactcaagtggcttcagaaacattgcggttaaggaaaatctgattgaactgatggccgatatatgccaccaggtgtttaacgaagacactagatcactggagatctcgcagagttacactacaacccagcgggaatctagcgactattctgtgccatgtaaacgaaagaagatagaacttggctgggaggtaatcaaggatcacctacagaaaagtcagaatgatttcgatctcgtgccttggctccaaattgcaactcaactgattagcaaataccccgcatcactgcccaactgcgagctgagtcccctgctgatgatcctgagccagctgctgccgcagcaacgtcacggcgagcgaaccccatacgttctccgttgtcttaccgaggtggccttgtgtcaggataaaaggagcaaccttgagtcttcccagaaaagcgatctgctgaaactgtggaacaaaatttggtgcatcacctttcgaggtatcagcagtgaacagattcaggctgagaacttcggcttattgggcgcaatcatccaggggagtcttgtagaggtggatcgggagttttggaaactgttcactggcagtgcctgccggccttcttgccctgctgtgtgttgcctgacacttgccctcaccacgtcaatagtgccgggaaccgtgaaaatgggtatcgaacagaatatgtgcgaagtcaaccgcagcttcagccttaaagaatcaatcatgaaatggctgctgttttatcagctggagggggatctggaaaactcgacagaagtgcctcctattctgcacagcaacttcccacatctggtgttggaaaagatccttgtgtccctgaccatgaaaaactgtaaagccgctatgaattttttccaatctgtgcctgagtgtgaacaccaccagaaggacaaggaagaactgtcatttagtgaagtggaggaactatttctgcagacgacatttgataagatggactttctgaccatcgtgcgagaatgtgggattgaaaaacatcagtccagcattggattctccgtccatcaaaacctgaaggagtcacttgataggtgtctgttaggattgtccgaacaactactcaataactattcttccgagattaccaactcagaaacgttagtacgctgtagtaggctgcttgtgggcgtgctgggctgctattgttacatgggcgtgatcgccgaggaggaagcctataaatccgaactgtttcagaaagcaaagagtttaatgcagtgcgccggagagtccatcaccctatttaagaacaaaacgaacgaggagttccgcatcggttccctccggaacatgatgcagctgtgcaccaggtgcctgtcaaattgtacaaagaaatctcccaacaaaatcgcctccggattcttcttacggctccttacaagtaaactgatgaatgacattgctgatatttgcaaatcactggcttctttcatcaagaaaccttttgatcgaggggaggttgagagcatggaagacgataccaatgggaatttaatggaagtggaggaccagagttctatgaatctctttaatgattaccctgactcatctgtatccgatgctaatgaacccggagagtcccaaagtaccatcggcgctatcaatcctctggccgaggagtacctctcgaagcaggatcttctcttcctggacatgctgaaattcctgtgcctgtgcgtcacaaccgctcagacaaacaccgtctcgtttcgggcagccgatatacgcagaaaactcttaatgttgatcgattccagcacccttgagccaacaaagagcctgcacttgcatatgtaccttatgctgctcaaggaactgccaggcgaggagtaccctctacccatggaggatgtgctggagctcctcaaaccactgagcaatgtctgttcactttacagacgagaccaggacgtgtgtaagacaatcctgaaccacgtccttcacgtggtgaagaatctgggacagagcaatatggatagtgagaataccagggatgctcaaggacagtttctgactgtgatcggtgcattttggcacctaaccaaggaacggaagtacatatttagtgttagaatggcactggtgaattgcctgaaaacacttcttgaagccgacccctattcaaaatgggccatcctcaacgtgatgggcaaggattttcccgtcaatgaagtgttcactcaatttctcgctgataaccaccaccaggtcaggatgctcgccgcagaatcaatcaacagacttttccaggacaccaagggagatagttccaggctccttaaggccttgcctctgaaacttcaacagaccgcatttgagaacgcatacttgaaggcgcaggaaggaatgagggaaatgagtcactccgcggagaaccctgaaacgctcgatgaaatctacaataggaagtccgtgctcctcaccctaattgctgtagtgctctcttgcagccctatttgcgagaaacaagccttgtttgcactctgcaagtccgtgaaagaaaacggattagagccgcacctggtaaagaaagtcctggagaaggtgagcgagacatttggctatcgtagactagaagactttatggcatcccacctggactacctggtacttgaatggctgaacctgcaggatactgagtacaacctttcctctttcccgttcatcttattaaattacacgaacatagaggatttctaccggagttgttacaaagtgttaattccccaccttgttatccgtagccacttcgacgaggtaaaatctatcgccaaccaaatccaggaagattggaaatctctgctaactgattgctttccaaaaattcttgttaacatccttccctatttcgcctacgagggcacaagggactccggcatggcgcagcagcgggagaccgcaacgaaggtttacgacatgcttaaaagcgagaaccttcttggcaaacagattgaccatcttttcatcagcaacctgcccgaaatagtggtagagttgctgatgactctgcatgaacccgcaaatagctctgcctcccagagtaccgacctctgtgatttctctggtgatctggatcctgctccaaatcctccgcacttcccctctcacgtgatcaaggccacttttgcctatatctctaactgccataaaacaaagctgaagtcaattctggaaatactgtctaaaagccctgattcttatcagaagatcttgctggccatctgcgagcaggctgcagaaactaataacgtctacaaaaagcacagaattctcaagatctatcacctttttgtaagccttttactaaaagatattaagagtggactgggcggagcttgggcatttgttctccgtgacgtaatttataccttgatacactacatcaaccagcgtcccagttgtattatggacgtctcgctgcgcagttttagtttgtgctgcgacctgctgtcccaagtttgtcagaccgcggttacctactgtaaggatgcgctagagaatcaccttcatgttatcgtcggaacactaatcccgctggtctatgagcaggtggaggtgcagaagcaggtgctagatttgctcaaatacctggttatagataataaagataatgagaatttgtacataaccatcaaactgctagacccctttcccgaccatgtcgtgttcaaggatttgagaattacccagcagaagattaagtatagcaggggccctttttccctccttgaagagataaatcacttcctctctgtgagcgtatacgacgccttgcctcttaccaggctagaaggcctgaaagacctgcgtagacaactggagttgcacaaagatcagatggtcgatatcatgagagcgagccaggataatccgcaggatggaataatggtcaagctagttgtcaatctgctgcagctgtccaagatggccattaaccatactggggaaaaagaggtgttggaggcggtaggcagctgtcttggagaggtggggccaatcgacttctcaactattgccatccagcattctaaagatgcctcttataccaaagctctaaaattgtttgaggacaaggagctgcagtggacatttataatgttgacctacctcaataacactcttgttgaggactgcgttaaggtccgatctgcggctgtcacttgtttgaagaatatccttgctacaaagacaggccacagcttctgggagatctacaagatgaccaccgatccaatgctggcgtacttgcaaccatttaggacttcccgcaaaaagttcttggaggtacctcggttcgataaggagaaccccttcgaagggctagatgatattaacctctggattcctctctccgagaaccatgatatctggatcaagacgctgacctgcgctttcttggacagcgggggaacaaaatgcgagatcttacagcttctgaaacccatgtgcgaggttaaaaccgatttttgtcagacagttctaccatacctgatacacgacattctactgcaggatacaaatgaatcctggagaaatctgctgtccacacacgtccagggattcttcacttcctgcttgcggcatttctcccagacctctcgcagcacaacaccagccaatctcgattctgagtctgagcattttttccgctgttgtttagacaagaaaagtcagcggactatgctggccgtagtcgactacatgaggagacagaaacgtccatcctctggaactatctttaatgacgcattctggttagacttgaattatttggaagttgctaaggtggcccagagctgcgcggcacactttacagcattattgtatgctgagatctatgccgacaagaaaagtatggatgaccaggagaagagaagtcttgcattcgaggaaggatctcagaataccactatctcctctttgagcgaaaagtctaaggaggagacaggcatatccttgcaggaccttctgctggaaatctaccgtagcattggtgaaccagatagtctctatgggtgcgggggaggcaaaatgctgcagcctatcacccgccttcggacctacgagcatgaggccatgtggggaaaagcacttgtcacctatgacttggagaccgcgattcccagcagtactcggcaggccggtattattcaggcactacaaaacctggggctctgccatattcttagcgtctatctcaaaggtcttgactatgaaaataaggattggtgtccggagcttgaggagctccactatcaggccgcttggagaaatatgcaatgggatcactgtaccagcgtctctaaggaggtggaagggacctcttatcacgagagcctgtacaacgcgctgcagagtctgcgggatagagagtttagtaccttctatgagagtctgaagtacgccagagtgaaggaggtggaggagatgtgcaagcgctccctggaatctgtctattcactatacccaaccctttcacggctccaggccatcggtgagctggaatctatcggggaacttttctcaagatccgtcactcacaggcaactgagcgaggtgtatatcaaatggcagaagcattctcaactgttaaaagatagtgattttagtttccaggaaccaattatggcgctccgaactgtgatactggagattttgatggaaaaggagatggacaatagtcagcgtgagtgcatcaaagacatattgactaaacatctggtggaactgtctatcctggccagaactttcaaaaatacccagttacctgaacgggctatcttccagattaaacaatacaattccgtcagttgcggcgtctctgaatggcagctcgaggaagctcaggtgttctgggcgaaaaaggagcagtcattggccctcagtattttaaaacagatgatcaaaaaacttgatgcgagctgtgcagccaataacccatcgctgaagctgacctacacggagtgtcttagagtctgtggaaactggctggcggaaacctgcctggagaatcccgctgtaattatgcagacatatctggagaaggcagtggaggtagccggtaattacgacggggagtcaagtgacgagctccggaatgggaagatgaaagccttcctgtcccttgcacgctttagcgatacgcaataccagcgcatcgaaaattacatgaagagttctgaattcgaaaacaagcaagccttgctaaaaagagccaaagaggaggtgggcctgttacgggagcataagatccagactaacagatatactgtgaaagtgcagagagagttagagctggatgaactcgccttacgcgctctgaaggaggaccgcaagcggtttctgtgcaaggccgtggagaattatattaattgccttctctccggtgaggagcatgatatgtgggtcttccgcctctgttccctctggctcgaaaactctggcgtgtccgaggtcaacggaatgatgaagagggatggtatgaaaatccccacctacaaattcctgcccctcatgtaccagctggctgctcgtatgggcaccaaaatgatggggggtctaggctttcacgaagtactgaacaatctgatttctaggatctctatggatcatccgcaccacaccttgttcattattttggccctggcgaacgctaatagagacgagtttctgactaaacccgaggtggcgcgacgatctagaattaccaaaaatgtgcccaagcagtcatctcagcttgatgaagatcgaacagaagctgctaacaggatcatctgtaccattaggagccggcgaccacagatggttcgatctgttgaggcactgtgcgatgcatacatcattctggccaacctggatgccactcagtggaagacacagcgcaaggggatcaacatacctgccgaccaaccgatcaccaagctaaagaacttagaagacgtggtggtgccgacaatggaaattaaagtcgatcataccggcgaatacgggaatctggtgacaattcaaagcttcaaggcagagtttcgcctggccggtggtgtcaacctgcccaaaattatcgactgtgtcggctcagacgggaaggagcgtcggcaactggtcaaaggtcgagacgacctgcgccaggatgccgtgatgcagcaggtttttcagatgtgcaatactctactgcagcgtaacacagagaccaggaagaggaaacttacgatttgcacctacaaggtggtgcccctgtcacagcggagcggtgtcctggaatggtgtacaggaactgtgcctatcggcgaatttttggtcaacaatgaagatggcgctcataaacgttatcgacccaacgatttctccgcctttcagtgccagaagaaaatgatggaggtgcagaagaagtcctttgaggaaaagtacgaggtgtttatggatgtgtgtcagaactttcaacccgttttccggtatttttgtatggagaagtttttagaccccgcaatatggtttgagaaacgcctcgcctatactcgcagtgtcgcgacgtcttctatcgtgggatatatactaggcctgggagaccgtcatgtgcagaacattttaatcaatgaacaatctgcggagctggtccacatcgatctgggcgtggccttcgagcagggaaagatcctgccaacaccagagaccgtacccttccggctgactcgagacattgtggacggtatgggaatcaccggcgtcgagggagtgtttcgcaggtgctgcgagaagacaatggaagtaatgcgaaattcccaggagacactgcttactattgtcgaggtgctgctgtacgaccccctgttcgactggacaatgaaccccctaaaggcgctttacttacagcagcgcccagaagatgagactgagctccaccctaccttgaacgccgatgaccaggaatgtaagaggaatctcagcgatattgaccaaagctttaataaggtcgccgaaagagtcctgatgaggctgcaggaaaaactcaaaggagtggaagagggaaccgtactgagcgttggcggacaggtgaatttgctcatccaacaagctatcgatcctaaaaacctgtctcggctgtttcctggatggaaggcatgggtatac

SEQ ID NO: 292073 - DNA, 417 bp, Artificial Sequence
  derived and/or modified sequence
atgacccttcacgaacctgcaaactcaagtgcctcacagtccactgacttgtgcgatttttcaggggacctggacccagctcctaaccctccccacttcccgtcacacgtgataaaagccacattcgcttacatcagcaactgtcataagaccaaactcaaaagcatactcgagattctgtccaagagtcctgactcctaccaaaagatcctgctcgccatctgtgaacaagctgcagagaccaacaatgtttataaaaagcaccgcatcctcaaaatataccacctctttgttagtctgctccttaaggacatcaaaagtggtttaggaggcgcttgggcctttgttctccgggacgtgatttatacccttatacattacatcaatcagagaaaactaactatattcagtcaatag

SEQ ID NO: 292074 - DNA, 9170 bp, Artificial Sequence
  derived and/or modified sequence
atgtctctcgtgttgaatgacctactaatctgctgccgccagttggagcacgacagggccacggagagaaagaaggaggtggagaaattcaaaagactcattcgcgatcctgaaacaatcaagcacctggaccgccacagcgattcaaaacaaggcaaatatctgaattgggatgctgtgttccgatttttacagaagtacatccagaaagaaaccgagtgcctacgtatagccaagcccaacgtgtcagcttctacccaagcatcacgccagaaaaaaatgcaagagatttcaagtctggtcaagtatttcattaagtgcgctaacaggcgtgcccctcggctcaagtgccaggaactgttaaactacatcatggacactgtgaaggactccagcaatggcgcaatatatggtgccgattgtagcaatatcctgttgaaggatatcctcagcgtgcggaaatactggtgcgagattagtcagcagcagtggctagagctgttttctgtgtacttccgtttgtatctaaagccctcacaggatgtccaccgggtccttgtcgcacgtataatccacgccgtgaccaaaggctgctgcagccagaccgacggcttgaacagcaagttcttagacttctttagcaaggccattcagtgcgctcgccaggagaagtctagttccggacttaaccatatcctggcagcccttactatcttcttaaagacccttgccgtgaattttcggatccgggtttgtgaacttggggatgagattctgccaacccttctctacatttggacccaacaccgcctcaatgattcactgaaggaggtgatcatagaactgttccagctgcagatttacatacaccatccaaaaggggcaaagacacaggagaagggcgcttatgagagcacaaagtggcgatctatcctttacaacttatatgatttgctcgttaatgaaatcagccacatcggatcacgtggtaagtatagctctggattccgaaatattgctgtaaaggaaaacctgatcgagctgatggctgatatttgccatcaggttttcaatgaagacactagaagtctggaaatctcccaatcctataccactacccagagggagtcatcggactacagcgtgccatgtaaacgcaaaaaaattgagctgggctgggaagttattaaggatcaccttcagaaatctcagaacgatttcgacttggtaccttggttgcagatcgccactcagttgatatcgaaataccccgcatcattaccaaattgtgagctttcaccacttcttatgattctgagccagctgctgccgcagcaaaggcatggcgaaaggactccgtacgtgctacgttgtctgacagaggttgctctttgccaggacaaacggtcgaatcttgagagcagccagaaatccgacctgcttaagttgtggaacaagatctggtgcataacattcagagggatttcctctgagcagattcaagcagagaactttggcctgctaggagctatcatacagggaagtctggttgaagttgacagggagttctggaaactgtttacaggaagcgcgtgcaggccaagctgcccagccgtctgctgtctgactttggcgctgactaccagcattgttcccggaactgtgaaaatggggatcgaacagaacatgtgcgaagtgaaccgttctttttccctgaaggagagtatcatgaagtggctgttgttttatcaattggaaggggacttggagaactccactgaggtcccccctatcctgcatagcaactttcctcacttagtgctggagaaaattctcgtgtccctgacgatgaagaattgcaaggccgctatgaactttttccagtctgtgcccgaatgcgagcaccatcagaaggataaagaggaactgagcttttccgaggttgaagaactctttctgcagacaacgttcgacaagatggacttccttacaattgttagggagtgcgggatcgaaaaacaccagagcagtattgggttcagcgtacatcagaaccttaaagagtctcttgatagatgtctgttggggctcagcgaacaactgctaaacaactactcttcagaaattaccaatagcgagaccctcgtgaggtgttccaggctcctggttggagtgctgggctgctactgttacatgggagtgattgcagaggaggaggcctacaagtcagagcttttccagaaggcgaagagtctcatgcagtgcgcaggagagtctatcacactctttaaaaataaaacgaatgaagaatttagaataggatccctccgaaatatgatgcagttgtgcaccaggtgtctttccaactgtaccaaaaaaagtccaaacaagattgccagtggcttctttctaagactcctgacatcaaaactcatgaatgatattgctgacatttgtaaatctttagcgtcctttatcaagaagccctttgataggggtgaagtcgaaagcatggaggatgacacaaacgggaacctcatggaagttgaggaccagtcttccatgaacctttttaacgactacccagactcttcggtctctgacgctaacgaaccaggcgagtcccagtcaaccataggagccataaatcctttggccgaggagtatctctctaaacaggacttgctgtttttggacatgcttaaattcctgtgcctttgcgtcacaaccgcccaaaccaatacggtctcgtttagagccgctgatatcaggcgtaaactactcatgctaatagactccagtaccctggaaccaaccaagagcttgcatctgcacatgtacctgatgttattaaaggaactcccaggcgaagaatacccactgccgatggaggacgtgctggagttactgaaacccctgagtaacgtttgctccctttacaggcgagatcaagacgtttgcaagacgatcctcaaccatgtattgcacgtagtgaaaaacctgggtcagtccaacatggatagcgaaaatactagagatgctcagggacagttcctgaccgtgatcggtgctttttggcatctaaccaaggaacgaaagtacatctttagcgtacgaatggcccttgttaactgcctgaagacactcctggaggcagatccttacagtaaatgggcgatcctgaatgtgatggggaaggattttcccgttaacgaggttttcacccaattccttgcagacaatcaccaccaggtgcggatgctagcagcagagtcgattaatcgactcttccaggacaccaaaggcgactcaagcagattgctgaaggctcttcccctgaagctgcagcagaccgctttcgagaacgcttatctgaaagcccaggaaggaatgcgggagatgtcacacagcgcggaaaaccccgaaacgctagacgagatttacaaccgcaagagcgtcctgctgacactcatagctgtcgtgctgtcatgttcaccaatctgtgagaagcaggccctctttgctctctgcaagtctgtcaaggaaaatggcctggaacctcatttggtgaaaaaggtcctggagaaagtgtctgaaactttcggataccgcaggctcgaagatttcatggcatctcacctcgactatctcgtgctggaatggctcaatctgcaggataccgaatacaatttaagtagcttccctttcatcctgcttaactatactaatattgaggatttctacaggtcatgttataaggtcctgattccacacctggtcatcaggtcccacttcgatgaggtgaagtccatcgcaaatcagatccaagaagattggaaatcgctcctgacggattgctttccgaaaatccttgtcaatatattaccatatttcgcgtatgaaggcacacgggattccggcatggctcagcagagggagacagctactaaggtgtacgatatgctcaaaagcgaaaacctgctgggaaagcagatagatcacctgttcatctccaacctgcccgagattgttgtggagttactaatgacgctgcacgaacctgccaactccagcgccagccagtccaccgacctgtgcgattttagtggagacctagatccagctcctaaccccccacacttcccctcccacgtcatcaaggctacattcgcatacatcagtaactgccacaagactaaactgaagagtattctggaaatcctaagcaaatcccctgactcctaccagaagatcctattagctatttgtgaacaggcagcagaaactaataatgtgtacaagaaacatcggattctcaagatctaccatttattcgtgagcctgttgctcaaagacattaaaagcggtctgggaggcgcttgggcattcgttttgagagacgtgatatacacacttatacactacataaatcagaggccttcttgtataatggatgtgagcttgagaagcttctccctgtgctgcgatcttctgtcccaggtgtgtcagaccgccgttacctattgcaaggacgcgctggagaaccacctgcatgtgatcgttgggacgctcatccctctagtctatgaacaggttgaagttcagaaacaggtgctggatttgcttaaatatctggtcatcgataataaggacaatgaaaacctgtacattaccattaaactgcttgacccattccctgaccatgtagtctttaaagacctgagaatcacccagcagaaaatcaagtattcccgcggacctttctctctgctagaagagatcaaccatttcttgagtgtaagtgtgtacgacgcgttgcccctaacaagactggaggggctcaaggatctgaggcgtcagctcgaacttcacaaggaccagatggttgatattatgcgcgctagtcaggacaacccccaagacgggataatggtgaaactggtagtgaatctgctacagttatcaaaaatggccattaatcataccggcgaaaaagaggtgttggaagccgttggaagctgtctcggcgaagtcggccctatcgacttcagcaccatcgctatccagcactctaaagatgcctcatataccaaggcactgaaactgtttgaggacaaagagcttcagtggacgtttattatgctgacttatctgaataatactttggttgaagactgtgttaaggtaagatctgcggctgttacgtgcctgaaaaatatccttgcgacgaaaaccggacattctttctgggagatctataagatgacgactgatccaatgctcgcctacctccaaccgtttcgcacaagcagaaagaaattcttggaagtcccccgattcgacaaggaaaatccgttcgagggcttagatgatattaacctatggatccctttaagcgagaatcacgacatctggatcaaaacactgacgtgcgccttcctggattcggggggtactaagtgtgagattctccagctgctcaaacctatgtgtgaggtgaaaacagacttctgtcagactgtattaccctacctgattcatgatattctgttacaggataccaatgagagttggcggaacctcctcagtacgcatgtgcagggattctttacctcctgtttgcgccactttagtcagacctctcgttccaccacaccagcaaatctggattcagagtcagagcacttctttaggtgttgcttagacaagaagtcgcaacggactatgctcgcggtggttgactatatgcgaagacagaaacgcccatccagcggaacaattttcaatgacgccttctggctcgatctgaactacctcgaggttgctaaagtagctcaatcctgcgccgctcacttcacggccctcctatacgcagaaatatacgccgacaaaaaatcaatggacgaccaggagaagaggtcactggcgttcgaagaaggatcgcaaaacacaaccatatcatcactctcggaaaagagcaaggaagagaccggtattagccttcaggatctactgttggaaatctaccgaagtattggggaaccggacagtctgtatggctgcggtggcggtaagatgctgcagccaataacccgattgcggacttatgagcacgaggcaatgtgggggaaagcacttgtcacttatgacctcgagacagctattccatccagcactaggcaggccggaataatacaagctctgcagaatcttggtttatgccacattttgtctgtctacctgaaaggtctcgactatgaaaataaggattggtgcccagaactggaggagctgcactaccaggcggcatggcgcaacatgcagtgggaccattgtaccagtgtgtccaaggaagtcgaaggtacaagctaccacgagtctctatataacgccctgcagagcctgcgggaccgggagttcagcactttttacgaatctctcaagtacgcaagagttaaggaggtggaggagatgtgcaagagaagcttggaaagcgtgtatagcctgtacccaacacttagtcgccttcaggccataggcgagctggagtctattggcgagttgtttagtcgcagtgtgactcacagacaactctcagaagtgtacatcaaatggcagaaacatagtcaactcctaaaggattccgatttctcgtttcaggaacctatcatggctttgcggacagttatactggagattctgatggagaaggaaatggacaacagccagcgcgagtgcattaaagacattttgaccaaacacttggtggagctttccatcttagctaggacttttaagaatacccaactcccggaacgtgccatcttccaaattaagcaatacaactctgtctcttgcggcgtgagcgagtggcaattagaggaggcacaggtcttctgggccaagaaggaacagagcctggctttatctattcttaagcagatgattaaaaagctggatgccagttgtgccgctaataaccccagtttgaagttaacttacaccgaatgcttgagggtgtgcggaaactggctggctgagacttgcctcgagaatccggcagtgatcatgcagacctatttagaaaaggctgtggaggtcgcagggaactacgacggtgaatcatccgacgagctcaggaatggcaagatgaaagcatttctcagcctggcgagattttcagacacacagtaccagcgcatcgaaaattatatgaagtccagcgagttcgagaataaacaggctctcttgaaaagagctaaagaagaggtcgggctcttgcgcgagcacaagatacagaccaaccgttatacagtgaaggtccagcgtgagttggagctggacgaattagctctgcgtgctctcaaagaagatcggaagaggttcctgtgcaaggccgtggagaactatataaactgtctgctttcaggggaagaacatgatatgtgggtgtttaggttgtgtagcctgtggctggagaatagtggcgtttccgaggtaaacggtatgatgaaacgggacggtatgaaaatccccacctataaattcttgcctctgatgtaccagctggccgctaggatgggtactaagatgatgggcggtctcggtttccatgaggtgctcaacaacctgattagccgaatctccatggatcacccacaccacactctcttcatcattcttgccctggctaacgctaacagagacgaattcctcaccaaacccgaggtggccaggcgctcccggataaccaaaaacgtgcctaaacaatcctcccaattagacgaagacaggacagaagcagccaaccggattatatgtacaatacggtcaaggaggccccaaatggtgaggtccgttgaggccctctgcgacgcctacatcattctagcaaatttggacgcgactcaatggaagacacaacgaaagggtataaacattccagcggatcagccaattacaaagctaaagaatctcgaggacgttgtggttccaaccatggaaatcaaggtggaccacaccggcgagtatggcaacctggtgactatccagagttttaaggcagaattccgattggccggaggtgttaatcttccgaagatcatcgattgtgtgggctctgacggtaaagagagaaggcagctagtcaagggccgagatgatctgagacaggacgcagttatgcaacaggttttccagatgtgcaataccttattgcagcgcaataccgagaccaggaagcggaaactgactatctgtacttataaagtcgtgcccctatctcagaggagtggcgtgctcgagtggtgcaccggcacagtgcctatcggcgaattcttggtaaacaatgaggatggagctcataagcgctacagaccgaacgatttttctgcattccagtgccagaaaaaaatgatggaagtccaaaagaagtcatttgaggagaagtatgaagtgttcatggacgtgtgtcagaattttcagcctgtattccggtatttttgcatggagaaatttctggaccccgctatctggtttgagaagaggctcgcatacacccgaagcgtcgctacttcatctatcgtgggatatattctgggattaggcgatcggcacgtacagaatatcctgattaatgagcaatctgcagaactggtgcacatcgacctgggggtagcgttcgagcaaggaaaaatcctgccaacacccgagactgtgccttttcgtctcacaagggacatcgtggatgggatgggcatcaccggggtggaaggcgtgtttaggcgctgttgcgagaagaccatggaggtgatgcggaactcacaggaaaccctacttactatagttgaagttctcctgtatgaccccctattcgactggactatgaaccctttgaaggcattgtatctgcagcagcgtcccgaggatgaaaccgagcttcaccccacattaaatgctgacgatcaagagtgtaagcgtaatctgagcgacatagatcagagtttcaataaggttgccgaaagagtgctgatgaggttgcaggaaaaactgaaaggggtagaggagggcactgtcctcagcgtgggcggacaagttaacctactgatacaacaagcaatagatcccaagaatctgtctcgactgtttcctgggtggaaggcctgggtcta

SEQ ID NO: 292075 - DNA, 282 bp, Artificial Sequence
  derived and/or modified sequence
atgtccctggtgttgaatgacctgctgatttgctgtaggcaacttgagcacgatcgagcgaccgagcggaaaaaagaagtcgagaagttcaagaggctgattcgcgatcctgaaaccattaagcacttagaccggcatagcgatagcaagcagggcaagtatcttaattgggatgcagtttttagatttctccagaagtacatacagaaggaaaccgagtgcctgcgcattgccaagcctaatgtctctgcatctacacaggccagcaggcagaagaaatag

SEQ ID NO: 292076 - DNA, 13147 bp, Artificial Sequence
  derived and/or modified sequence
ccggagcccgagccgaagggcgagccgcaaacgctaagtcgctggccattggtggacatggcgcaggcgcgtttgctccgacgggccgaatgttttggggcagtgttttgagcgcggagaccgcgtgatactggatgcgcatgggcataccgtgctctgcggctgcttggcgttgcttcttcctccagaagtgggcgctgggcagtcacgcagggtttgaaccggaagcgggagtaggtagctgcgtggctaacggagaaaagaagccgtggccgcgggaggaggcgagaggagtcgggatctgcgctgcagccaccgccgcggttgatactactttgaccttccgagtgcagtgacagtgatgtgtgttctgaaattgtgaaccatgagtctagtacttaatgatctgcttatctgctgccgtcaactagaacatgatagagctacagaacgaaagaaagaagttgagaaatttaagcgcctgattcgagatcctgaaacaattaaacatctagatcggcattcagattccaaacaaggaaaatatttgaattgggatgctgtttttagatttttacagaaatatattcagaaagaaacagaatgtctgagaatagcaaaaccaaatgtatcagcctcaacacaagcctccaggcagaaaaagatgcaggaaatcagtagtttggtcaaatacttcatcaaatgtgcaaacagaagagcacctaggctaaaatgtcaagaactcttaaattatatcatggatacagtgaaagattcatctaatggtgctatttacggagctgattgtagcaacatactactcaaagacattctttctgtgagaaaatactggtgtgaaatatctcagcaacagtggttagaattgttctctgtgtacttcaggctctatctgaaaccttcacaagatgttcatagagttttagtggctagaataattcatgctgttaccaaaggatgctgttctcagactgacggattaaattccaaatttttggactttttttccaaggctattcagtgtgcgagacaagaaaagagctcttcaggtctaaatcatatcttagcagctcttactatcttcctcaagactttggctgtcaactttcgaattcgagtgtgtgaattaggagatgaaattcttcccactttgctttatatttggactcaacataggcttaatgattctttaaaagaagtcattattgaattatttcaactgcaaatttatatccatcatccgaaaggagccaaaacccaagaaaaaggtgcttatgaatcaacaaaatggagaagtattttatacaacttatatgatctgctagtgaatgagataagtcatataggaagtagaggaaagtattcttcaggatttcgtaatattgccgtcaaagaaaatttgattgaattgatggcagatatctgtcaccaggtttttaatgaagataccagatccttggagatttctcaatcttacactactacacaaagagaatctagtgattacagtgtcccttgcaaaaggaagaaaatagaactaggctgggaagtaataaaagatcaccttcagaagtcacagaatgattttgatcttgtgccttggctacagattgcaacccaattaatatcaaagtatcctgcaagtttacctaactgtgagctgtctccattactgatgatactatctcagcttctaccccaacagcgacatggggaacgtacaccatatgtgttacgatgccttacggaagttgcattgtgtcaagacaagaggtcaaacctagaaagctcacaaaagtcagatttattaaaactctggaataaaatttggtgtattacctttcgtggtataagttctgagcaaatacaagctgaaaactttggcttacttggagccataattcagggtagtttagttgaggttgacagagaattctggaagttatttactgggtcagcctgcagaccttcatgtcctgcagtatgctgtttgactttggcactgaccaccagtatagttccaggaacggtaaaaatgggaatagagcaaaatatgtgtgaagtaaatagaagcttttctttaaaggaatcaataatgaaatggctcttattctatcagttagagggtgacttagaaaatagcacagaagtgcctccaattcttcacagtaattttcctcatcttgtactggagaaaattcttgtgagtctcactatgaaaaactgtaaagctgcaatgaattttttccaaagcgtgccagaatgtgaacaccaccaaaaagataaagaagaactttcattctcagaagtagaagaactatttcttcagacaacttttgacaagatggactttttaaccattgtgagagaatgtggtatagaaaagcaccagtccagtattggcttctctgtccaccagaatctcaaggaatcactggatcgctgtcttctgggattatcagaacagcttctgaataattactcatctgagattacaaattcagaaactcttgtccggtgttcacgtcttttggtgggtgtccttggctgctactgttacatgggtgtaatagctgaagaggaagcatataagtcagaattattccagaaagccaagtctctaatgcaatgtgcaggagaaagtatcactctgtttaaaaataagacaaatgaggaattcagaattggttccttgagaaatatgatgcagctatgtacacgttgcttgagcaactgtaccaagaagagtccaaataagattgcatctggctttttcctgcgattgttaacatcaaagctaatgaatgacattgcagatatttgtaaaagtttagcatccttcatcaaaaagccatttgaccgtggagaagtagaatcaatggaagatgatactaatggaaatctaatggaggtggaggatcagtcatccatgaatctatttaacgattaccctgatagtagtgttagtgatgcaaacgaacctggagagagccaaagtaccataggtgccattaatcctttagctgaagaatatctgtcaaagcaagatctacttttcttagacatgctcaagttcttgtgtttgtgtgtaactactgctcagaccaatactgtgtcctttagggcagctgatattcggaggaaattgttaatgttaattgattctagcacgctagaacctaccaaatccctccacctgcatatgtatctaatgcttttaaaggagcttcctggagaagagtaccccttgccaatggaagatgttcttgaacttctgaaaccactatccaatgtgtgttctttgtatcgtcgtgaccaagatgtttgtaaaactattttaaaccatgtccttcatgtagtgaaaaacctaggtcaaagcaatatggactctgagaacacaagggatgctcaaggacagtttcttacagtaattggagcattttggcatctaacaaaggagaggaaatatatattctctgtaagaatggccctagtaaattgccttaaaactttgcttgaggctgatccttattcaaaatgggccattcttaatgtaatgggaaaagactttcctgtaaatgaagtatttacacaatttcttgctgacaatcatcaccaagttcgcatgttggctgcagagtcaatcaatagattgttccaggacacgaagggagattcttccaggttactgaaagcacttcctttgaagcttcagcaaacagcttttgaaaatgcatacttgaaagctcaggaaggaatgagagaaatgtcccatagtgctgagaaccctgaaactttggatgaaatttataatagaaaatctgttttactgacgttgatagctgtggttttatcctgtagccctatctgcgaaaaacaggctttgtttgccctgtgtaaatctgtgaaagagaatggattagaacctcaccttgtgaaaaaggttttagagaaagtttctgaaacttttggatatagacgtttagaagactttatggcatctcatttagattatctggttttggaatggctaaatcttcaagatactgaatacaacttatcttcttttccttttattttattaaactacacaaatattgaggatttctatagatcttgttataaggttttgattccacatctggtgattagaagtcattttgatgaggtgaagtccattgctaatcagattcaagaggactggaaaagtcttctaacagactgctttccaaagattcttgtaaatattcttccttattttgcctatgagggtaccagagacagtgggatggcacagcaaagagagactgctaccaaggtctatgatatgcttaaaagtgaaaacttattgggaaaacagattgatcacttattcattagtaatttaccagagattgtggtggagttattgatgacgttacatgagccagcaaattctagtgccagtcagagcactgacctctgtgacttttcaggggatttggatcctgctcctaatccacctcattttccatcgcatgtgattaaagcaacatttgcctatatcagcaattgtcataaaaccaagttaaaaagcattttagaaattctttccaaaagccctgattcctatcagaaaattcttcttgccatatgtgagcaagcagctgaaacaaataatgtttataagaagcacagaattcttaaaatatatcacctgtttgttagtttattactgaaagatataaaaagtggcttaggaggagcttgggcctttgttcttcgagacgttatttatactttgattcactatatcaaccaaaggccttcttgtatcatggatgtgtcattacgtagcttctccctttgttgtgacttattaagtcaggtttgccagacagccgtgacttactgtaaggatgctctagaaaaccatcttcatgttattgttggtacacttataccccttgtgtatgagcaggtggaggttcagaaacaggtattggacttgttgaaatacttagtgatagataacaaggataatgaaaacctctatatcacgattaagcttttagatccttttcctgaccatgttgtttttaaggatttgcgtattactcagcaaaaaatcaaatacagtagaggacccttttcactcttggaggaaattaaccattttctctcagtaagtgtttatgatgcacttccattgacaagacttgaaggactaaaggatcttcgaagacaactggaactacataaagatcagatggtggacattatgagagcttctcaggataatccgcaagatgggattatggtgaaactagttgtcaatttgttgcagttatccaagatggcaataaaccacactggtgaaaaagaagttctagaggctgttggaagctgcttgggagaagtgggtcctatagatttctctaccatagctatacaacatagtaaagatgcatcttataccaaggcccttaagttatttgaagataaagaacttcagtggaccttcataatgctgacctacctgaataacacactggtagaagattgtgtcaaagttcgatcagcagctgttacctgtttgaaaaacattttagccacaaagactggacatagtttctgggagatttataagatgacaacagatccaatgctggcctatctacagccttttagaacatcaagaaaaaagtttttagaagtacccagatttgacaaagaaaacccttttgaaggcctggatgatataaatctgtggattcctctaagtgaaaatcatgacatttggataaagacactgacttgtgcttttttggacagtggaggcacaaaatgtgaaattcttcaattattaaagccaatgtgtgaagtgaaaactgacttttgtcagactgtacttccatacttgattcatgatattttactccaagatacaaatgaatcatggagaaatctgctttctacacatgttcagggatttttcaccagctgtcttcgacacttctcgcaaacgagccgatccacaacccctgcaaacttggattcagagtcagagcactttttccgatgctgtttggataaaaaatcacaaagaacaatgcttgctgttgtggactacatgagaagacaaaagagaccttcttcaggaacaatttttaatgatgctttctggctggatttaaattatctagaagttgccaaggtagctcagtcttgtgctgctcactttacagctttactctatgcagaaatctatgcagataagaaaagtatggatgatcaagagaaaagaagtcttgcatttgaagaaggaagccagaatacaactatttctagcttgagtgaaaaaagtaaagaagaaactggaataagtttacaggatcttctcttagaaatctacagaagtataggggagccagatagtttgtatggctgtggtggagggaagatgttacaacccattactagactacgaacatatgaacacgaagcaatgtggggcaaagccctagtaacatatgacctcgaaacagcaatcccctcatcaacacgccaggcaggaatcattcaggccttgcagaatttgggactctgccatattctttccgtctatttaaaaggattggattatgaaaataaagactggtgtcctgaactagaagaacttcattaccaagcagcatggaggaatatgcagtgggaccattgcacttccgtcagcaaagaagtagaaggaaccagttaccatgaatcattgtacaatgctctacaatctctaagagacagagaattctctacattttatgaaagtctcaaatatgccagagtaaaagaagtggaagagatgtgtaagcgcagccttgagtctgtgtattcgctctatcccacacttagcaggttgcaggccattggagagctggaaagcattggggagcttttctcaagatcagtcacacatagacaactctctgaagtatatattaagtggcagaaacactcccagcttctcaaggacagtgattttagttttcaggagcctatcatggctctacgcacagtcattttggagatcctgatggaaaaggaaatggacaactcacaaagagaatgtattaaggacattctcaccaaacaccttgtagaactctctatactggccagaactttcaagaacactcagctccctgaaagggcaatatttcaaattaaacagtacaattcagttagctgtggagtctctgagtggcagctggaagaagcacaagtattctgggcaaaaaaggagcagagtcttgccctgagtattctcaagcaaatgatcaagaagttggatgccagctgtgcagcgaacaatcccagcctaaaacttacatacacagaatgtctgagggtttgtggcaactggttagcagaaacgtgcttagaaaatcctgcggtcatcatgcagacctatctagaaaaggcagtagaagttgctggaaattatgatggagaaagtagtgatgagctaagaaatggaaaaatgaaggcatttctctcattagcccggttttcagatactcaataccaaagaattgaaaactacatgaaatcatcggaatttgaaaacaagcaagctctcctgaaaagagccaaagaggaagtaggtctccttagggaacataaaattcagacaaacagatacacagtaaaggttcagcgagagctggagttggatgaattagccctgcgtgcactgaaagaggatcgtaaacgcttcttatgtaaagcagttgaaaattatatcaactgcttattaagtggagaagaacatgatatgtgggtattccgactttgttccctctggcttgaaaattctggagtttctgaagtcaatggcatgatgaagagagacggaatgaagattccaacatataaatttttgcctcttatgtaccaattggctgctagaatggggaccaagatgatgggaggcctaggatttcatgaagtcctcaataatctaatctctagaatttcaatggatcacccccatcacactttgtttattatactggccttagcaaatgcaaacagagatgaatttctgactaaaccagaggtagccagaagaagcagaataactaaaaatgtgcctaaacaaagctctcagcttgatgaggatcgaacagaggctgcaaatagaataatatgtactatcagaagtaggagacctcagatggtcagaagtgttgaggcactttgtgatgcttatattatattagcaaacttagatgccactcagtggaagactcagagaaaaggcataaatattccagcagaccagccaattactaaacttaagaatttagaagatgttgttgtccctactatggaaattaaggtggaccacacaggagaatatggaaatctggtgactatacagtcatttaaagcagaatttcgcttagcaggaggtgtaaatttaccaaaaataatagattgtgtaggttccgatggcaaggagaggagacagcttgttaagggccgtgatgacctgagacaagatgctgtcatgcaacaggtcttccagatgtgtaatacattactgcagagaaacacggaaactaggaagaggaaattaactatctgtacttataaggtggttcccctctctcagcgaagtggtgttcttgaatggtgcacaggaactgtccccattggtgaatttcttgttaacaatgaagatggtgctcataaaagatacaggccaaatgatttcagtgcctttcagtgccaaaagaaaatgatggaggtgcaaaaaaagtcttttgaagagaaatatgaagtcttcatggatgtttgccaaaattttcaaccagttttccgttacttctgcatggaaaaattcttggatccagctatttggtttgagaagcgattggcttatacgcgcagtgtagctacttcttctattgttggttacatacttggacttggtgatagacatgtacagaatatcttgataaatgagcagtcagcagaacttgtacatatagatctaggtgttgcttttgaacagggcaaaatccttcctactcctgagacagttccttttagactcaccagagatattgtggatggcatgggcattacgggtgttgaaggtgtcttcagaagatgctgtgagaaaaccatggaagtgatgagaaactctcaggaaactctgttaaccattgtagaggtccttctatatgatccactctttgactggaccatgaatcctttgaaagctttgtatttacagcagaggccggaagatgaaactgagcttcaccctactctgaatgcagatgaccaagaatgcaaacgaaatctcagtgatattgaccagagtttcaacaaagtagctgaacgtgtcttaatgagactacaagagaaactgaaaggagtggaagaaggcactgtgctcagtgttggtggacaagtgaatttgctcatacagcaggccatagaccccaaaaatctcagccgacttttcccaggatggaaagcttgggtgtgatcttcagtatatgaattaccctttcattcagcctttagaaattatattttagcctttatttttaacctgccaacatactttaagtagggattaatatttaagtgaactattgtgggtttttttgaatgttggttttaatacttgatttaatcaccactcaaaaatgttttgatggtcttaaggaacatctctgctttcactctttagaaataatggtcattcgggctgggcgcagcggctcacgcctgtaatcccagcactttgggaggccgaggtgagcggatcacaaggtcaggagttcgagaccagcctggccaagagaccagcctggccagtatggtgaaaccctgtctctactaaaaatacaaaaattagccgagcatggtggcgggcacctgtaatcccagctactcgagaggctgaggcaggagaatctcttgaacctgggaggtgaaggttgctgtgggccaaaatcatgccattgcactccagcctgggtgacaagagcgaaactccatctcaaaaaaaaaaaaaaaaaaacagaaacgtatttggatttttcctagtaagatcactcagtgttactaaataatgaagttgttatggagaacaaatttcaaagacacagttagtgtagttactatttttttaagtgtgtattaaaacttctcattctattctctttatcttttaagcccttctgtactgtccatgtatgttatctttctgtgataacttcatagattgccttctagttcatgaattctcttgtcagatgtatataatctcttttaccctatccattgggcttcttctttcagaaattgtttttcatttctaattatgcatcatttttcagatctctgtttcttgatgtcatttttaatgtttttttaatgttttttatgtcactaattattttaaatgtctgtacttgatagacactgtaatagttctattaaatttagttcctgctgtttatatctgttgatttttgtatttgataggctgttcatccagttttgtctttttgaaaagtgagtttattttcagcaaggctttatctatgggaatcttgagtgtctgtttatgtcatattcccagggctgttgctgcacacaagcccattcttattttaatttcttggctttagggtttccatacctgaagtgtagcataaatactgataggagatttcccaggccaaggcaaacacacttcctcctcatctccttgtgctagtgggcagaatatttgattgatgcctttttcactgagagtataagcttccatgtgtcccacctttatggcaggggtggaaggaggtacatttaattcccactgcctgcctttggcaagccctgggttctttgctccccatatagatgtctaagctaaaagccgtgggttaatgagactggcaaattgttccaggacagctacagcatcagctcacatattcacctctctggtttttcattcccctcatttttttctgagacagagtcttgctctgtcacccaggctggagtgcagtggcatgatctcagctcactgaaacctctgcctcctgggttcaagcaattctcctgcctcagcctcccgagtagctgggactacaggcgtgtgccaacacgcccggctaattttttgtatttttattagagacggagtttcaccgtgttagccaggatggtctcgatcgcttgacctcgtgatccaccctcctcggcctcccaaagtgctgggattacaggtgtgagccaccgcgcccggcctcattcccctcatttttgaccgtaaggatttcccctttcttgtaagttctgctatgtatttaaaagaatgttttctacattttatccagcatttctctgtgttctgttggaagggaagggcttaggtatctagtttgatacataggtagaagtggaacatttctctgtcccccagctgtcatcatataagataaacatcagataaaaagccacctgaaagtaaaactactgactcgtgtattagtgagtataatctcttctccatccttaggaaaatgttcatcccagctgcggagattaacaaatgggtgattgagctttctcctcgtatttggaccttgaaggttatataaatttttttcttatgaagagttggcatttctttttattgccaatggcaggcactcattcatatttgatctcctcaccttcccctcccctaaaaccaatctccagaactttttggactataaatttcttggtttgacttctggagaactgttcagaatattactttgcatttcaaattacaaacttaccttggtgtatctttttcttacaagctgcctaaatgaatatttggtatatattggtagttttattactatagtaaatcaaggaaatgcagtaaacttaaaatgtctttaagaaagccctgaaatcttcatgggtgaaattagaaattatcaactagataatagtatagataaatgaatttgtagctaattcttgctagttgttgcatccagagagctttgaataacatcattaatctactctttagccttgcatggtatgctatgaggctcctgttctgttcaagtattctaatcaatggctttgaaaagtttatcaaatttacatacagatcacaagcctaggagaaataactaattcacagatgacagaattaagattataaaagattttttttttgtaattttagtagagacagggttgccattgtattccagccttggcgacagagcaagactctgcctcaaaaaaaaaaaaaaaaaggttttggcaagctggaactctttctgcaaatgactaagatagaaaactgccaaggacaaatgaggagtagttagattttgaaaatattaatcatagaatagttgttgtatgctaagtcactgacccatattatgtacagcatttctgatctttactttgcaagattagtgatactatcccaatacactgctggagaaatcagaatttggagaaataagttgtccaaggcaagaagatagtaaattataagtacaagtgtaatatggacagtatctaacttgaaaagatttcaggcgaaaagaatctggggtttgccagtcagttgctcaaaaggtcaatgaaaaccaaatagtgaagctatcagagaagctaataaattatagactgcttgaacagttgtgtccagattaagggagataatagctttcccaccctactttgtgcaggtcatacctccccaaagtgtttacctaatcagtaggttcacaaactcttggtcattatagtatatgcctaaaatgtatgcacttaggaatgctaaaaatttaaatatggtctaaagcaaataaaagcaaagaggaaaaactttggacagcgtaaagactagaatagtcttttaaaaagaaagccagtatattggtttgaaatatagagatgtgtcccaatttcaagtattttaattgcaccttaatgaaattatctattttctatagattttagtactattgaatgtattactttactgttacctgaatttattataaagtgtttttgaataaataattctaaaagc

SEQ ID NO: 292077 - DNA, 12954 bp, Artificial Sequence
  derived and/or modified sequence
gcgagaggagtcgggatctgcgctgcagccaccgccgcggttgatactactttgaccttccgagtgcagtgaggcatacatcacaatttggaattatgcattggtttatcaatttacttgtttattgtcaccctgctgcccagatatgacttcatgaggacagtgatgtgtgttctgaaattgtgaaccatgagtctagtacttaatgatctgcttatctgctgccgtcaactagaacatgatagagctacagaacgaaagaaagaagttgagaaatttaagcgcctgattcgagatcctgaaacaattaaacatctagatcggcattcagattccaaacaaggaaaatatttgaattgggatgctgtttttagatttttacagaaatatattcagaaagaaacagaatgtctgagaatagcaaaaccaaatgtatcagcctcaacacaagcctccaggcagaaaaagatgcaggaaatcagtagtttggtcaaatacttcatcaaatgtgcaaacagaagagcacctaggctaaaatgtcaagaactcttaaattatatcatggatacagtgaaagattcatctaatggtgctatttacggagctgattgtagcaacatactactcaaagacattctttctgtgagaaaatactggtgtgaaatatctcagcaacagtggttagaattgttctctgtgtacttcaggctctatctgaaaccttcacaagatgttcatagagttttagtggctagaataattcatgctgttaccaaaggatgctgttctcagactgacggattaaattccaaatttttggactttttttccaaggctattcagtgtgcgagacaagaaaagagctcttcaggtctaaatcatatcttagcagctcttactatcttcctcaagactttggctgtcaactttcgaattcgagtgtgtgaattaggagatgaaattcttcccactttgctttatatttggactcaacataggcttaatgattctttaaaagaagtcattattgaattatttcaactgcaaatttatatccatcatccgaaaggagccaaaacccaagaaaaaggtgcttatgaatcaacaaaatggagaagtattttatacaacttatatgatctgctagtgaatgagataagtcatataggaagtagaggaaagtattcttcaggatttcgtaatattgccgtcaaagaaaatttgattgaattgatggcagatatctgtcaccaggtttttaatgaagataccagatccttggagatttctcaatcttacactactacacaaagagaatctagtgattacagtgtcccttgcaaaaggaagaaaatagaactaggctgggaagtaataaaagatcaccttcagaagtcacagaatgattttgatcttgtgccttggctacagattgcaacccaattaatatcaaagtatcctgcaagtttacctaactgtgagctgtctccattactgatgatactatctcagcttctaccccaacagcgacatggggaacgtacaccatatgtgttacgatgccttacggaagttgcattgtgtcaagacaagaggtcaaacctagaaagctcacaaaagtcagatttattaaaactctggaataaaatttggtgtattacctttcgtggtataagttctgagcaaatacaagctgaaaactttggcttacttggagccataattcagggtagtttagttgaggttgacagagaattctggaagttatttactgggtcagcctgcagaccttcatgtcctgcagtatgctgtttgactttggcactgaccaccagtatagttccaggaacggtaaaaatgggaatagagcaaaatatgtgtgaagtaaatagaagcttttctttaaaggaatcaataatgaaatggctcttattctatcagttagagggtgacttagaaaatagcacagaagtgcctccaattcttcacagtaattttcctcatcttgtactggagaaaattcttgtgagtctcactatgaaaaactgtaaagctgcaatgaattttttccaaagcgtgccagaatgtgaacaccaccaaaaagataaagaagaactttcattctcagaagtagaagaactatttcttcagacaacttttgacaagatggactttttaaccattgtgagagaatgtggtatagaaaagcaccagtccagtattggcttctctgtccaccagaatctcaaggaatcactggatcgctgtcttctgggattatcagaacagcttctgaataattactcatctgagattacaaattcagaaactcttgtccggtgttcacgtcttttggtgggtgtccttggctgctactgttacatgggtgtaatagctgaagaggaagcatataagtcagaattattccagaaagccaagtctctaatgcaatgtgcaggagaaagtatcactctgtttaaaaataagacaaatgaggaattcagaattggttccttgagaaatatgatgcagctatgtacacgttgcttgagcaactgtaccaagaagagtccaaataagattgcatctggctttttcctgcgattgttaacatcaaagctaatgaatgacattgcagatatttgtaaaagtttagcatccttcatcaaaaagccatttgaccgtggagaagtagaatcaatggaagatgatactaatggaaatctaatggaggtggaggatcagtcatccatgaatctatttaacgattaccctgatagtagtgttagtgatgcaaacgaacctggagagagccaaagtaccataggtgccattaatcctttagctgaagaatatctgtcaaagcaagatctacttttcttagacatgctcaagttcttgtgtttgtgtgtaactactgctcagaccaatactgtgtcctttagggcagctgatattcggaggaaattgttaatgttaattgattctagcacgctagaacctaccaaatccctccacctgcatatgtatctaatgcttttaaaggagcttcctggagaagagtaccccttgccaatggaagatgttcttgaacttctgaaaccactatccaatgtgtgttctttgtatcgtcgtgaccaagatgtttgtaaaactattttaaaccatgtccttcatgtagtgaaaaacctaggtcaaagcaatatggactctgagaacacaagggatgctcaaggacagtttcttacagtaattggagcattttggcatctaacaaaggagaggaaatatatattctctgtaagaatggccctagtaaattgccttaaaactttgcttgaggctgatccttattcaaaatgggccattcttaatgtaatgggaaaagactttcctgtaaatgaagtatttacacaatttcttgctgacaatcatcaccaagttcgcatgttggctgcagagtcaatcaatagattgttccaggacacgaagggagattcttccaggttactgaaagcacttcctttgaagcttcagcaaacagcttttgaaaatgcatacttgaaagctcaggaaggaatgagagaaatgtcccatagtgctgagaaccctgaaactttggatgaaatttataatagaaaatctgttttactgacgttgatagctgtggttttatcctgtagccctatctgcgaaaaacaggctttgtttgccctgtgtaaatctgtgaaagagaatggattagaacctcaccttgtgaaaaaggttttagagaaagtttctgaaacttttggatatagacgtttagaagactttatggcatctcatttagattatctggttttggaatggctaaatcttcaagatactgaatacaacttatcttcttttccttttattttattaaactacacaaatattgaggatttctatagatcttgttataaggttttgattccacatctggtgattagaagtcattttgatgaggtgaagtccattgctaatcagattcaagaggactggaaaagtcttctaacagactgctttccaaagattcttgtaaatattcttccttattttgcctatgagggtaccagagacagtgggatggcacagcaaagagagactgctaccaaggtctatgatatgcttaaaagtgaaaacttattgggaaaacagattgatcacttattcattagtaatttaccagagattgtggtggagttattgatgacgttacatgagccagcaaattctagtgccagtcagagcactgacctctgtgacttttcaggggatttggatcctgctcctaatccacctcattttccatcgcatgtgattaaagcaacatttgcctatatcagcaattgtcataaaaccaagttaaaaagcattttagaaattctttccaaaagccctgattcctatcagaaaattcttcttgccatatgtgagcaagcagctgaaacaaataatgtttataagaagcacagaattcttaaaatatatcacctgtttgttagtttattactgaaagatataaaaagtggcttaggaggagcttgggcctttgttcttcgagacgttatttatactttgattcactatatcaaccaaaggccttcttgtatcatggatgtgtcattacgtagcttctccctttgttgtgacttattaagtcaggtttgccagacagccgtgacttactgtaaggatgctctagaaaaccatcttcatgttattgttggtacacttataccccttgtgtatgagcaggtggaggttcagaaacaggtattggacttgttgaaatacttagtgatagataacaaggataatgaaaacctctatatcacgattaagcttttagatccttttcctgaccatgttgtttttaaggatttgcgtattactcagcaaaaaatcaaatacagtagaggacccttttcactcttggaggaaattaaccattttctctcagtaagtgtttatgatgcacttccattgacaagacttgaaggactaaaggatcttcgaagacaactggaactacataaagatcagatggtggacattatgagagcttctcaggataatccgcaagatgggattatggtgaaactagttgtcaatttgttgcagttatccaagatggcaataaaccacactggtgaaaaagaagttctagaggctgttggaagctgcttgggagaagtgggtcctatagatttctctaccatagctatacaacatagtaaagatgcatcttataccaaggcccttaagttatttgaagataaagaacttcagtggaccttcataatgctgacctacctgaataacacactggtagaagattgtgtcaaagttcgatcagcagctgttacctgtttgaaaaacattttagccacaaagactggacatagtttctgggagatttataagatgacaacagatccaatgctggcctatctacagccttttagaacatcaagaaaaaagtttttagaagtacccagatttgacaaagaaaacccttttgaaggcctggatgatataaatctgtggattcctctaagtgaaaatcatgacatttggataaagacactgacttgtgcttttttggacagtggaggcacaaaatgtgaaattcttcaattattaaagccaatgtgtgaagtgaaaactgacttttgtcagactgtacttccatacttgattcatgatattttactccaagatacaaatgaatcatggagaaatctgctttctacacatgttcagggatttttcaccagctgtcttcgacacttctcgcaaacgagccgatccacaacccctgcaaacttggattcagagtcagagcactttttccgatgctgtttggataaaaaatcacaaagaacaatgcttgctgttgtggactacatgagaagacaaaagagaccttcttcaggaacaatttttaatgatgctttctggctggatttaaattatctagaagttgccaaggtagctcagtcttgtgctgctcactttacagctttactctatgcagaaatctatgcagataagaaaagtatggatgatcaagagaaaagaagtcttgcatttgaagaaggaagccagaatacaactatttctagcttgagtgaaaaaagtaaagaagaaactggaataagtttacaggatcttctcttagaaatctacagaagtataggggagccagatagtttgtatggctgtggtggagggaagatgttacaacccattactagactacgaacatatgaacacgaagcaatgtggggcaaagccctagtaacatatgacctcgaaacagcaatcccctcatcaacacgccaggcaggaatcattcaggccttgcagaatttgggactctgccatattctttccgtctatttaaaaggattggattatgaaaataaagactggtgtcctgaactagaagaacttcattaccaagcagcatggaggaatatgcagtgggaccattgcacttccgtcagcaaagaagtagaaggaaccagttaccatgaatcattgtacaatgctctacaatctctaagagacagagaattctctacattttatgaaagtctcaaatatgccagagtaaaagaagtggaagagatgtgtaagcgcagccttgagtctgtgtattcgctctatcccacacttagcaggttgcaggccattggagagctggaaagcattggggagcttttctcaagatcagtcacacatagacaactctctgaagtatatattaagtggcagaaacactcccagcttctcaaggacagtgattttagttttcaggagcctatcatggctctacgcacagtcattttggagatcctgatggaaaaggaaatggacaactcacaaagagaatgtattaaggacattctcaccaaacaccttgtagaactctctatactggccagaactttcaagaacactcagctccctgaaagggcaatatttcaaattaaacagtacaattcagttagctgtggagtctctgagtggcagctggaagaagcacaagtattctgggcaaaaaaggagcagagtcttgccctgagtattctcaagcaaatgatcaagaagttggatgccagctgtgcagcgaacaatcccagcctaaaacttacatacacagaatgtctgagggtttgtggcaactggttagcagaaacgtgcttagaaaatcctgcggtcatcatgcagacctatctagaaaaggcagtagaagttgctggaaattatgatggagaaagtagtgatgagctaagaaatggaaaaatgaaggcatttctctcattagcccggttttcagatactcaataccaaagaattgaaaactacatgaaatcatcggaatttgaaaacaagcaagctctcctgaaaagagccaaagaggaagtaggtctccttagggaacataaaattcagacaaacagatacacagtaaaggttcagcgagagctggagttggatgaattagccctgcgtgcactgaaagaggatcgtaaacgcttcttatgtaaagcagttgaaaattatatcaactgcttattaagtggagaagaacatgatatgtgggtattccgactttgttccctctggcttgaaaattctggagtttctgaagtcaatggcatgatgaagagagacggaatgaagattccaacatataaatttttgcctcttatgtaccaattggctgctagaatggggaccaagatgatgggaggcctaggatttcatgaagtcctcaataatctaatctctagaatttcaatggatcacccccatcacactttgtttattatactggccttagcaaatgcaaacagagatgaatttctgactaaaccagaggtagccagaagaagcagaataactaaaaatgtgcctaaacaaagctctcagcttgatgaggatcgaacagaggctgcaaatagaataatatgtactatcagaagtaggagacctcagatggtcagaagtgttgaggcactttgtgatgcttatattatattagcaaacttagatgccactcagtggaagactcagagaaaaggcataaatattccagcagaccagccaattactaaacttaagaatttagaagatgttgttgtccctactatggaaattaaggtggaccacacaggagaatatggaaatctggtgactatacagtcatttaaagcagaatttcgcttagcaggaggtgtaaatttaccaaaaataatagattgtgtaggttccgatggcaaggagaggagacagcttgttaagggccgtgatgacctgagacaagatgctgtcatgcaacaggtcttccagatgtgtaatacattactgcagagaaacacggaaactaggaagaggaaattaactatctgtacttataaggtggttcccctctctcagcgaagtggtgttcttgaatggtgcacaggaactgtccccattggtgaatttcttgttaacaatgaagatggtgctcataaaagatacaggccaaatgatttcagtgcctttcagtgccaaaagaaaatgatggaggtgcaaaaaaagtcttttgaagagaaatatgaagtcttcatggatgtttgccaaaattttcaaccagttttccgttacttctgcatggaaaaattcttggatccagctatttggtttgagaagcgattggcttatacgcgcagtgtagctacttcttctattgttggttacatacttggacttggtgatagacatgtacagaatatcttgataaatgagcagtcagcagaacttgtacatatagatctaggtgttgcttttgaacagggcaaaatccttcctactcctgagacagttccttttagactcaccagagatattgtggatggcatgggcattacgggtgttgaaggtgtcttcagaagatgctgtgagaaaaccatggaagtgatgagaaactctcaggaaactctgttaaccattgtagaggtccttctatatgatccactctttgactggaccatgaatcctttgaaagctttgtatttacagcagaggccggaagatgaaactgagcttcaccctactctgaatgcagatgaccaagaatgcaaacgaaatctcagtgatattgaccagagtttcaacaaagtagctgaacgtgtcttaatgagactacaagagaaactgaaaggagtggaagaaggcactgtgctcagtgttggtggacaagtgaatttgctcatacagcaggccatagaccccaaaaatctcagccgacttttcccaggatggaaagcttgggtgtgatcttcagtatatgaattaccctttcattcagcctttagaaattatattttagcctttatttttaacctgccaacatactttaagtagggattaatatttaagtgaactattgtgggtttttttgaatgttggttttaatacttgatttaatcaccactcaaaaatgttttgatggtcttaaggaacatctctgctttcactctttagaaataatggtcattcgggctgggcgcagcggctcacgcctgtaatcccagcactttgggaggccgaggtgagcggatcacaaggtcaggagttcgagaccagcctggccaagagaccagcctggccagtatggtgaaaccctgtctctactaaaaatacaaaaattagccgagcatggtggcgggcacctgtaatcccagctactcgagaggctgaggcaggagaatctcttgaacctgggaggtgaaggttgctgtgggccaaaatcatgccattgcactccagcctgggtgacaagagcgaaactccatctcaaaaaaaaaaaaaaaaaaacagaaacgtatttggatttttcctagtaagatcactcagtgttactaaataatgaagttgttatggagaacaaatttcaaagacacagttagtgtagttactatttttttaagtgtgtattaaaacttctcattctattctctttatcttttaagcccttctgtactgtccatgtatgttatctttctgtgataacttcatagattgccttctagttcatgaattctcttgtcagatgtatataatctcttttaccctatccattgggcttcttctttcagaaattgtttttcatttctaattatgcatcatttttcagatctctgtttcttgatgtcatttttaatgtttttttaatgttttttatgtcactaattattttaaatgtctgtacttgatagacactgtaatagttctattaaatttagttcctgctgtttatatctgttgatttttgtatttgataggctgttcatccagttttgtctttttgaaaagtgagtttattttcagcaaggctttatctatgggaatcttgagtgtctgtttatgtcatattcccagggctgttgctgcacacaagcccattcttattttaatttcttggctttagggtttccatacctgaagtgtagcataaatactgataggagatttcccaggccaaggcaaacacacttcctcctcatctccttgtgctagtgggcagaatatttgattgatgcctttttcactgagagtataagcttccatgtgtcccacctttatggcaggggtggaaggaggtacatttaattcccactgcctgcctttggcaagccctgggttctttgctccccatatagatgtctaagctaaaagccgtgggttaatgagactggcaaattgttccaggacagctacagcatcagctcacatattcacctctctggtttttcattcccctcatttttttctgagacagagtcttgctctgtcacccaggctggagtgcagtggcatgatctcagctcactgaaacctctgcctcctgggttcaagcaattctcctgcctcagcctcccgagtagctgggactacaggcgtgtgccaacacgcccggctaattttttgtatttttattagagacggagtttcaccgtgttagccaggatggtctcgatcgcttgacctcgtgatccaccctcctcggcctcccaaagtgctgggattacaggtgtgagccaccgcgcccggcctcattcccctcatttttgaccgtaaggatttcccctttcttgtaagttctgctatgtatttaaaagaatgttttctacattttatccagcatttctctgtgttctgttggaagggaagggcttaggtatctagtttgatacataggtagaagtggaacatttctctgtcccccagctgtcatcatataagataaacatcagataaaaagccacctgaaagtaaaactactgactcgtgtattagtgagtataatctcttctccatccttaggaaaatgttcatcccagctgcggagattaacaaatgggtgattgagctttctcctcgtatttggaccttgaaggttatataaatttttttcttatgaagagttggcatttctttttattgccaatggcaggcactcattcatatttgatctcctcaccttcccctcccctaaaaccaatctccagaactttttggactataaatttcttggtttgacttctggagaactgttcagaatattactttgcatttcaaattacaaacttaccttggtgtatctttttcttacaagctgcctaaatgaatatttggtatatattggtagttttattactatagtaaatcaaggaaatgcagtaaacttaaaatgtctttaagaaagccctgaaatcttcatgggtgaaattagaaattatcaactagataatagtatagataaatgaatttgtagctaattcttgctagttgttgcatccagagagctttgaataacatcattaatctactctttagccttgcatggtatgctatgaggctcctgttctgttcaagtattctaatcaatggctttgaaaagtttatcaaatttacatacagatcacaagcctaggagaaataactaattcacagatgacagaattaagattataaaagattttttttttgtaattttagtagagacagggttgccattgtattccagccttggcgacagagcaagactctgcctcaaaaaaaaaaaaaaaaaggttttggcaagctggaactctttctgcaaatgactaagatagaaaactgccaaggacaaatgaggagtagttagattttgaaaatattaatcatagaatagttgttgtatgctaagtcactgacccatattatgtacagcatttctgatctttactttgcaagattagtgatactatcccaatacactgctggagaaatcagaatttggagaaataagttgtccaaggcaagaagatagtaaattataagtacaagtgtaatatggacagtatctaacttgaaaagatttcaggcgaaaagaatctggggtttgccagtcagttgctcaaaaggtcaatgaaaaccaaatagtgaagctatcagagaagctaataaattatagactgcttgaacagttgtgtccagattaagggagataatagctttcccaccctactttgtgcaggtcatacctccccaaagtgtttacctaatcagtaggttcacaaactcttggtcattatagtatatgcctaaaatgtatgcacttaggaatgctaaaaatttaaatatggtctaaagcaaataaaagcaaagaggaaaaactttggacagcgtaaagactagaatagtcttttaaaaagaaagccagtatattggtttgaaatatagagatgtgtcccaatttcaagtattttaattgcaccttaatgaaattatctattttctatagattttagtactattgaatgtattactttactgttacctgaatttattataaagtgtttttgaataaataattctaaaagcata

SEQ ID NO: 292078 - DNA, 9171 bp, Artificial Sequence
  derived and/or modified sequence
atgagcctggtgctgaacgacctgctgatctgctgcagacagctggagcacgacagagccaccgagagaaagaaggaggtggagaagttcaagagactgatcagagaccccgagaccatcaagcacctggacagacacagcgacagcaagcagggcaagtacctgaactgggacgccgtgttcagattcctgcagaagtacatccagaaggagaccgagtgcctgagaatcgccaagcccaacgtgagcgccagcacccaggccagcagacagaagaagatgcaggagatcagcagcctggtgaagtacttcatcaagtgcgccaacagaagagcccccagactgaagtgccaggagctgctgaactacatcatggacaccgtgaaggacagcagcaacggcgccatctacggcgccgactgcagcaacatcctgctgaaggacatcctgagcgtgagaaagtactggtgcgagatcagccagcagcagtggctggagctgttcagcgtgtacttcagactgtacctgaagcccagccaggacgtgcacagagtgctggtggccagaatcatccacgccgtgaccaagggctgctgcagccagaccgacggcctgaacagcaagttcctggacttcttcagcaaggccatccagtgcgccagacaggagaagagcagcagcggcctgaaccacatcctggccgccctgaccatcttcctgaagaccctggccgtgaacttcagaatcagagtgtgcgagctgggcgacgagatcctgcccaccctgctgtacatctggacccagcacagactgaacgacagcctgaaggaggtgatcatcgagctgttccagctgcagatctacatccaccaccccaagggcgccaagacccaggagaagggcgcctacgagagcaccaagtggagaagcatcctgtacaacctgtacgacctgctggtgaacgagatcagccacatcggcagcagaggcaagtacagcagcggcttcagaaacatcgccgtgaaggagaacctgatcgagctgatggccgacatctgccaccaggtgttcaacgaggacaccagaagcctggagatcagccagagctacaccaccacccagagagagagcagcgactacagcgtgccctgcaagagaaagaagatcgagctgggctgggaggtgatcaaggaccacctgcagaagagccagaacgacttcgacctggtgccctggctgcagatcgccacccagctgatcagcaagtaccccgccagcctgcccaactgcgagctgagccccctgctgatgatcctgagccagctgctgccccagcagagacacggcgagagaaccccctacgtgctgagatgcctgaccgaggtggccctgtgccaggacaagagaagcaacctggagagcagccagaagagcgacctgctgaagctgtggaacaagatctggtgcatcaccttcagaggcatcagcagcgagcagatccaggccgagaacttcggcctgctgggcgccatcatccagggcagcctggtggaggtggacagagagttctggaagctgttcaccggcagcgcctgcagacccagctgccccgccgtgtgctgcctgaccctggccctgaccaccagcatcgtgcccggcaccgtgaagatgggcatcgagcagaacatgtgcgaggtgaacagaagcttcagcctgaaggagagcatcatgaagtggctgctgttctaccagctggagggcgacctggagaacagcaccgaggtgccccccatcctgcacagcaacttcccccacctggtgctggagaagatcctggtgagcctgaccatgaagaactgcaaggccgccatgaacttcttccagagcgtgcccgagtgcgagcaccaccagaaggacaaggaggagctgagcttcagcgaggtggaggagctgttcctgcagaccaccttcgacaagatggacttcctgaccatcgtgagagagtgcggcatcgagaagcaccagagcagcatcggcttcagcgtgcaccagaacctgaaggagagcctggacagatgcctgctgggcctgagcgagcagctgctgaacaactacagcagcgagatcaccaacagcgagaccctggtgagatgcagcagactgctggtgggcgtgctgggctgctactgctacatgggcgtgatcgccgaggaggaggcctacaagagcgagctgttccagaaggccaagagcctgatgcagtgcgccggcgagagcatcaccctgttcaagaacaagaccaacgaggagttcagaatcggcagcctgagaaacatgatgcagctgtgcaccagatgcctgagcaactgcaccaagaagagccccaacaagatcgccagcggcttcttcctgagactgctgaccagcaagctgatgaacgacatcgccgacatctgcaagagcctggccagcttcatcaagaagcccttcgacagaggcgaggtggagagcatggaggacgacaccaacggcaacctgatggaggtggaggaccagagcagcatgaacctgttcaacgactaccccgacagcagcgtgagcgacgccaacgagcccggcgagagccagagcaccatcggcgccatcaaccccctggccgaggagtacctgagcaagcaggacctgctgttcctggacatgctgaagttcctgtgcctgtgcgtgaccaccgcccagaccaacaccgtgagcttcagagccgccgacatcagaagaaagctgctgatgctgatcgacagcagcaccctggagcccaccaagagcctgcacctgcacatgtacctgatgctgctgaaggagctgcccggcgaggagtaccccctgcccatggaggacgtgctggagctgctgaagcccctgagcaacgtgtgcagcctgtacagaagagaccaggacgtgtgcaagaccatcctgaaccacgtgctgcacgtggtgaagaacctgggccagagcaacatggacagcgagaacaccagagacgcccagggccagttcctgaccgtgatcggcgccttctggcacctgaccaaggagagaaagtacatcttcagcgtgagaatggccctggtgaactgcctgaagaccctgctggaggccgacccctacagcaagtgggccatcctgaacgtgatgggcaaggacttccccgtgaacgaggtgttcacccagttcctggccgacaaccaccaccaggtgagaatgctggccgccgagagcatcaacagactgttccaggacaccaagggcgacagcagcagactgctgaaggccctgcccctgaagctgcagcagaccgccttcgagaacgcctacctgaaggcccaggagggcatgagagagatgagccacagcgccgagaaccccgagaccctggacgagatctacaacagaaagagcgtgctgctgaccctgatcgccgtggtgctgagctgcagccccatctgcgagaagcaggccctgttcgccctgtgcaagagcgtgaaggagaacggcctggagccccacctggtgaagaaggtgctggagaaggtgagcgagaccttcggctacagaagactggaggacttcatggccagccacctggactacctggtgctggagtggctgaacctgcaggacaccgagtacaacctgagcagcttccccttcatcctgctgaactacaccaacatcgaggacttctacagaagctgctacaaggtgctgatcccccacctggtgatcagaagccacttcgacgaggtgaagagcatcgccaaccagatccaggaggactggaagagcctgctgaccgactgcttccccaagatcctggtgaacatcctgccctacttcgcctacgagggcaccagagacagcggcatggcccagcagagagagaccgccaccaaggtgtacgacatgctgaagagcgagaacctgctgggcaagcagatcgaccacctgttcatcagcaacctgcccgagatcgtggtggagctgctgatgaccctgcacgagcccgccaacagcagcgccagccagagcaccgacctgtgcgacttcagcggcgacctggaccccgcccccaaccccccccacttccccagccacgtgatcaaggccaccttcgcctacatcagcaactgccacaagaccaagctgaagagcatcctggagatcctgagcaagagccccgacagctaccagaagatcctgctggccatctgcgagcaggccgccgagaccaacaacgtgtacaagaagcacagaatcctgaagatctaccacctgttcgtgagcctgctgctgaaggacatcaagagcggcctgggcggcgcctgggccttcgtgctgagagacgtgatctacaccctgatccactacatcaaccagagacccagctgcatcatggacgtgagcctgagaagcttcagcctgtgctgcgacctgctgagccaggtgtgccagaccgccgtgacctactgcaaggacgccctggagaaccacctgcacgtgatcgtgggcaccctgatccccctggtgtacgagcaggtggaggtgcagaagcaggtgctggacctgctgaagtacctggtgatcgacaacaaggacaacgagaacctgtacatcaccatcaagctgctggaccccttccccgaccacgtggtgttcaaggacctgagaatcacccagcagaagatcaagtacagcagaggccccttcagcctgctggaggagatcaaccacttcctgagcgtgagcgtgtacgacgccctgcccctgaccagactggagggcctgaaggacctgagaagacagctggagctgcacaaggaccagatggtggacatcatgagagccagccaggacaacccccaggacggcatcatggtgaagctggtggtgaacctgctgcagctgagcaagatggccatcaaccacaccggcgagaaggaggtgctggaggccgtgggcagctgcctgggcgaggtgggccccatcgacttcagcaccatcgccatccagcacagcaaggacgccagctacaccaaggccctgaagctgttcgaggacaaggagctgcagtggaccttcatcatgctgacctacctgaacaacaccctggtggaggactgcgtgaaggtgagaagcgccgccgtgacctgcctgaagaacatcctggccaccaagaccggccacagcttctgggagatctacaagatgaccaccgaccccatgctggcctacctgcagcccttcagaaccagcagaaagaagttcctggaggtgcccagattcgacaaggagaaccccttcgagggcctggacgacatcaacctgtggatccccctgagcgagaaccacgacatctggatcaagaccctgacctgcgccttcctggacagcggcggcaccaagtgcgagatcctgcagctgctgaagcccatgtgcgaggtgaagaccgacttctgccagaccgtgctgccctacctgatccacgacatcctgctgcaggacaccaacgagagctggagaaacctgctgagcacccacgtgcagggcttcttcaccagctgcctgagacacttcagccagaccagcagaagcaccacccccgccaacctggacagcgagagcgagcacttcttcagatgctgcctggacaagaagagccagagaaccatgctggccgtggtggactacatgagaagacagaagagacccagcagcggcaccatcttcaacgacgccttctggctggacctgaactacctggaggtggccaaggtggcccagagctgcgccgcccacttcaccgccctgctgtacgccgagatctacgccgacaagaagagcatggacgaccaggagaagagaagcctggccttcgaggagggcagccagaacaccaccatcagcagcctgagcgagaagagcaaggaggagaccggcatcagcctgcaggacctgctgctggagatctacagaagcatcggcgagcccgacagcctgtacggctgcggcggcggcaagatgctgcagcccatcaccagactgagaacctacgagcacgaggccatgtggggcaaggccctggtgacctacgacctggagaccgccatccccagcagcaccagacaggccggcatcatccaggccctgcagaacctgggcctgtgccacatcctgagcgtgtacctgaagggcctggactacgagaacaaggactggtgccccgagctggaggagctgcactaccaggccgcctggagaaacatgcagtgggaccactgcaccagcgtgagcaaggaggtggagggcaccagctaccacgagagcctgtacaacgccctgcagagcctgagagacagagagttcagcaccttctacgagagcctgaagtacgccagagtgaaggaggtggaggagatgtgcaagagaagcctggagagcgtgtacagcctgtaccccaccctgagcagactgcaggccatcggcgagctggagagcatcggcgagctgttcagcagaagcgtgacccacagacagctgagcgaggtgtacatcaagtggcagaagcacagccagctgctgaaggacagcgacttcagcttccaggagcccatcatggccctgagaaccgtgatcctggagatcctgatggagaaggagatggacaacagccagagagagtgcatcaaggacatcctgaccaagcacctggtggagctgagcatcctggccagaaccttcaagaacacccagctgcccgagagagccatcttccagatcaagcagtacaacagcgtgagctgcggcgtgagcgagtggcagctggaggaggcccaggtgttctgggccaagaaggagcagagcctggccctgagcatcctgaagcagatgatcaagaagctggacgccagctgcgccgccaacaaccccagcctgaagctgacctacaccgagtgcctgagagtgtgcggcaactggctggccgagacctgcctggagaaccccgccgtgatcatgcagacctacctggagaaggccgtggaggtggccggcaactacgacggcgagagcagcgacgagctgagaaacggcaagatgaaggccttcctgagcctggccagattcagcgacacccagtaccagagaatcgagaactacatgaagagcagcgagttcgagaacaagcaggccctgctgaagagagccaaggaggaggtgggcctgctgagagagcacaagatccagaccaacagatacaccgtgaaggtgcagagagagctggagctggacgagctggccctgagagccctgaaggaggacagaaagagattcctgtgcaaggccgtggagaactacatcaactgcctgctgagcggcgaggagcacgacatgtgggtgttcagactgtgcagcctgtggctggagaacagcggcgtgagcgaggtgaacggcatgatgaagagagacggcatgaagatccccacctacaagttcctgcccctgatgtaccagctggccgccagaatgggcaccaagatgatgggcggcctgggcttccacgaggtgctgaacaacctgatcagcagaatcagcatggaccacccccaccacaccctgttcatcatcctggccctggccaacgccaacagagacgagttcctgaccaagcccgaggtggccagaagaagcagaatcaccaagaacgtgcccaagcagagcagccagctggacgaggacagaaccgaggccgccaacagaatcatctgcaccatcagaagcagaagaccccagatggtgagaagcgtggaggccctgtgcgacgcctacatcatcctggccaacctggacgccacccagtggaagacccagagaaagggcatcaacatccccgccgaccagcccatcaccaagctgaagaacctggaggacgtggtggtgcccaccatggagatcaaggtggaccacaccggcgagtacggcaacctggtgaccatccagagcttcaaggccgagttcagactggccggcggcgtgaacctgcccaagatcatcgactgcgtgggcagcgacggcaaggagagaagacagctggtgaagggcagagacgacctgagacaggacgccgtgatgcagcaggtgttccagatgtgcaacaccctgctgcagagaaacaccgagaccagaaagagaaagctgaccatctgcacctacaaggtggtgcccctgagccagagaagcggcgtgctggagtggtgcaccggcaccgtgcccatcggcgagttcctggtgaacaacgaggacggcgcccacaagagatacagacccaacgacttcagcgccttccagtgccagaagaagatgatggaggtgcagaagaagagcttcgaggagaagtacgaggtgttcatggacgtgtgccagaacttccagcccgtgttcagatacttctgcatggagaagttcctggaccccgccatctggttcgagaagagactggcctacaccagaagcgtggccaccagcagcatcgtgggctacatcctgggcctgggcgacagacacgtgcagaacatcctgatcaacgagcagagcgccgagctggtgcacatcgacctgggcgtggccttcgagcagggcaagatcctgcccacccccgagaccgtgcccttcagactgaccagagacatcgtggacggcatgggcatcaccggcgtggagggcgtgttcagaagatgctgcgagaagaccatggaggtgatgagaaacagccaggagaccctgctgaccatcgtggaggtgctgctgtacgaccccctgttcgactggaccatgaaccccctgaaggccctgtacctgcagcagagacccgaggacgagaccgagctgcaccccaccctgaacgccgacgaccaggagtgcaagagaaacctgagcgacatcgaccagagcttcaacaaggtggccgagagagtgctgatgagactgcaggagaagctgaagggcgtggaggagggcaccgtgctgagcgtgggcggccaggtgaacctgctgatccagcaggccatcgaccccaagaacctgagcagactgttccccggctggaaggcctgggtgtag

SEQ ID NO: 292079 - DNA, 417 bp, Artificial Sequence
  derived and/or modified sequence
atgaccctgcacgagcccgccaacagcagcgccagccagagcaccgacctgtgcgacttcagcggcgacctggaccccgcccccaaccccccccacttccccagccacgtgatcaaggccaccttcgcctacatcagcaactgccacaagaccaagctgaagagcatcctggagatcctgagcaagagccccgacagctaccagaagatcctgctggccatctgcgagcaggccgccgagaccaacaacgtgtacaagaagcacagaatcctgaagatctaccacctgttcgtgagcctgctgctgaaggacatcaagagcggcctgggcggcgcctgggccttcgtgctgagagacgtgatctacaccctgatccactacatcaaccagagaaagctgaccatcttcagccagtag

SEQ ID NO: 292080 - DNA, 282 bp, Artificial Sequence
  derived and/or modified sequence
atgagcctggtgctgaacgacctgctgatctgctgcagacagctggagcacgacagagccaccgagagaaagaaggaggtggagaagttcaagagactgatcagagaccccgagaccatcaagcacctggacagacacagcgacagcaagcagggcaagtacctgaactgggacgccgtgttcagattcctgcagaagtacatccagaaggagaccgagtgcctgagaatcgccaagcccaacgtgagcgccagcacccaggccagcagacagaagaagtag

SEQ ID NO: 292081 - protein, 346 aa, Artificial Sequence
  derived and/or modified sequence
MNGKRNGEGGKRWKWKGTGVPVRSGDATFPKAMDNVTVRQGESATLRCTIDNRVTRVAWLNRSTILYAGNDKWCLDPRVVLLSNTQTQYSIEIQNVDVYDEGPYTCSVQTDNHPKTSRVHLIVQVSPKIVEISSDISINEGNNISLTCIATGRPEPTVTWRHISPKAVGFVSEDEYLEIQGITREQSGDYECSASNDVAAPVVRRVKVTVNYPPYISEAKGTGVPVGQKGTLQCEASAVPSAEFQWYKDDKRLIEGKKGVKVENRPFLSKLIFFNVSEHDYGNYTCVASNKLGHTNASIMLFEVKTTALTPWKGPGAVSEVSNGTSRRAGCVWLLPLLVLHLLLKF

SEQ ID NO: 292082 - DNA, 1041 bp, Artificial Sequence
  derived and/or modified sequence
atgaatggcaagcgaaacggggagggaggcaaacggtggaagtggaaagggactggggtgcccgtgcggtcaggcgatgcaacttttccaaaagctatggacaatgttacagtaaggcagggcgaatctgccacccttcgatgcactatcgacaaccgcgttactcgcgtcgcctggctgaaccgatccacaatactctacgccggaaacgataagtggtgtttggatcccagggtcgtgcttttgtccaatacacaaacccagtattcaattgagattcagaatgttgacgtgtacgacgagggcccttatacctgctctgtacaaaccgacaatcaccctaaaacttctcgtgtacacctaatagtacaagtttcaccaaaaattgtcgagatttcctctgacatcagcataaatgagggtaacaacattagcctaacctgtatcgctacgggtcgacccgagccgaccgtgacgtggcggcacatcagcccaaaagcagtgggcttcgtgtctgaagacgaatatcttgagatccagggcattacacgggagcaaagcggagattatgagtgctccgcaagtaatgatgtagccgcccctgtagtccgaagggtgaaggttactgtgaattaccccccttatattagcgaagctaaggggaccggtgtccccgtgggccagaagggaacactgcagtgtgaggcttccgccgtcccatccgccgagttccaatggtacaaggatgataagcgtctgattgagggcaaaaagggggtgaaggtcgaaaacagaccatttctgagcaaactgatcttttttaatgtctctgagcacgattatgggaactacacctgcgtagcctccaataagctgggacacaccaatgcctctatcatgctgttcgaggtgaagacaaccgcactcactccgtggaagggaccgggagctgttagcgaagtcagtaacggaactagccggcgggcgggatgcgtctggttactgccccttctcgtgttacacctgctcttgaagttctag

SEQ ID NO: 292083 - DNA, 1041 bp, Artificial Sequence
  derived and/or modified sequence
atgaatggcaagagaaatggagagggcggcaagcgctggaagtggaagggcaccggggtgcctgtgcgctctggagatgccaccttccccaaggccatggacaacgtgacagtgcggcagggcgagagcgccaccctgcgctgcaccatcgacaacagagtgaccagggtggcctggctgaacagaagcaccatcctgtatgctggaaatgacaagtggtgcctggacccccgggtggtgctgctgagcaacacccagacccagtacagcattgagatccagaatgtggatgtgtatgatgagggcccctacacctgcagcgtgcagacagacaaccaccccaagaccagccgggtgcacctgattgtgcaggtgagccccaagatcgtggagatcagcagtgacatcagcatcaatgaaggcaacaacatcagcctgacctgcatcgccaccggccggcctgagcccaccgtgacctggaggcacatcagccccaaggctgtgggctttgtgtctgaagatgagtacctggagatccagggcatcacccgggagcagagcggggactatgaatgttctgccagcaatgatgtggccgcccctgtggtgcggcgggtgaaggtgacagtgaactacccaccctacatcagcgaggccaagggcaccggggtgcctgtgggccagaagggcaccctgcagtgtgaggccagcgctgtgcccagcgctgagttccagtggtacaaggatgacaagaggctcatcgagggcaagaagggcgtgaaggtggagaaccggcccttcctgagcaagctgatcttcttcaacgtgtctgaacatgactatggcaactacacctgtgtggccagcaacaagctgggccacaccaatgccagcatcatgctgtttgaggtgaagaccacagccctgaccccctggaagggccctggagctgtgtctgaggtgtccaatggcaccagcagaagagctggctgtgtgtggctgctgcccctgctggtgctgcacctgctgctgaagttctag

SEQ ID NO: 292084 - DNA, 1041 bp, Artificial Sequence
  derived and/or modified sequence
atgaacggcaagcggaacggcgagggcggcaagcggtggaagtggaaaggcaccggtgtgcccgtgcggagcggggacgcgacatttccaaaagccatggacaacgtcactgtccgccagggcgagtctgccacactaaggtgcacaatcgacaatagggtaacaagagtggcctggctcaatcgtagtacaatcctttatgccggaaatgacaaatggtgcctcgacccccgagtggtgctgctgtcaaacacccagacgcagtattctattgaaattcagaacgttgatgtttacgacgaaggcccatacacctgtagcgtgcagactgacaaccaccccaagacttcccgggtgcatttgatagtccaagtgagtcccaagattgtggagatctcatccgatatcagtataaatgagggaaataacataagtttgacctgcatcgcgaccggacgacctgagcccacagtgacatggcgacatataagcccaaaggcggtgggatttgtcagcgaagatgaatacctcgagattcagggcataaccagagagcagtcaggcgactatgaatgctcagccagcaatgacgtggccgccccggtcgtgcggcgcgtaaaggtgactgtgaactaccccccatatatatcagaagccaagggcaccggcgtgcctgtcggccagaagggcaccctgcagtgcgaggcctccgccgtgcccagcgctgaattccaatggtataaagacgataagcggttaatcgaaggaaagaaaggcgtcaaagtagagaataggccgtttctgagtaagctgatcttttttaacgtgagcgagcatgactacggcaattacacttgtgtcgcttctaacaagctgggacacaccaatgcctccattatgctttttgaggttaagaccacggctttgacaccatggaagggtcccggcgctgtaagtgaggtttcgaatggcacctcaaggagggccggatgtgtatggctgctgcctctgcttgtgctgcatctacttcttaaattttag

SEQ ID NO: 292085 - DNA, 1041 bp, Artificial Sequence
  derived and/or modified sequence
atgaacggaaaaagaaacggggaaggtgggaagaggtggaaatggaagggcacaggagtgcccgtgcgcagcggagatgccaccttccccaaagctatggacaacgtgacggtccggcagggggagagcgccaccctcaggtgcactattgacaaccgggtcacccgggtggcctggctaaaccgcagcaccatcctctatgctgggaatgacaagtggtgcctggatcctcgcgtggtccttctgagcaacacccaaacgcagtacagcatcgagatccagaacgtggatgtgtatgacgagggcccttacacctgctcggtgcagacagacaaccacccaaagacctctagggtccacctcattgtgcaagtatctcccaaaattgtagagatttcttcagatatctccattaatgaagggaacaatattagcctcacctgcatagcaactggtagaccagagcctacggttacttggagacacatctctcccaaagcggttggctttgtgagtgaagacgaatacttggaaattcagggcatcaccagggagcagtcaggggactacgagtgcagtgcctccaatgacgtggccgcgcccgtggtacggagagtaaaggtcaccgtgaactatccaccatacatttcagaagccaagggtacaggtgtccccgtgggacaaaaggggacactgcagtgtgaagcctcagcagtcccctcagcagaattccagtggtacaaggatgacaaaagactgattgaaggaaagaaaggggtgaaagtggaaaacagacctttcctctcaaaactcatcttcttcaatgtctctgaacatgactatgggaactacacttgcgtggcctccaacaagctgggccacaccaatgccagcatcatgctatttgaagtgaaaactacagccctgaccccttggaaaggtccaggcgccgtcagcgaggtgagcaacggcacgtcgaggagggcaggctgcgtctggctgctgcctcttctggtcttgcacctgcttctcaaattttga

SEQ ID NO: 292086 - DNA, 1041 bp, Artificial Sequence
  derived and/or modified sequence
atgaacggaaaacggaacggtgaaggcggaaagcgatggaagtggaaaggcaccggagtgcccgtgcgctccggggacgccacatttccaaaagctatggacaacgtcactgtgcggcaaggggagtctgccaccctgagatgtacaatcgataatagagtgacacgggttgcctggctcaacagaagtaccattttgtacgcaggaaacgataagtggtgtctggatcccagagtagtgctgttgtcaaacacccagacccagtatagcatagaaattcagaacgtggacgtttatgatgagggaccttacacctgtagtgtgcaaaccgacaaccacccaaaaacttcaagagtgcacctgatcgtgcaggtctcacccaagatcgtagagatctcaagtgacatcagcataaacgaggggaacaatatcagcttgacatgtatcgccactggaagacctgaacctaccgtaacctggcggcacatatctcccaaagcagttggattcgtatctgaagatgagtacctggagatccagggcatcacaagggagcaatctggggattatgaatgttccgctagtaacgacgtcgctgcccctgtggtcagaagggtcaaggtgactgtgaactaccccccttatatctctgaggcaaagggtacaggcgtgcctgttgggcagaagggaaccctgcagtgtgaagcctccgcggtgcctagtgccgagttccagtggtataaggacgacaagagactaattgaaggaaagaaaggagtgaaggtggaaaatcgaccctttctttccaaactcatatttttcaacgtcagcgaacacgattacgggaactatacctgtgtcgcctcaaacaagttaggacacacaaatgcctccataatgctttttgaggtgaagaccacagcactgacaccttggaaaggaccaggagccgtctcagaagtgtctaacggcacaagcagaagagcaggatgtgtgtggcttctgccgcttctggtcctacatctcctgctgaaattttag

SEQ ID NO: 292087 - DNA, 1041 bp, Artificial Sequence
  derived and/or modified sequence
atgaacggcaagagaaacggcgagggcggcaagagatggaagtggaagggcaccggcgtgcccgtgagaagcggcgacgccaccttccccaaggccatggacaacgtgaccgtgagacagggcgagagcgccaccctgagatgcaccatcgacaacagagtgaccagagtggcctggctgaacagaagcaccatcctgtacgccggcaacgacaagtggtgcctggaccccagagtggtgctgctgagcaacacccagacccagtacagcatcgagatccagaacgtggacgtgtacgacgagggcccctacacctgcagcgtgcagaccgacaaccaccccaagaccagcagagtgcacctgatcgtgcaggtgagccccaagatcgtggagatcagcagcgacatcagcatcaacgagggcaacaacatcagcctgacctgcatcgccaccggcagacccgagcccaccgtgacctggagacacatcagccccaaggccgtgggcttcgtgagcgaggacgagtacctggagatccagggcatcaccagagagcagagcggcgactacgagtgcagcgccagcaacgacgtggccgcccccgtggtgagaagagtgaaggtgaccgtgaactaccccccctacatcagcgaggccaagggcaccggcgtgcccgtgggccagaagggcaccctgcagtgcgaggccagcgccgtgcccagcgccgagttccagtggtacaaggacgacaagagactgatcgagggcaagaagggcgtgaaggtggagaacagacccttcctgagcaagctgatcttcttcaacgtgagcgagcacgactacggcaactacacctgcgtggccagcaacaagctgggccacaccaacgccagcatcatgctgttcgaggtgaagaccaccgccctgaccccctggaagggccccggcgccgtgagcgaggtgagcaacggcaccagcagaagagccggctgcgtgtggctgctgcccctgctggtgctgcacctgctgctgaagttctag

SEQ ID NO: 292088 - DNA, 2088 bp, Artificial Sequence
  derived and/or modified sequence
atgaccgagctgaaggccaagggccccagagccccccacgtggccggcggcccccccagccccgaggtgggcagccccctgctgtgcagacccgccgccggccccttccccggcagccagaccagcgacaccctgcccgaggtgagcgccatccccatcagcctggacggcctgctgttccccagaccctgccagggccaggaccccagcgacgagaagacccaggaccagcagagcctgagcgacgtggagggcgcctacagcagagccgaggccaccagaggcgccggcggcagcagcagcagcccccccgagaaggacagcggcctgctggacagcgtgctggacaccctgctggcccccagcggccccggccagagccagcccagcccccccgcctgcgaggtgaccagcagctggtgcctgttcggccccgagctgcccgaggacccccccgccgcccccgccacccagagagtgctgagccccctgatgagcagaagcggctgcaaggtgggcgacagcagcggcaccgccgccgcccacaaggtgctgcccagaggcctgagccccgccagacagctgctgctgcccgccagcgagagcccccactggagcggcgcccccgtgaagcccagcccccaggccgccgccgtggaggtggaggaggaggacggcagcgagagcgaggagagcgccggccccctgctgaagggcaagcccagagccctgggcggcgccgccgccggcggcggcgccgccgccgtgccccccggcgccgccgccggcggcgtggccctggtgcccaaggaggacagcagattcagcgcccccagagtggccctggtggagcaggacgcccccatggcccccggcagaagccccctggccaccaccgtgatggacttcatccacgtgcccatcctgcccctgaaccacgccctgctggccgccagaaccagacagctgctggaggacgagagctacgacggcggcgccggcgccgccagcgccttcgccccccccagaagcagcccctgcgccagcagcacccccgtggccgtgggcgacttccccgactgcgcctacccccccgacgccgagcccaaggacgacgcctaccccctgtacagcgacttccagccccccgccctgaagatcaaggaggaggaggagggcgccgaggccagcgccagaagccccagaagctacctggtggccggcgccaaccccgccgccttccccgacttccccctgggcccccccccccccctgccccccagagccacccccagcagacccggcgaggccgccgtgaccgccgcccccgccagcgccagcgtgagcagcgccagcagcagcggcagcaccctggagtgcatcctgtacaaggccgagggcgcccccccccagcagggccccttcgccccccccccctgcaaggcccccggcgccagcggctgcctgctgcccagagacggcctgcccagcaccagcgccagcgccgccgccgccggcgccgcccccgccctgtaccccgccctgggcctgaacggcctgccccagctgggctaccaggccgccgtgctgaaggagggcctgccccaggtgtaccccccctacctgaactacctgagacccgacagcgaggccagccagagcccccagtacagcttcgagagcctgccccagaagatctgcctgatctgcggcgacgaggccagcggctgccactacggcgtgctgacctgcggcagctgcaaggtgttcttcaagagagccatggagggccagcacaactacctgtgcgccggcagaaacgactgcatcgtggacaagatcagaagaaagaactgccccgcctgcagactgagaaagtgctgccaggccggcatggtgctgggcggcttcagaaacctgcacatcgacgaccagatcaccctgatccagtacagctggatgagcctgatggtgttcggcctgggctggagaagctacaagcacgtgagcggccagatgctgtacttcgcccccgacctgatcctgaacgacagcttcggcagagccaccaagagcaaccccgtgtag

SEQ ID NO: 292089 - DNA, 2295 bp, Artificial Sequence
  derived and/or modified sequence
atgaccgagctgaaggccaagggccccagagccccccacgtggccggcggcccccccagccccgaggtgggcagccccctgctgtgcagacccgccgccggccccttccccggcagccagaccagcgacaccctgcccgaggtgagcgccatccccatcagcctggacggcctgctgttccccagaccctgccagggccaggaccccagcgacgagaagacccaggaccagcagagcctgagcgacgtggagggcgcctacagcagagccgaggccaccagaggcgccggcggcagcagcagcagcccccccgagaaggacagcggcctgctggacagcgtgctggacaccctgctggcccccagcggccccggccagagccagcccagcccccccgcctgcgaggtgaccagcagctggtgcctgttcggccccgagctgcccgaggacccccccgccgcccccgccacccagagagtgctgagccccctgatgagcagaagcggctgcaaggtgggcgacagcagcggcaccgccgccgcccacaaggtgctgcccagaggcctgagccccgccagacagctgctgctgcccgccagcgagagcccccactggagcggcgcccccgtgaagcccagcccccaggccgccgccgtggaggtggaggaggaggacggcagcgagagcgaggagagcgccggccccctgctgaagggcaagcccagagccctgggcggcgccgccgccggcggcggcgccgccgccgtgccccccggcgccgccgccggcggcgtggccctggtgcccaaggaggacagcagattcagcgcccccagagtggccctggtggagcaggacgcccccatggcccccggcagaagccccctggccaccaccgtgatggacttcatccacgtgcccatcctgcccctgaaccacgccctgctggccgccagaaccagacagctgctggaggacgagagctacgacggcggcgccggcgccgccagcgccttcgccccccccagaagcagcccctgcgccagcagcacccccgtggccgtgggcgacttccccgactgcgcctacccccccgacgccgagcccaaggacgacgcctaccccctgtacagcgacttccagccccccgccctgaagatcaaggaggaggaggagggcgccgaggccagcgccagaagccccagaagctacctggtggccggcgccaaccccgccgccttccccgacttccccctgggcccccccccccccctgccccccagagccacccccagcagacccggcgaggccgccgtgaccgccgcccccgccagcgccagcgtgagcagcgccagcagcagcggcagcaccctggagtgcatcctgtacaaggccgagggcgcccccccccagcagggccccttcgccccccccccctgcaaggcccccggcgccagcggctgcctgctgcccagagacggcctgcccagcaccagcgccagcgccgccgccgccggcgccgcccccgccctgtaccccgccctgggcctgaacggcctgccccagctgggctaccaggccgccgtgctgaaggagggcctgccccaggtgtaccccccctacctgaactacctgagacccgacagcgaggccagccagagcccccagtacagcttcgagagcctgccccagaagatctgcctgatctgcggcgacgaggccagcggctgccactacggcgtgctgacctgcggcagctgcaaggtgttcttcaagagagccatggagggcagaaagttcaagaagttcaacaaggtgagagtggtgagagccctggacgccgtggccctgccccagcccgtgggcgtgcccaacgagagccaggccctgagccagagattcaccttcagccccggccaggacatccagctgatcccccccctgatcaacctgctgatgagcatcgagcccgacgtgatctacgccggccacgacaacaccaagcccgacaccagcagcagcctgctgaccagcctgaaccagctgggcgagagacagctgctgagcgtggtgaagtggagcaagagcctgcccggcttcagaaacctgcacatcgacgaccagatcaccctgatccagtacagctggatgagcctgatggtgttcggcctgggctggagaagctacaagcacgtgagcggccagatgctgtacttcgcccccgacctgatcctgaacgagagccacagaagcctgagcagcttcaagctggccaagaagagcagcagcgtgtag

SEQ ID NO: 292090 - DNA, 2412 bp, Artificial Sequence
  derived and/or modified sequence
atgaccgagctgaaggccaagggccccagagccccccacgtggccggcggcccccccagccccgaggtgggcagccccctgctgtgcagacccgccgccggccccttccccggcagccagaccagcgacaccctgcccgaggtgagcgccatccccatcagcctggacggcctgctgttccccagaccctgccagggccaggaccccagcgacgagaagacccaggaccagcagagcctgagcgacgtggagggcgcctacagcagagccgaggccaccagaggcgccggcggcagcagcagcagcccccccgagaaggacagcggcctgctggacagcgtgctggacaccctgctggcccccagcggccccggccagagccagcccagcccccccgcctgcgaggtgaccagcagctggtgcctgttcggccccgagctgcccgaggacccccccgccgcccccgccacccagagagtgctgagccccctgatgagcagaagcggctgcaaggtgggcgacagcagcggcaccgccgccgcccacaaggtgctgcccagaggcctgagccccgccagacagctgctgctgcccgccagcgagagcccccactggagcggcgcccccgtgaagcccagcccccaggccgccgccgtggaggtggaggaggaggacggcagcgagagcgaggagagcgccggccccctgctgaagggcaagcccagagccctgggcggcgccgccgccggcggcggcgccgccgccgtgccccccggcgccgccgccggcggcgtggccctggtgcccaaggaggacagcagattcagcgcccccagagtggccctggtggagcaggacgcccccatggcccccggcagaagccccctggccaccaccgtgatggacttcatccacgtgcccatcctgcccctgaaccacgccctgctggccgccagaaccagacagctgctggaggacgagagctacgacggcggcgccggcgccgccagcgccttcgccccccccagaagcagcccctgcgccagcagcacccccgtggccgtgggcgacttccccgactgcgcctacccccccgacgccgagcccaaggacgacgcctaccccctgtacagcgacttccagccccccgccctgaagatcaaggaggaggaggagggcgccgaggccagcgccagaagccccagaagctacctggtggccggcgccaaccccgccgccttccccgacttccccctgggcccccccccccccctgccccccagagccacccccagcagacccggcgaggccgccgtgaccgccgcccccgccagcgccagcgtgagcagcgccagcagcagcggcagcaccctggagtgcatcctgtacaaggccgagggcgcccccccccagcagggccccttcgccccccccccctgcaaggcccccggcgccagcggctgcctgctgcccagagacggcctgcccagcaccagcgccagcgccgccgccgccggcgccgcccccgccctgtaccccgccctgggcctgaacggcctgccccagctgggctaccaggccgccgtgctgaaggagggcctgccccaggtgtaccccccctacctgaactacctgagacccgacagcgaggccagccagagcccccagtacagcttcgagagcctgccccagaagatctgcctgatctgcggcgacgaggccagcggctgccactacggcgtgctgacctgcggcagctgcaaggtgttcttcaagagagccatggagggccagcacaactacctgtgcgccggcagaaacgactgcatcgtggacaagatcagaagaaagaactgccccgcctgcagactgagaaagtgctgccaggccggcatggtgctgggcggcagaaagttcaagaagttcaacaaggtgagagtggtgagagccctggacgccgtggccctgccccagcccgtgggcgtgcccaacgagagccaggccctgagccagagattcaccttcagccccggccaggacatccagctgatcccccccctgatcaacctgctgatgagcatcgagcccgacgtgatctacgccggccacgacaacaccaagcccgacaccagcagcagcctgctgaccagcctgaaccagctgggcgagagacagctgctgagcgtggtgaagtggagcaagagcctgcccggcttcagaaacctgcacatcgacgaccagatcaccctgatccagtacagctggatgagcctgatggtgttcggcctgggctggagaagctacaagcacgtgagcggccagatgctgtacttcgcccccgacctgatcctgaacgagagccacagaagcctgagcagcttcaagctggccaagaagagcagcagcgtgtag

SEQ ID NO: 292091 - DNA, 2073 bp, Artificial Sequence
  derived and/or modified sequence
atgaccgagctgaaggccaagggccccagagccccccacgtggccggcggcccccccagccccgaggtgggcagccccctgctgtgcagacccgccgccggccccttccccggcagccagaccagcgacaccctgcccgaggtgagcgccatccccatcagcctggacggcctgctgttccccagaccctgccagggccaggaccccagcgacgagaagacccaggaccagcagagcctgagcgacgtggagggcgcctacagcagagccgaggccaccagaggcgccggcggcagcagcagcagcccccccgagaaggacagcggcctgctggacagcgtgctggacaccctgctggcccccagcggccccggccagagccagcccagcccccccgcctgcgaggtgaccagcagctggtgcctgttcggccccgagctgcccgaggacccccccgccgcccccgccacccagagagtgctgagccccctgatgagcagaagcggctgcaaggtgggcgacagcagcggcaccgccgccgcccacaaggtgctgcccagaggcctgagccccgccagacagctgctgctgcccgccagcgagagcccccactggagcggcgcccccgtgaagcccagcccccaggccgccgccgtggaggtggaggaggaggacggcagcgagagcgaggagagcgccggccccctgctgaagggcaagcccagagccctgggcggcgccgccgccggcggcggcgccgccgccgtgccccccggcgccgccgccggcggcgtggccctggtgcccaaggaggacagcagattcagcgcccccagagtggccctggtggagcaggacgcccccatggcccccggcagaagccccctggccaccaccgtgatggacttcatccacgtgcccatcctgcccctgaaccacgccctgctggccgccagaaccagacagctgctggaggacgagagctacgacggcggcgccggcgccgccagcgccttcgccccccccagaagcagcccctgcgccagcagcacccccgtggccgtgggcgacttccccgactgcgcctacccccccgacgccgagcccaaggacgacgcctaccccctgtacagcgacttccagccccccgccctgaagatcaaggaggaggaggagggcgccgaggccagcgccagaagccccagaagctacctggtggccggcgccaaccccgccgccttccccgacttccccctgggcccccccccccccctgccccccagagccacccccagcagacccggcgaggccgccgtgaccgccgcccccgccagcgccagcgtgagcagcgccagcagcagcggcagcaccctggagtgcatcctgtacaaggccgagggcgcccccccccagcagggccccttcgccccccccccctgcaaggcccccggcgccagcggctgcctgctgcccagagacggcctgcccagcaccagcgccagcgccgccgccgccggcgccgcccccgccctgtaccccgccctgggcctgaacggcctgccccagctgggctaccaggccgccgtgctgaaggagggcctgccccaggtgtaccccccctacctgaactacctgagacccgacagcgaggccagccagagcccccagtacagcttcgagagcctgccccagaagatctgcctgatctgcggcgacgaggccagcggctgccactacggcgtgctgacctgcggcagctgcaaggtgttcttcaagagagccatggagggccagcacaactacctgtgcgccggcagaaacgactgcatcgtggacaagatcagaagaaagaactgccccgcctgcagactgagaaagtgctgccaggccggcatggtgctgggcggcttcagaaacctgcacatcgacgaccagatcaccctgatccagtacagctggatgagcctgatggtgttcggcctgggctggagaagctacaagcacgtgagcggccagatgctgtacttcgcccccgacctgatcctgaacgaggagagcatcgtgaccagctag

SEQ ID NO: 292092 - DNA, 2088 bp, Artificial Sequence
  derived and/or modified sequence
atgacggagctcaaagctaaaggaccacgagcacctcatgtcgccggaggacccccttcgcccgaggtaggaagtcctctgctgtgtcggccagcagccggtccgtttccgggaagccagacttccgacacactcccagaggtgtccgctatacccatttctctggatggacttctttttccaagaccctgtcaaggtcaagatccttcagatgagaagacacaagaccagcaaagtctgtccgacgtcgaaggcgcttactcccgagcggaagccacccggggcgcaggagggagtagctcatcacctcctgagaaggactctgggctacttgacagcgtgctggacacccttctggcccctagcggtccaggacagtcacagccttccccaccagcatgcgaagtgacctcctcttggtgtctgttcgggcccgaattgcccgaagatccaccagccgcgccagctacccagagggtcctgagccccctgatgagccgcagtggctgtaaggttggcgacagttctggcactgcagctgcacataaagtcctaccacggggtctgtctcctgccaggcagctgctgctgccagcctccgagagccctcactggtcaggagcccctgtgaagccaagtccacaggctgccgcagttgaggtggaggaggaggatggcagtgagagcgaagagtccgccggtcctctcctgaaaggtaagcctcgagccctgggcggagctgccgccggtggaggggctgcggcggtcccaccgggagccgcagcagggggggtggcccttgtcccaaaggaggattctcggttcagcgcccctcgtgtagcacttgtcgaacaggatgctcctatggcgccaggccgatccccactcgctacgactgtgatggacttcattcatgtcccaatcttgcctttaaatcacgcactcctcgcagccagaaccagacagcttcttgaagatgaaagctatgacgggggggccggagctgcaagcgcattcgcgcccccaagaagtagcccgtgcgcttcttccacccccgtcgcagttggggattttccagattgcgcatatcctcccgacgccgagccaaaagatgatgcctaccccctctattctgattttcagccacctgccctgaagataaaggaagaagaagaaggcgccgaagccagcgctcggtctccaagaagctatcttgtagctggggcgaatccggcagcatttccagactttcctctggggcctcctccccctctgccccctcgggcaacaccttcccggcctggtgaagcagccgtgacagccgctccagccagcgcatccgtttcgagcgccagctcttccggaagcactcttgaatgcatcctctataaggccgaaggagccccccctcagcagggaccatttgctcctccgccttgcaaggcccccggagccagtggctgccttctcccacgcgacggcttgccaagcacctccgcctcggcggcggctgctggggcagcacccgcgctttaccctgcattgggcctgaatggtctgccacaactgggctatcaggcagctgtcttgaaggaaggcctgccccaagtgtatcccccatacctcaattacctgaggccggactctgaggcctcacagtccccccagtacagctttgaaagtctgcctcagaaaatttgcctgatttgtggcgacgaggcctcaggttgtcattacggtgtgctgacttgtggctcctgtaaggtctttttcaagagggccatggagggtcagcataattacctgtgcgccgggaggaatgattgcattgtagacaaaattcgcaggaaaaattgtcccgcttgccgactgaggaagtgttgtcaggcgggaatggtgctgggtgggttccgcaacctgcacatcgatgatcagattaccctaatccagtattcttggatgtcccttatggttttcggactgggctggagatcgtataaacacgtgtccggacaaatgctgtactttgcccccgacctaattctgaacgattcatttgggcgggcaactaaaagcaatcccgtgtag

SEQ ID NO: 292093 - DNA, 2295 bp, Artificial Sequence
  derived and/or modified sequence
atgaccgagctaaaggctaagggtcccagggctccacatgtggccgggggtcccccatctccggaggttggaagcccccttctgtgccggcctgcagcagggccgtttcccggtagccagaccagcgacaccttacccgaggtcagtgcaattccaatctcactggacggtttacttttcccaagaccctgtcaaggacaggacccttccgacgagaagactcaggatcagcagtcattgtcagacgtggagggcgcttactcacgagctgaggccacccggggtgcagggggctcctcctcgtctccgccggagaaggactcaggtctcttggacagcgttctcgacacattgctggccccatccggacctggccagagccagcccagtccaccagcatgcgaagtgactagctcctggtgcctctttggacccgaactgccagaagacccacctgccgcacctgcaactcaacgggtcctcagtccactcatgagtagatctggctgtaaggtaggcgattcctcaggcactgctgccgcacataaggtactgccaagggggttgtcaccagccaggcaattactactccccgcatctgagtcccctcactggtccggggctcccgtgaagccttccccacaggctgccgctgttgaagtcgaggaggaagacgggagcgaaagcgaggagtccgcgggaccccttctgaaaggcaaacccagagcattgggcggcgccgcagctggcggtggcgctgctgcggtgcctccaggagcagcagcaggtggagtggccctggtgcctaaggaagattcccgcttctccgcgcccagggtggcgctcgtggagcaggatgcgcccatggcgcctggcaggtcccctcttgccacaacagtgatggactttatccacgttcctatactgcccctcaaccacgcccttctcgctgcacgcacaagacagctcctggaggatgagtcttacgacggtggcgccggggcagctagcgcttttgcccctcctaggtcctcgccatgtgcgtcctcaacgcctgtcgcagtcggagatttcccagactgcgcatacccgcctgacgcagaacccaaggacgacgcctaccccctatacagcgacttccagccaccagcactgaaaatcaaggaagaagaggagggcgcagaggcttccgctcgttccccacggagctaccttgtcgctggagctaatccagctgctttccctgactttcctctggggccgcctccccccctgccaccacgcgccacaccttcccgtcccggcgaggccgctgtgacagctgcccccgcctcggcctcagtcagcagcgccagcagctcagggtccaccctagagtgcatactatacaaggctgaaggtgcccccccccaacaaggccccttcgcgcctcccccctgtaaagcccccggagccagtgggtgcttgctgcctcgggacggactaccttcaacaagcgcaagcgcagctgccgctggtgcagcaccggcgttgtatccggctcttggactgaacggtcttccacagcttggataccaggcagcagttctcaaagaaggcttgccccaggtataccctccctatcttaattacctgaggcctgattccgaagcttcacaaagcccacagtattctttcgagtctctacctcaaaaaatctgcctgatttgtggagacgaggccagcgggtgtcattacggcgtgctaacatgtggatcttgcaaagtctttttcaagagggccatggaggggcgcaagttcaagaaattcaacaaagtccgcgtggtcagggctttggacgccgtcgccctgccacagccagttggggtgcctaacgaaagtcaggccctctctcaacggtttacatttagtcccggccaagatattcagttgatcccgccccttattaatctgctgatgtccatcgaaccagacgtaatctacgccggacatgacaatactaaacccgacacctcttctagtctcctgacctcactcaatcagcttggcgagagacagcttctgtcggtggtgaaatggagtaagtcattacccgggtttagaaacttgcacattgatgatcagatcaccttgatccagtacagttggatgagtctaatggttttcggactggggtggagatcttacaagcatgtttccgggcagatgctctattttgccccagacttgatcctgaatgagtcgcacagaagtctatcctctttcaaactggcgaaaaagtcatcatctgtctag

SEQ ID NO: 292094 - DNA, 2412 bp, Artificial Sequence
  derived and/or modified sequence
atgaccgaactgaaggccaaaggcccccgcgcacctcacgtggccggcgggccaccctcccctgaggtaggatcgccattactgtgcagacccgccgcgggcccgttccccggctctcagacaagtgacacactgccagaagtctcagcaattcctatctcgttggatgggcttctgttcccgagaccatgccagggccaagatcccagcgatgaaaaaacacaggaccaacaatccctcagcgatgtggagggtgcctactctcgagccgaggcgactcggggcgcaggcggcagctcttctagccctccagagaaagactccggattgctggatagtgtgctggacacactcttggccccatcaggccctggccaaagccagccatctccccctgcctgcgaagtgacctcgagttggtgcctctttggccctgaactgcccgaggatccccccgcggctcctgccactcagagggtacttagtccactcatgtccaggtccggctgtaaagttggtgattccagcggaaccgccgcggcacataaagtgctgcctaggggcctcagcccggcacgccaattgctgctgcccgcatcagaatctcctcattggtcaggggcaccagttaagcccagtccccaggctgccgctgtcgaagtcgaagaggaagatggtagtgaaagcgaagagtctgccggccctttgctcaagggcaaacctagggctctaggcggcgccgccgccggggggggcgccgctgcagtccctcctggcgcagctgcaggtggagttgctctagtgcctaaggaagatagtaggttttcagctcctagagtagcgttagtggagcaagacgcacccatggcaccgggacgttcaccattagcaacaactgtaatggacttcattcatgtgcccattctacctctgaaccatgcgttgctagccgccaggactagacagctgttagaagatgagtcatacgatgggggagccggtgccgctagcgccttcgctcctccaagaagcagcccctgtgcaagcagcactccggtagctgtgggagattttccagattgtgcatacccaccggatgccgagcctaaggacgatgcctatcccctgtactcagattttcagcctcccgctttgaaaatcaaggaggaagaagagggagcagaggcatccgcgagatcaccaagatcatacttggtggcaggcgctaatccagccgctttccccgactttcccttggggccacccccaccgctgccccctagggccaccccgagtcggccaggcgaggccgctgtgacggccgcccccgctagcgcctccgtttctagtgcatcaagtagtggtagtacacttgaatgtattctgtacaaagccgagggggcacccccccagcaaggccccttcgcccctcccccatgcaaggcccctggtgcgtcagggtgtctgctgcctcgggacgggctacccagtacatctgcatcagccgcagccgccggggccgccccagctctgtatccagcactgggcctgaatggactaccccagttgggataccaggccgccgtcctgaaagaagggctaccccaggtctacccgccttaccttaactacctgagacctgactctgaagcctcacagtccccgcagtactcattcgaaagtctcccacagaagatttgccttatctgcggcgacgaggcttctgggtgtcactacggtgtccttacgtgtggttcctgtaaggtgttcttcaaaagagccatggagggacagcacaactacctgtgcgccggcagaaatgactgcattgttgataagataaggcgcaagaactgtcctgcttgccggctccggaagtgctgccaggccggcatggttctgggaggcaggaagttcaagaagttcaacaaagtgcgggtcgttagagctctggacgcagtggccttgccacaacctgtcggtgtgccaaacgaaagccaggcccttagccagcgatttaccttcagtcctggccaagacatacaactgatcccgcctctgataaatctgcttatgagtattgagcctgatgtaatttacgctggccatgacaataccaaacccgataccagttctagcctgttaacgtctctgaatcaactgggtgagcgacagctcctctctgtggtcaaatggtccaagtcattacccgggttccggaatctgcacattgacgaccagatcactctcatccagtactcctggatgtcactgatggtgttcggcctgggttggaggagctataaacacgtcagtggccagatgctttatttcgccccagatctaatattaaacgagtctcaccggtcactgtcttcctttaagttggccaagaaaagttcatctgtgtag

SEQ ID NO: 292095 - DNA, 2073 bp, Artificial Sequence
  derived and/or modified sequence
atgactgaactcaaggccaaaggaccgcgggccccacacgtcgcgggcggccctccctccccagaagtgggctcccctttactgtgtcggcccgccgccggcccatttccgggctcccagacaagcgataccctcccagaggtaagcgccatccctatctccttggatgggcttttgttcccaaggccgtgccagggccaagacccttctgatgaaaaaacccaggatcagcagtctctcagtgacgtggaaggggcctacagcagggccgaggccacccgcggggcagggggaagcagctcgtcacctccagagaaggattcaggcctgcttgatagcgtactggacactctgcttgcccccagcggacccggtcagtcccagccttcccctccagcatgtgaagtgacctcctcttggtgtctgtttggcccagaactgccagaagatcccccagctgctccagcgacacagagagttctgtcaccactgatgtcaagatccggctgtaaagtcggggactcatctggtacggccgccgcccataaggtactgcctagaggcctcagcccggccagacagttgctgctgccagcctcagaaagcccacactggagtggagcccccgtaaagccttctccccaagctgctgccgtggaagtcgaggaggaagacggaagcgagagcgaagaaagtgccggaccccttttgaaaggaaagccccgcgcccttggcggagccgcagccggcggcggcgctgccgctgttccccccggcgccgcagccggcggagtggccctggtgccaaaggaggactcccggttcagtgcgcctcgggttgctctcgtggaacaggatgccccgatggctcctggccggtccccactggcaacaactgttatggatttcattcatgtgccaattctgccactgaaccacgccctacttgccgctcggacaagacagctcttggaagatgagtcctatgacggcggggcaggcgcagcctccgcttttgcacctcctcggagctcgccttgcgcttcaagtactcccgtggccgtgggggacttccccgattgcgcctatccaccagatgcggagcccaaagatgacgcttacccgttgtatagtgattttcaacctcccgcactgaaaatcaaggaagaggaggaaggagccgaggcctctgctagatcaccccggtcctacctcgtcgctggtgctaaccccgctgccttccctgactttccgcttggcccacctccgcccctgccacctcgcgctactccctcaagacccggcgaagccgccgtcaccgcagccccagcttccgccagcgtgtcgagcgctagttcatccggctccacgttagaatgcattctttacaaggccgagggcgccccacctcagcagggacccttcgcaccccctccgtgcaaagctccgggggcgtctggctgcctgctgccacgggatggacttccttcaactagtgcgtcagccgcggccgccggcgcggctccagccttgtatcccgccctcggccttaacggcttgccccagctgggctaccaggcggccgtactgaaggaaggtctgccacaggtctatcctccctatctgaactacctccggcccgacagcgaggcaagccagtccccccagtacagcttcgagagtctgccccagaagatctgtctcatttgcggagatgaggcttctggatgccactatggagtccttacttgtggctcgtgtaaggtatttttcaaacgtgcaatggagggtcagcacaattatctgtgcgcaggtagaaacgattgtatcgtggataaaatacggcgcaaaaactgcccagcctgtcgcctgcgaaagtgttgccaagcggggatggtgctggggggcttcagaaacctgcacatcgatgaccagattacacttattcagtattcgtggatgagtcttatggtgtttgggttaggttggcgcagctacaagcacgtgagcgggcaaatgttatactttgcccctgacctcatcctgaatgaggaatccatcgtgactagctag

SEQ ID NO: 292096 - DNA, 2088 bp, Artificial Sequence
  derived and/or modified sequence
atgacagagctgaaggccaagggcccccgggcccctcatgtggccggcggcccccccagccctgaggtgggcagccccctgctgtgcaggcctgctgctggccccttccctggcagccagaccagtgacaccctgcctgaggtgtctgccatccccatcagcctggatggcctgctcttcccccggccctgccagggccaggaccccagtgatgagaagacccaggaccagcagagcctgagtgatgtggagggcgcctacagcagagctgaggccaccaggggggccggcggcagcagcagcagccccccagagaaggacagcggcctgctggacagcgtgctggacaccctgctggcccccagcggccctggccagagccagcccagccccccagcctgtgaggtgaccagctcctggtgcctgtttggacctgagctgcctgaagatcctcctgctgccccagccacccagagggtgctgagccccctgatgagccgcagcggctgcaaggtgggggacagcagcggcacagctgctgcccacaaggtgctgccccggggcctgagccctgcccggcagctgctgctgcctgccagcgagagcccccactggagcggggcccctgtgaagcccagcccccaggccgctgctgtggaggtggaggaggaggatggcagcgagagcgaggagagcgctggccccctgctgaagggcaagccccgggccctgggcggcgctgctgctgggggcggcgctgctgctgtgcccccaggagctgctgctgggggcgtggccctggtgcccaaggaggacagccgcttcagcgccccccgggtggccctggtggagcaggatgcccccatggcccctggccgcagccccctggccaccaccgtgatggacttcatccacgtgcccatcctgcccctgaaccacgccctgctggccgcccggacccggcagctgctggaggatgagagctatgatggaggagctggggccgccagcgcctttgccccacccaggagcagcccctgtgccagcagcacccctgtggccgtgggggacttcccagactgtgcctaccccccagatgctgagcccaaggatgatgcctaccccctgtacagcgacttccagcccccagccctgaagatcaaggaggaggaggagggcgctgaggccagcgcccggagccccaggagctacctggtggccggggccaacccagctgccttcccagacttccccctgggccccccaccacccctgcccccccgggccacccccagcaggcctggagaggccgctgtgacagctgccccagccagcgcctctgtgagcagcgccagcagcagcggcagcaccctggagtgcatcctgtacaaggccgagggcgccccaccccagcagggcccctttgcccccccaccctgcaaggcccctggggccagcggctgcctgctgcccagagatggcctgcccagcaccagcgccagcgctgctgctgctggagctgccccagccctgtacccagccctgggcctgaatggcctgccccagctgggctaccaggccgctgtgctgaaggagggcctgccccaggtgtacccaccctacctgaactacctgcggccagattctgaggccagccagagcccccagtacagctttgagagcctgccccagaagatctgcctgatctgtggagatgaggccagcggctgccactatggagtgctgacctgtggcagctgcaaggtgttcttcaagagggccatggagggccagcacaactacctgtgtgccggcagaaatgactgcatcgtggacaagatccggaggaagaactgcccagcctgccgcctgaggaagtgctgccaggccggcatggtgctgggcggcttcaggaacctgcacattgatgaccagatcaccctcatccagtacagctggatgagcctgatggtgtttggcctgggctggaggagctacaagcacgtgtctggccagatgctgtactttgccccagacctgatcctgaatgacagctttggccgggccaccaagagcaaccctgtgtag

SEQ ID NO: 292097 - DNA, 2295 bp, Artificial Sequence
  derived and/or modified sequence
atgacagagctgaaggccaagggcccccgggcccctcatgtggccggcggcccccccagccctgaggtgggcagccccctgctgtgcaggcctgctgctggccccttccctggcagccagaccagtgacaccctgcctgaggtgtctgccatccccatcagcctggatggcctgctcttcccccggccctgccagggccaggaccccagtgatgagaagacccaggaccagcagagcctgagtgatgtggagggcgcctacagcagagctgaggccaccaggggggccggcggcagcagcagcagccccccagagaaggacagcggcctgctggacagcgtgctggacaccctgctggcccccagcggccctggccagagccagcccagccccccagcctgtgaggtgaccagctcctggtgcctgtttggacctgagctgcctgaagatcctcctgctgccccagccacccagagggtgctgagccccctgatgagccgcagcggctgcaaggtgggggacagcagcggcacagctgctgcccacaaggtgctgccccggggcctgagccctgcccggcagctgctgctgcctgccagcgagagcccccactggagcggggcccctgtgaagcccagcccccaggccgctgctgtggaggtggaggaggaggatggcagcgagagcgaggagagcgctggccccctgctgaagggcaagccccgggccctgggcggcgctgctgctgggggcggcgctgctgctgtgcccccaggagctgctgctgggggcgtggccctggtgcccaaggaggacagccgcttcagcgccccccgggtggccctggtggagcaggatgcccccatggcccctggccgcagccccctggccaccaccgtgatggacttcatccacgtgcccatcctgcccctgaaccacgccctgctggccgcccggacccggcagctgctggaggatgagagctatgatggaggagctggggccgccagcgcctttgccccacccaggagcagcccctgtgccagcagcacccctgtggccgtgggggacttcccagactgtgcctaccccccagatgctgagcccaaggatgatgcctaccccctgtacagcgacttccagcccccagccctgaagatcaaggaggaggaggagggcgctgaggccagcgcccggagccccaggagctacctggtggccggggccaacccagctgccttcccagacttccccctgggccccccaccacccctgcccccccgggccacccccagcaggcctggagaggccgctgtgacagctgccccagccagcgcctctgtgagcagcgccagcagcagcggcagcaccctggagtgcatcctgtacaaggccgagggcgccccaccccagcagggcccctttgcccccccaccctgcaaggcccctggggccagcggctgcctgctgcccagagatggcctgcccagcaccagcgccagcgctgctgctgctggagctgccccagccctgtacccagccctgggcctgaatggcctgccccagctgggctaccaggccgctgtgctgaaggagggcctgccccaggtgtacccaccctacctgaactacctgcggccagattctgaggccagccagagcccccagtacagctttgagagcctgccccagaagatctgcctgatctgtggagatgaggccagcggctgccactatggagtgctgacctgtggcagctgcaaggtgttcttcaagagggccatggagggcaggaagttcaagaagttcaacaaggtgcgggtggtgcgggccctggatgctgtggccctgccccagcctgtgggcgtgcccaatgaaagccaggccctgagccagcgcttcaccttcagccctggccaggacatccagctgatccccccactcatcaacctgctgatgagcattgaaccagatgtgatctatgccggccatgacaacaccaagccagacaccagcagcagcctgctgaccagcctgaaccagctgggggagcggcagctgctgtctgtggtgaagtggagcaagagcctgcccggcttcaggaacctgcacattgatgaccagatcaccctcatccagtacagctggatgagcctgatggtgtttggcctgggctggaggagctacaagcacgtgtctggccagatgctgtactttgccccagacctgatcctgaatgaaagccacaggagcctgagcagcttcaagctggccaagaagagcagctctgtgtag

SEQ ID NO: 292098 - DNA, 2412 bp, Artificial Sequence
  derived and/or modified sequence
atgacagagctgaaggccaagggcccccgggcccctcatgtggccggcggcccccccagccctgaggtgggcagccccctgctgtgcaggcctgctgctggccccttccctggcagccagaccagtgacaccctgcctgaggtgtctgccatccccatcagcctggatggcctgctcttcccccggccctgccagggccaggaccccagtgatgagaagacccaggaccagcagagcctgagtgatgtggagggcgcctacagcagagctgaggccaccaggggggccggcggcagcagcagcagccccccagagaaggacagcggcctgctggacagcgtgctggacaccctgctggcccccagcggccctggccagagccagcccagccccccagcctgtgaggtgaccagctcctggtgcctgtttggacctgagctgcctgaagatcctcctgctgccccagccacccagagggtgctgagccccctgatgagccgcagcggctgcaaggtgggggacagcagcggcacagctgctgcccacaaggtgctgccccggggcctgagccctgcccggcagctgctgctgcctgccagcgagagcccccactggagcggggcccctgtgaagcccagcccccaggccgctgctgtggaggtggaggaggaggatggcagcgagagcgaggagagcgctggccccctgctgaagggcaagccccgggccctgggcggcgctgctgctgggggcggcgctgctgctgtgcccccaggagctgctgctgggggcgtggccctggtgcccaaggaggacagccgcttcagcgccccccgggtggccctggtggagcaggatgcccccatggcccctggccgcagccccctggccaccaccgtgatggacttcatccacgtgcccatcctgcccctgaaccacgccctgctggccgcccggacccggcagctgctggaggatgagagctatgatggaggagctggggccgccagcgcctttgccccacccaggagcagcccctgtgccagcagcacccctgtggccgtgggggacttcccagactgtgcctaccccccagatgctgagcccaaggatgatgcctaccccctgtacagcgacttccagcccccagccctgaagatcaaggaggaggaggagggcgctgaggccagcgcccggagccccaggagctacctggtggccggggccaacccagctgccttcccagacttccccctgggccccccaccacccctgcccccccgggccacccccagcaggcctggagaggccgctgtgacagctgccccagccagcgcctctgtgagcagcgccagcagcagcggcagcaccctggagtgcatcctgtacaaggccgagggcgccccaccccagcagggcccctttgcccccccaccctgcaaggcccctggggccagcggctgcctgctgcccagagatggcctgcccagcaccagcgccagcgctgctgctgctggagctgccccagccctgtacccagccctgggcctgaatggcctgccccagctgggctaccaggccgctgtgctgaaggagggcctgccccaggtgtacccaccctacctgaactacctgcggccagattctgaggccagccagagcccccagtacagctttgagagcctgccccagaagatctgcctgatctgtggagatgaggccagcggctgccactatggagtgctgacctgtggcagctgcaaggtgttcttcaagagggccatggagggccagcacaactacctgtgtgccggcagaaatgactgcatcgtggacaagatccggaggaagaactgcccagcctgccgcctgaggaagtgctgccaggccggcatggtgctgggcggcaggaagttcaagaagttcaacaaggtgcgggtggtgcgggccctggatgctgtggccctgccccagcctgtgggcgtgcccaatgaaagccaggccctgagccagcgcttcaccttcagccctggccaggacatccagctgatccccccactcatcaacctgctgatgagcattgaaccagatgtgatctatgccggccatgacaacaccaagccagacaccagcagcagcctgctgaccagcctgaaccagctgggggagcggcagctgctgtctgtggtgaagtggagcaagagcctgcccggcttcaggaacctgcacattgatgaccagatcaccctcatccagtacagctggatgagcctgatggtgtttggcctgggctggaggagctacaagcacgtgtctggccagatgctgtactttgccccagacctgatcctgaatgaaagccacaggagcctgagcagcttcaagctggccaagaagagcagctctgtgtag

SEQ ID NO: 292099 - DNA, 2073 bp, Artificial Sequence
  derived and/or modified sequence
atgacagagctgaaggccaagggcccccgggcccctcatgtggccggcggcccccccagccctgaggtgggcagccccctgctgtgcaggcctgctgctggccccttccctggcagccagaccagtgacaccctgcctgaggtgtctgccatccccatcagcctggatggcctgctcttcccccggccctgccagggccaggaccccagtgatgagaagacccaggaccagcagagcctgagtgatgtggagggcgcctacagcagagctgaggccaccaggggggccggcggcagcagcagcagccccccagagaaggacagcggcctgctggacagcgtgctggacaccctgctggcccccagcggccctggccagagccagcccagccccccagcctgtgaggtgaccagctcctggtgcctgtttggacctgagctgcctgaagatcctcctgctgccccagccacccagagggtgctgagccccctgatgagccgcagcggctgcaaggtgggggacagcagcggcacagctgctgcccacaaggtgctgccccggggcctgagccctgcccggcagctgctgctgcctgccagcgagagcccccactggagcggggcccctgtgaagcccagcccccaggccgctgctgtggaggtggaggaggaggatggcagcgagagcgaggagagcgctggccccctgctgaagggcaagccccgggccctgggcggcgctgctgctgggggcggcgctgctgctgtgcccccaggagctgctgctgggggcgtggccctggtgcccaaggaggacagccgcttcagcgccccccgggtggccctggtggagcaggatgcccccatggcccctggccgcagccccctggccaccaccgtgatggacttcatccacgtgcccatcctgcccctgaaccacgccctgctggccgcccggacccggcagctgctggaggatgagagctatgatggaggagctggggccgccagcgcctttgccccacccaggagcagcccctgtgccagcagcacccctgtggccgtgggggacttcccagactgtgcctaccccccagatgctgagcccaaggatgatgcctaccccctgtacagcgacttccagcccccagccctgaagatcaaggaggaggaggagggcgctgaggccagcgcccggagccccaggagctacctggtggccggggccaacccagctgccttcccagacttccccctgggccccccaccacccctgcccccccgggccacccccagcaggcctggagaggccgctgtgacagctgccccagccagcgcctctgtgagcagcgccagcagcagcggcagcaccctggagtgcatcctgtacaaggccgagggcgccccaccccagcagggcccctttgcccccccaccctgcaaggcccctggggccagcggctgcctgctgcccagagatggcctgcccagcaccagcgccagcgctgctgctgctggagctgccccagccctgtacccagccctgggcctgaatggcctgccccagctgggctaccaggccgctgtgctgaaggagggcctgccccaggtgtacccaccctacctgaactacctgcggccagattctgaggccagccagagcccccagtacagctttgagagcctgccccagaagatctgcctgatctgtggagatgaggccagcggctgccactatggagtgctgacctgtggcagctgcaaggtgttcttcaagagggccatggagggccagcacaactacctgtgtgccggcagaaatgactgcatcgtggacaagatccggaggaagaactgcccagcctgccgcctgaggaagtgctgccaggccggcatggtgctgggcggcttcaggaacctgcacattgatgaccagatcaccctcatccagtacagctggatgagcctgatggtgtttggcctgggctggaggagctacaagcacgtgtctggccagatgctgtactttgccccagacctgatcctgaatgaggagagcatcgtgaccagctag

SEQ ID NO: 292100 - DNA, 2088 bp, Artificial Sequence
  derived and/or modified sequence
atgaccgagctgaaggccaagggcccccgggccccccacgtggccggcggcccccctagcccggaggtgggtagcccactgctttgtcgaccagctgctggaccatttccagggtcgcagacaagcgatacgttacccgaggtcagcgcaattcccattagcttagacggcctgctgtttcccagaccctgtcagggacaggacccctctgacgagaagacccaggaccagcagtccctcagtgacgtcgaaggcgcttattcgagagccgaggcaacccgaggagcaggaggatcctcgtcgagtccgcctgagaaggatagtggactgctcgatagcgttctggatacactgctcgcccctagcgggccaggacagagccagccatctcccccagcctgcgaagtgacatcaagctggtgcctgttcggcccagaattgccggaggatccaccagccgcgccagcgacccagcgcgtactgtcacctctgatgagccgttccggttgcaaggtgggggactcaagcgggactgccgccgcccacaaagtgctgcccagaggactgtccccagcacgccagcttcttctgccagcgagcgaatctccccattggagtggcgcccccgtaaaaccatccccacaggccgcagcagtggaggtggaggaggaagacgggtcagaaagcgaagaatccgcggggccgttgctgaagggaaaacctagggccctcggtggagccgctgccggcgggggcgctgctgctgttcctcctggcgccgcagctggtggagtcgctctcgtgcccaaagaggattctcggttctcagcgccccgggtcgcgctggttgagcaggacgccccaatggcccctggcagaagtcctttggccacaaccgtaatggatttcatccacgtgcccattctaccccttaaccacgcattacttgccgcccggactcgccaacttctagaggacgaaagctacgacggtggggctggggctgcttcggctttcgctccccccagatcaagcccctgcgcgtcatctactccagtggccgtgggcgacttccctgattgcgcctacccgccggatgcggagcctaaagacgacgcctatccactgtacagtgattttcagccgcctgcactgaagatcaaggaagaagaggaaggagctgaggcatcggcgcgcagtccccggtcctacttagtggccggcgcaaatcctgcggccttcccggactttccacttggaccacccccccccttgcccccacgagcaacaccaagtcggccgggggaagcagccgtcacggccgctcccgcctctgcctccgtgtctagtgcttcctctagcggatccacactggaatgtatcctgtataaggccgaaggcgctccacctcagcaggggccttttgctccacccccctgtaaagctcccggggcgtcaggctgcctcctccccagggatggtctgccctctactagtgcttccgctgcggcggcgggggccgcgcctgctctctatccagcgctcggcctgaacgggcttccccagctgggctaccaggcagcggtccttaaggagggactgccacaggtctacccaccttatcttaattatctgagacctgattctgaagctagtcaatctccgcagtattcatttgagtcattgccgcagaaaatctgtctcatctgcggcgatgaagcatcaggctgccactacggggtcctcacatgcggttcctgcaaggtcttctttaagcgggccatggaggggcaacataactatctgtgtgccggaaggaacgactgcatagttgacaaaatcagacgcaaaaattgtcccgcttgccgattaaggaagtgttgccaggccggcatggttctcggtggcttcaggaacctgcacatcgacgaccaaattacgctgattcagtacagctggatgagccttatggtgtttgggctcggctggagatcctacaagcatgtctcggggcagatgctctacttcgccccagatctgatccttaacgattcctttggtcgggctacgaagtcaaatccggtgtag

SEQ ID NO: 292101 - DNA, 2295 bp, Artificial Sequence
  derived and/or modified sequence
atgaccgagctgaaggccaagggcccccgggccccccacgtggccggcggccctccttcacccgaggtgggaagccctctgctatgccggcccgctgctggcccgttccctggctcccagacctcagatacacttcccgaggtctctgctattcccatctccctagacggactgctgtttccacgaccctgtcagggccaagatcccagcgacgagaagacccaggaccagcaatctctcagcgacgtggagggagcctatagccgagccgaagctaccaggggcgccggaggatcttcaagcagccctcctgaaaaagactcgggcttattggattcagtcctcgacacgctgctcgctccctcggggccgggacagtcacaaccttcacccccggcatgcgaggttacttcaagctggtgtctgtttgggccagagttgcctgaggacccaccggcggctccggcgactcaacgagtgctaagtccactgatgtcgcgaagcggctgcaaagtgggggattcttcaggtactgctgccgcccacaaggtcctcccaaggggactgtccccagcccgacaattactgctgccagcctctgagtcccctcattggtcaggcgccccagtgaagcccagcccacaagctgcagcggtggaggtagaagaggaggacggctcagagtccgaggagagcgccggcccgctcctgaaaggaaaacctagagccctgggcggagcagccgcggggggaggcgccgctgccgtgccaccaggagcagctgctggcggggtggcactggtgccaaaggaggatagccggttttcagcacctagggtggcgctcgtggaacaggacgcccccatggctccgggtagatctccgctcgccactactgtgatggacttcatacacgtacccatcctgcctctgaatcatgcactgctggcagccaggacacgtcagctcctggaagatgagtcatacgatggaggggccggcgctgcaagcgccttcgctccgccaaggagcagcccatgtgcatcctcgaccccagtggctgtcggtgatttccctgactgcgcgtaccccccagatgcggagccaaaagatgatgcatatcctctatattctgattttcagccccccgctttaaaaattaaagaggaggaggagggcgctgaagcctccgcacgtagcccccgaagctatttagtggctggtgctaatcctgcagccttcccagactttcctttggggcccccgccacctctgccacctagagccacaccctcaagacccggcgaggccgccgtaactgcagcccccgcaagtgcctctgttagttctgccagtagctcaggctcaactcttgagtgtattctttataaggctgaaggggcccccccacaacaaggcccattcgcccccccaccctgtaaggctcccggcgccagcggctgcctgctccctagagacggattgccatccacctcagcctctgcagctgccgctggtgccgccccagccctatacccggcactcgggctaaacggtctgccacaactcggctaccaggcagctgtgctgaaagaaggcttacctcaggtgtatcctccttatctaaactacctgcgtcccgattccgaggcttcacagtcccctcagtattccttcgagtcactgcctcagaagatatgtttgatttgcggcgatgaggctagcggctgccattacggagtcttgacgtgcggaagttgcaaggtttttttcaaaagagccatggagggcaggaagtttaagaaattcaacaaggtcagggtggtgagggctctggatgcagtcgcactgccacagccggtgggcgtgccgaatgagtctcaagctctgtctcaaaggttcacgtttagtcccggccaggacattcagctcatcccccccctaataaacctgctaatgagcatcgagcccgacgtgatttacgcaggccacgacaataccaaacctgacacttcaagcagcctgctcacatccctgaaccaattgggggagagacagcttttgtctgtggtcaagtggtccaagtcattgccaggtttccggaacttacacatagatgatcaaattacacttatccagtattcgtggatgagcctaatggtattcgggctgggatggcgcagctacaagcatgtctctggacagatgctttattttgccccagatcttatcttgaatgagtcacatcgatccttatcaagtttcaagctggccaagaaaagctccagcgtctag

SEQ ID NO: 292102 - DNA, 2412 bp, Artificial Sequence
  derived and/or modified sequence
atgaccgagctgaaggccaagggcccccgggccccccacgtggccggcggcccaccttctcccgaggtgggctcccccctgctctgtcgtccagcagcggggcctttccctggtagtcagacttcagatacactgccagaggtaagtgctatccctatttccttagatgggttgctcttcccacggccttgtcagggacaggatccttcagacgagaagacccaggatcagcagtcgttgtccgacgtcgagggggcttatagtcgggctgaagcaactcgaggagcaggcgggtcgagttcctcaccgcccgaaaaggattctggacttttggactccgtgctagacacactccttgcgccctcaggcccaggacagtcccagccctctccaccggcatgcgaagtgaccagttcatggtgtctgtttggaccagagcttcctgaggatcccccggcggcacccgcaacccaaagagtcctgtcccccctgatgtcaagatctggttgcaaagttggcgacagttccggaaccgcagctgcacacaaagtgctgccccggggtcttagcccagccaggcagctcctgctgcctgcatcggaatccccccactggagtggggctccggtcaagccttcccctcaggctgctgccgtcgaagtcgaggaggaagacggatctgagtccgaagaatcagctggacccctactgaagggaaagccccgcgcccttggaggtgctgccgccggcggaggagccgctgccgtccccccaggcgctgctgccggcggggtggctttagtaccaaaagaggacagccgtttcagcgccccccgggtggcacttgtcgagcaagacgccccgatggccccagggcgctcaccactggctacaaccgtgatggacttcatccacgttccaattctcccgttgaatcacgccctgcttgctgcgagaactaggcagctgctggaagacgagagctatgatggcggagctggggcagcaagtgccttcgcacccccaaggtccagtccttgcgcctcttcgaccccggtcgcggttggtgatttcccagattgcgcctaccctcctgatgccgaaccgaaggatgatgcctaccctctctactctgacttccagccgccagccttaaagatcaaagaagaggaggagggcgccgaggcctccgccagaagccccagaagttatttagtcgccggggcaaatcctgctgcattccctgattttccgctagggcctccccctcctttaccccccagggctacaccatcaagaccaggcgaagctgctgtgacggccgcccccgcgtccgcctctgtcagctcagcctcgtcctccggttctacactagaatgtatcctgtataaggcggagggagccccacctcagcagggaccctttgctccacccccctgcaaagccccaggcgccagcggttgcctgctgcccagagacggtctcccaagcacctccgcgtcagctgctgcggccggcgccgcacccgcactatacccagccctgggtctgaatggcctgcctcaactcgggtatcaggctgccgtactcaaagaaggactacctcaagtgtacccaccttacctgaactacttgcgacccgattcagaagcctcgcagagcccacagtattccttcgaatcactgccacagaaaatctgcctaatttgcggagatgaggcgtcaggatgccactacggtgtcctgacctgcgggtcttgtaaagtattttttaaacgggcaatggaaggtcaacacaattacctttgcgcgggcagaaacgactgtattgtcgacaagattcgccgcaagaattgcccagcatgccgcctgcgaaagtgttgtcaggccggcatggttctggggggccgaaaatttaaaaaatttaataaggttcgggtcgtcagggcacttgacgccgtggcgctgcctcagcccgtgggagttccgaatgagtcgcaagccctgagccagcgcttcaccttcagccccggacaagacattcaacttattccccctctcataaacctgttgatgagtatagagccagacgtaatatatgctgggcacgataacacgaagccagacacttcctccagtctgttaacatctctcaaccagctgggagagcggcagttgctgtcggtcgtgaaatggtcaaagtcgctgcctggctttagaaacctgcatattgacgatcagattactctgatacagtattcttggatgtcgctgatggtgtttggactgggatggcgctcttataagcatgtgagcgggcagatgctctatttcgccccagatctgattttgaacgaaagccacaggtcactaagcagttttaaattagctaagaagtcctcctccgtgtag

SEQ ID NO: 292103 - DNA, 2073 bp, Artificial Sequence
  derived and/or modified sequence
atgaccgagctgaaggccaagggcccccgggccccccacgtggccgggggacctccctctcctgaagtcgggtcccccctgctgtgtagaccagctgccgggcccttccctgggtcccagacgtctgacacactcccggaagtgagtgctattcctatttctctggacggcttgctgtttccgagaccctgtcagggacaagacccatctgatgaaaagactcaggatcagcagagccttagtgatgtcgagggcgcctatagtcgggctgaagctactcgcggtgctggtggcagctcatcttctcccccagaaaaggactccggtttgttagactctgtgctcgatacactcctggcaccgagcggccctggtcaaagtcagccctcacccccagcatgcgaagttaccagcagttggtgtttgttcggccctgagctcccagaagatccccccgccgcccctgctacacaacgcgtgctgagccctctgatgagcaggagcggatgcaaggtgggcgacagttctggcacggctgctgctcacaaagtcctcccgcgaggcctttcccctgcacgccaactcctcttgcccgcctctgagtctcctcattggtccggcgctccagtgaaaccatctcctcaggcagccgcggtggaggtcgaggaggaggacggatctgaatctgaggagagcgcaggcccattactgaaagggaagcctagagcgttaggcggcgctgccgctggcggcggtgctgctgcagttccaccgggggcagcagctggcggcgtggccctagtccctaaggaggattcccgctttagcgcccctagggtggccctcgtggagcaagatgcaccaatggctcccggccgctccccattagccactaccgttatggatttcattcacgtgcccattctccccctaaatcacgccctgttggcggcccgaacccggcagctgctggaagatgaatcctacgacggcggcgcaggagcagccagcgctttcgccccgccgcggtcatctccttgtgcctcttcaacgcccgtagccgtgggagattttccagattgcgcgtacccccccgatgcagagccaaaagacgatgcataccctctttacagtgatttccagcctcctgctctgaagatcaaggaagaggaggagggtgccgaagcaagtgccaggagtcctcggtcttatctcgtagccggtgcgaaccccgcagcattccctgatttcccacttggacccccccccccgctgcctcctagggctaccccaagcagacctggtgaggctgctgttactgccgctcccgcatccgcttccgtctctagtgcctctagctctggttccacgctggagtgcattttatacaaggccgagggcgccccccctcaacaaggcccgtttgccccaccaccgtgcaaggcccccggtgcctctggatgcctcctccccagggacggactgccgagcacctcagccagtgccgccgccgcaggagctgctcctgcgttataccccgctttgggactgaacggactaccccaactgggctaccaggccgcggtgctgaaggagggcctgccgcaggtgtaccctccgtacctaaactacttacggccggatagtgaggcatcccaaagcccccagtacagttttgagagtctgccccagaagatttgtctgatctgtggagatgaagcctccggttgccattacggggtccttacttgtgggtcttgcaaagtcttcttcaagagagctatggagggtcagcataattacttatgtgcagggagaaatgattgcatcgtcgataaaattaggagaaaaaactgccccgcctgtaggctgagaaaatgttgtcaggccggtatggttctggggggtttccggaacttgcacatagacgatcagattactctcattcagtatagctggatgagcctgatggtattcggtttaggatggagatcttataagcacgtgagcgggcagatgctgtatttcgcccccgatctgatactgaacgaggagtccattgtgacatcttag

SEQ ID NO: 292104 - DNA, 2088 bp, Artificial Sequence
  derived and/or modified sequence
atgactgaactgaaggcaaagggacctcgagctccgcacgttgctggaggacccccttctcctgaagtgggcagtccattactttgtcggccagcggcagggccattccccggaagccagaccagcgatacactgcctgaggtcagcgccatacccatttcccttgatggactgctgttcccacggccatgccaggggcaggaccccagcgacgagaaaacccaggatcagcagagtctttccgatgttgagggcgcatattcaagggcagaggccacaaggggcgctggaggtagctccagcagccccccagagaaagactctggactcctggactcagtgctcgataccctgctcgcaccctcaggacccggacagagtcagccgagccctcctgcttgcgaggttacgtcttcttggtgcctctttgggcctgagctacccgaagatccaccagctgcccctgcaacacagagggtgctcagtcccttgatgagtagatccggatgtaaagtgggagactctagtggcacagccgctgctcataaagttttgcctagaggactgtccccggcacggcagttgctgctgcctgccagcgagtcaccgcactggtctggcgctcccgtgaaacccagccctcaagctgcagccgtcgaagttgaggaggaggacggatctgagagcgaggaaagcgctggccctctgctgaagggtaagcctagggcccttggaggtgccgctgctgggggaggggctgccgcagttcctccaggggctgcagctggcggtgtggccctggtgccaaaggaagattcgagatttagcgcccctcgtgttgctttggtagaacaggacgcccctatggcaccaggccgaagcccgttggccactactgtgatggacttcatccacgtgccgattcttcctctaaatcatgcactcctcgcagctagaactaggcaactgcttgaagatgagagttatgatggaggcgcaggggctgccagcgccttcgctccccctagatcttctccttgtgcgagttcaacccccgtggctgtgggcgacttccccgactgtgcctatcctccggacgcggagcccaaggatgatgcctacccgttatacagcgatttccagccaccagccttgaagatcaaggaggaagaggagggggctgaagcctcagctagatctcctcgatcttatctcgtcgccggagctaaccccgctgcttttccagactttccgctgggccctccacctcccctgccacccagagcaactcccagccggcctggggaagcagccgtgactgccgcacctgctagcgcctctgtgagctcggcctctagcagcgggagcactctggagtgtattctgtataaggcagagggggctcccccacagcagggtccatttgcccctcccccttgcaaggctcctggagctagcggatgccttttgccgcgtgacggtttaccttctacttccgcttccgcagctgctgccggagcagcaccagctctgtaccccgctctcggcctcaacggtctgcctcaactcgggtatcaggcagccgtgttgaaagagggtcttcctcaggtttatcctccctacctaaattacttaaggcctgactcagaggcatctcagagtccgcagtactcatttgaatctcttccacagaagatttgtttgatttgcggggacgaggccagcggctgtcattatggggtgctcacttgcggctcttgcaaggtgttctttaagagagcaatggaaggccagcacaattatctgtgtgcgggtaggaacgactgcatcgtggacaagatacgcagaaagaactgtcccgcatgcagactcagaaagtgttgccaggccggtatggtcctagggggatttcgaaacctgcacatcgatgaccagataaccctgattcaatattcctggatgagcctgatggtgttcggacttgggtggcggtcgtacaagcacgtgagtgggcaaatgctttacttcgccccagatcttatcctcaatgattctttcggcagggctactaagtcgaatccagtgtag

SEQ ID NO: 292105 - DNA, 2295 bp, Artificial Sequence
  derived and/or modified sequence
atgacagaacttaaagcaaagggaccacgagcgcctcacgtggctggcggaccaccatctccagaggtcgggtctccgctgctgtgtcgacctgccgctggcccattccctggtagccagacatctgacactctgcctgaggtttctgcaatcccaatttccctcgatggcctgctgtttcctagaccatgtcaaggacaggacccttccgatgaaaaaacccaagatcagcagtcattatcagatgtggagggggcttactcacgagccgaagctactaggggagcgggaggctcctccagcagcccgccagaaaaggattccggactgctcgactccgttcttgatactctgctggcccctagtgggcctggacagtcccagcccagcccaccagcttgcgaagtcacttcctcatggtgcctgttcggacccgaattgccggaagatccgccagctgcccctgcaacacagagggtgctctcaccactgatgtctcgctccggttgcaaggtgggtgacagtagtgggactgccgctgcacacaaggtgctccccagaggactctcccccgcaaggcagctcttgctgcccgcttccgaaagccctcattggtctggtgcccctgtcaagccttcaccccaggcagcagccgtcgaagtggaagaagaggacgggtccgaaagcgaggagtccgctgggccattactgaaagggaaacccagggctctcggcggagctgccgctggcggaggcgctgcagctgtgcctcccggtgcagcggctgggggtgtagccctagtccccaaagaggattccaggttcagcgctcctagggtggcactggttgagcaggatgcacccatggcccctggcaggtcacctctggcaacaacagtgatggactttattcacgttccgatcctaccgctgaaccacgctttgctggcagcccgtacccgccagctcttggaggacgaatcatatgatggtggggctggcgctgcctcagcgttcgctccaccaagaagtagtccatgcgcctcaagcactcccgtcgcggtaggcgattttccagattgcgcttatccacccgatgcggagccaaaggacgacgcataccccctttactctgacttccaacctcccgcattgaagataaaggaggaggaggaaggcgctgaggcctccgccagatcccctagatcgtatcttgtggctggagctaaccctgccgcattccccgatttccctctgggtcctccaccacccctaccaccacgcgcaacaccatccagacctggtgaagctgccgtgacagcagcacccgcaagtgccagtgtttctagcgcatccagctcgggcagcacactggaatgtattctgtacaaggccgaaggtgcacccccacaacagggacctttcgccccaccaccttgtaaagcccctggtgcaagcggctgccttctccccagagatggactcccctcaacaagcgcatctgctgccgctgcaggggctgcccctgctttgtatcccgcactcggtctcaatgggctgccacaattaggctatcaggctgctgttttgaaggagggactcccacaagtctatcccccatacctcaactacctgcgtcccgattccgaggccagccagagccctcagtactcttttgagtccctcccccaaaaaatttgtctcatctgtggggatgaggcttctgggtgtcactacggggtgttgacgtgcggcagctgtaaggtattcttcaagcgagccatggaggggagaaaattcaagaagttcaacaaggtgcgcgtcgtgagggccctagatgccgtcgccctgccacagcctgtgggcgtcccaaacgagagccaggccttgtcccaacgcttcacattcagcccaggacaggacatccagcttatccccccacttattaatttgctgatgagcatcgaacctgacgttatttatgctgggcacgataataccaaacccgacacttccagcagtctgctcacctcactgaaccagcttggagagaggcagctgctctccgtggttaagtggtctaagagtctgcctgggttcagaaacctacacattgacgaccagatcaccttgattcagtatagctggatgtccctgatggtcttcggattgggctggcgctcatataagcacgtatccggacaaatgctttacttcgcccctgatctgattcttaatgagtcgcaccgctctcttagtagtttcaagctggcgaaaaaatcatcttcagtttag

SEQ ID NO: 292106 - DNA, 2412 bp, Artificial Sequence
  derived and/or modified sequence
atgaccgagttgaaggctaaaggacccagggcacctcatgtggcagggggacctccctcaccagaagttggctccccgctgttgtgtagacccgcagcagggccatttccagggtcccagacttccgacactctccccgaggtgtctgcaatacctattagcctcgatggtcttctgtttccccgtccatgtcagggccaggacccaagtgatgagaaaactcaggatcagcagtcactctctgacgtcgaaggtgcatatagtagggctgaagccacgcgaggggctggaggtagctcatcatccccccctgaaaaagatagtgggctgctggatagcgtgctggacaccttattggcccctagcggcccaggacagagtcagcccagccctcccgcatgcgaggtgacttcctcttggtgtctttttggtccagagctgccagaggatccaccagctgcccctgcaacccagagagtattatccccattgatgagtcgcagcggttgcaaggtaggcgatagtagtggcactgcggcagcacacaaggttctgcctaggggcttatctcctgctcgccaacttctactgcctgccagtgagagtccgcattggtcaggagccccagtgaaaccgagcccccaggccgctgccgtagaggttgaggaagaggatggctccgagtcagaagaatcagccggaccactgttgaaaggtaaacctcgagcccttggaggagcagcggcagggggtggtgccgctgctgtgcctccaggcgctgctgctggcggtgttgcattagtaccaaaggaggactcccgtttctcagcccctagagtggccttagtggagcaagacgcgcctatggcccctgggcgaagcccactggccaccacggtaatggattttattcatgtgccaattctccccctcaatcacgcccttttggccgcaaggacacggcaactgcttgaggatgaatcatacgacggaggcgcaggagctgcatctgcattcgcccctcccagatcttccccttgcgcctcctctacgcctgttgccgtgggtgattttccggactgtgcctatcctcccgacgcggagccgaaggatgacgcctaccccctgtattccgatttccaaccccctgcccttaagatcaaggaagaggaagagggcgcagaggccagtgcacgctccccgcgatcttatctcgtcgccggagccaatcccgcagctttccccgactttcccctcggcccacccccaccccttccgcctagggccaccccatcgaggccgggtgaagccgctgtgactgcggctcccgcttccgcctccgtctcatccgcctctagctcgggaagtaccttggaatgtatattgtataaggcagagggggctccccctcagcaggggccttttgcccctcccccatgtaaagccccaggtgcttccggatgtttgctgccaagagacggtcttcccagcacttccgccagcgccgctgctgcgggtgccgctcctgccctctaccctgcgctgggattaaacgggttgcctcagttagggtaccaagccgcagtgctaaaggagggcctccctcaggtttaccccccttacctaaactatctgcggcctgattctgaggcctcacagtccccacagtattcttttgagtcattaccacagaagatttgtctgatttgtggagatgaggcttccggttgtcactacggtgtgcttacttgtggtagttgcaaggtgttttttaaacgcgctatggaggggcagcacaactacctctgtgctggcaggaacgactgcattgttgacaagattagacggaaaaattgccctgcatgcaggctccgcaagtgctgtcaggccggtatggtcctgggaggccgtaagttcaaaaaatttaacaaggtgagggtggtccgtgcacttgacgcagtagcattgcctcaacctgttggcgtgccgaatgagtcgcaagcactgtcccagcggttcactttttcccctgggcaggacattcagctgatcccacccctgatcaacttattaatgagcatagagcctgatgtgatctatgcgggacacgataacactaagcccgatacgagctccagtttactaaccagcctgaatcagctgggggaacgccaactgctcagtgttgttaagtggagtaaatcactgcccggattccgcaacttgcatattgatgatcaaatcacattgatacagtactcatggatgtctctcatggtcttcgggctggggtggagatcttacaagcatgttagcggccagatgctttactttgcacctgacctcatcctgaatgaaagccaccgctcccttagctccttcaagctcgccaagaagtctagttcagtttag

SEQ ID NO: 292107 - DNA, 2073 bp, Artificial Sequence
  derived and/or modified sequence
atgacggaactgaaggctaaagggccaagagctccccacgtggctggcggacccccatctcccgaagttggatccccactgctttgtagaccagctgccggacccttccccggatcacagacttctgacaccctgcctgaagtttccgcaattccaatatcacttgacggcctgctgttccccaggccatgccaagggcaggacccatccgatgaaaagacccaggaccaacaaagcctttctgatgtcgaaggcgcttattcacgagccgaggcaacacggggagcaggtggttcatcgtcctcaccacctgaaaaagacagcggcttgctcgactcagtgctggacactctgctggcgccttcgggcccagggcagtcccagcccagtccccctgcctgcgaggtcacctcaagttggtgcctctttggcccagagctgcctgaagatccccctgccgctcccgcaacacaacgtgtgttatcccccctcatgtcacgcagcggctgcaaggttggggattctagcgggacggccgctgcccacaaggtcttacccagaggactgtctcctgcacgacaattgctgctccctgcctctgaatcacctcattggagtggcgcaccagtcaagccttcacctcaggctgcagcagttgaagtggaagaagaagacggatctgaaagcgaggagtcggctggccctcttctgaaaggaaagccgcgagcccttggaggggctgcagcgggaggtggcgctgcagcagtgccacctggggcagctgctgggggtgtcgcattggttcccaaggaggattcccggttttccgcaccaagggtagcccttgtagagcaagacgcgccaatggcccctggaagatctccactcgccacgaccgttatggactttattcacgtcccaatcttgcccctcaaccacgcactcctggctgcaagaactcgccagttactggaagacgaatcctacgacggaggagcaggtgccgcatcagccttcgccccacccaggtcctccccttgtgcaagtagcacaccggtcgccgtcggagactttcccgattgcgcataccctccggatgccgaacctaaggacgatgcgtacccgttatacagtgacttccaaccgccagccctaaaaatcaaggaggaagaagaaggggctgaagcctcagctagatccccacgcagctacctcgttgcaggggctaatcccgctgcctttcccgattttcctctaggtccacctccccctctaccacctcgggcaactccgtctcggcctggggaggccgcagtgactgcagccccagcctctgcctctgtatcctctgcctcttcatccggcagcacacttgaatgcatcctgtacaaagcagaaggggcaccaccacagcaggggccatttgctccccctccctgcaaagccccaggcgcaagcgggtgcctgcttccacgggacggccttcccagtacctcagcttcagcagcagcggcaggtgcagctcctgctctttaccccgctcttggacttaacggcttgcctcagcttggttaccaggcggctgtgctcaaggaagggcttccccaagtgtacccaccttatcttaactatctccggcctgatagcgaggccagtcaatcaccacagtacagcttcgagtctctcccacagaagatttgcctgatctgtggggatgaggcttccggatgccattacggggtgctcacttgcggctcttgcaaagtattttttaaacgggctatggaaggccaacacaattacctgtgcgctggaagaaatgattgtatagtggataaaatccgcagaaaaaattgccctgcctgtaggctcagaaaatgttgtcaggctggcatggtcttaggaggctttcggaatttgcacatcgacgatcagatcaccctgattcaatattcctggatgagccttatggtcttcgggctgggttggcggagctacaaacacgtctccggacaaatgctgtacttcgcacctgacctcattctcaacgaggagtcaatagtgacaagttag

SEQ ID NO: 292108 - DNA, 2365 bp, Artificial Sequence
  derived and/or modified sequence
atgactgagctgaaggcaaagggtccccgggctccccacgtggcgggcggcccgccctcccccgaggtcggatccccactgctgtgtcgcccagccgcaggtccgttcccggggagccagacctcggacaccttgcctgaagtttcggccatacctatctccctggacgggctactcttccctcggccctgccagggacaggacccctccgacgaaaagacgcaggaccagcagtcgctgtcggacgtggagggcgcatattccagagctgaagctacaaggggtgctggaggcagcagttctagtcccccagaaaaggacagcggactgctggacagtgtcttggacactctgttggcgccctcaggtcccgggcagagccaacccagccctcccgcctgcgaggtcaccagctcttggtgcctgtttggccccgaacttcccgaagatccaccggctgcccccgccacccagcgggtgttgtccccgctcatgagccggtccgggtgcaaggttggagacagctccgggacggcagctgcccataaagtgctgccccggggcctgtcaccagcccggcagctgctgctcccggcctctgagagccctcactggtccggggccccagtgaagccgtctccgcaggccgctgcggtggaggttgaggaggaggatggctctgagtccgaggagtctgcgggtccgcttctgaagggcaaacctcgggctctgggtggcgcggcggctggaggaggagccgcggctgtcccgccgggggcggcagcaggaggcgtcgccctggtccccaaggaagattcccgcttctcagcgcccagggtcgccctggtggagcaggacgcgccgatggcgcccgggcgctccccgctggccaccacggtgatggatttcatccacgtgcctatcctgcctctcaatcacgccttattggcagcccgcactcggcagctgctggaagacgaaagttacgacggcggggccggggctgccagcgcctttgccccgccgcggagttcaccctgtgcctcgtccaccccggtcgctgtaggcgacttccccgactgcgcgtacccgcccgacgccgagcccaaggacgacgcgtaccctctctatagcgacttccagccgcccgctctaaagataaaggaggaggaggaaggcgcggaggcctccgcgcgctccccgcgttcctaccttgtggccggtgccaaccccgcagccttcccggatttcccgttggggccaccgcccccgctgccgccgcgagcgaccccatccagacccggggaagcggcggtgacggccgcacccgccagtgcctcagtctcgtctgcgtcctcctcggggtcgaccctggagtgcatcctgtacaaagcggagggcgcgccgccccagcagggcccgttcgcgccgccgccctgcaaggcgccgggcgcgagcggctgcctgctcccgcgggacggcctgccctccacctccgcctctgccgccgccgccggggcggcccccgcgctctaccctgcactcggcctcaacgggctcccgcagctcggctaccaggccgccgtgctcaaggagggcctgccgcaggtctacccgccctatctcaactacctgaggccggattcagaagccagccagagcccacaatacagcttcgagtcattacctcagaagatttgtttaatctgtggggatgaagcatcaggctgtcattatggtgtccttacctgtgggagctgtaaggtcttctttaagagggcaatggaagggcagcacaactacttatgtgctggaagaaatgactgcatcgttgataaaatccgcagaaaaaactgcccagcatgtcgccttagaaagtgctgtcaggctggcatggtccttggaggttttcgaaacttacatattgatgaccagataactctcattcagtattcttggatgagcttaatggtgtttggtctaggatggagatcctacaaacacgtcagtgggcagatgctgtattttgcacctgatctaatactaaatgattcctttggaagggctacgaagtcaaacccagtttgaggagatgaggtcaagctacattagagagctcatcaaggcaattggtttgaggcaaaaaggagttgtgtcgagctcacagcgtttctatcaacttacaaaacttcttgataacttgcatgatcttgtcaaacaacttcatctgtactgcttgaatacatttatccagtcccgggcactgagtgttgaatttccagaaatgatgtctgaagttattgctgcacaattacccaagatattggcagggatggtgaaaccccttctctttcataaaaagtga

SEQ ID NO: 292109 - DNA, 2633 bp, Artificial Sequence
  derived and/or modified sequence
atgactgagctgaaggcaaagggtccccgggctccccacgtggcgggcggcccgccctcccccgaggtcggatccccactgctgtgtcgcccagccgcaggtccgttcccggggagccagacctcggacaccttgcctgaagtttcggccatacctatctccctggacgggctactcttccctcggccctgccagggacaggacccctccgacgaaaagacgcaggaccagcagtcgctgtcggacgtggagggcgcatattccagagctgaagctacaaggggtgctggaggcagcagttctagtcccccagaaaaggacagcggactgctggacagtgtcttggacactctgttggcgccctcaggtcccgggcagagccaacccagccctcccgcctgcgaggtcaccagctcttggtgcctgtttggccccgaacttcccgaagatccaccggctgcccccgccacccagcgggtgttgtccccgctcatgagccggtccgggtgcaaggttggagacagctccgggacggcagctgcccataaagtgctgccccggggcctgtcaccagcccggcagctgctgctcccggcctctgagagccctcactggtccggggccccagtgaagccgtctccgcaggccgctgcggtggaggttgaggaggaggatggctctgagtccgaggagtctgcgggtccgcttctgaagggcaaacctcgggctctgggtggcgcggcggctggaggaggagccgcggctgtcccgccgggggcggcagcaggaggcgtcgccctggtccccaaggaagattcccgcttctcagcgcccagggtcgccctggtggagcaggacgcgccgatggcgcccgggcgctccccgctggccaccacggtgatggatttcatccacgtgcctatcctgcctctcaatcacgccttattggcagcccgcactcggcagctgctggaagacgaaagttacgacggcggggccggggctgccagcgcctttgccccgccgcggagttcaccctgtgcctcgtccaccccggtcgctgtaggcgacttccccgactgcgcgtacccgcccgacgccgagcccaaggacgacgcgtaccctctctatagcgacttccagccgcccgctctaaagataaaggaggaggaggaaggcgcggaggcctccgcgcgctccccgcgttcctaccttgtggccggtgccaaccccgcagccttcccggatttcccgttggggccaccgcccccgctgccgccgcgagcgaccccatccagacccggggaagcggcggtgacggccgcacccgccagtgcctcagtctcgtctgcgtcctcctcggggtcgaccctggagtgcatcctgtacaaagcggagggcgcgccgccccagcagggcccgttcgcgccgccgccctgcaaggcgccgggcgcgagcggctgcctgctcccgcgggacggcctgccctccacctccgcctctgccgccgccgccggggcggcccccgcgctctaccctgcactcggcctcaacgggctcccgcagctcggctaccaggccgccgtgctcaaggagggcctgccgcaggtctacccgccctatctcaactacctgaggccggattcagaagccagccagagcccacaatacagcttcgagtcattacctcagaagatttgtttaatctgtggggatgaagcatcaggctgtcattatggtgtccttacctgtgggagctgtaaggtcttctttaagagggcaatggaaggtcgaaaatttaaaaagttcaataaagtcagagttgtgagagcactggatgctgttgctctcccacagccagtgggcgttccaaatgaaagccaagccctaagccagagattcactttttcaccaggtcaagacatacagttgattccaccactgatcaacctgttaatgagcattgaaccagatgtgatctatgcaggacatgacaacacaaaacctgacacctccagttctttgctgacaagtcttaatcaactaggcgagaggcaacttctttcagtagtcaagtggtctaaatcattgccaggttttcgaaacttacatattgatgaccagataactctcattcagtattcttggatgagcttaatggtgtttggtctaggatggagatcctacaaacacgtcagtgggcagatgctgtattttgcacctgatctaatactaaatgaatcccacaggagtttgtcaagcttcaagttagccaagaagagttcctctgtatgaaagtattgttacttcttaatacaattcctttggaagggctacgaagtcaaacccagtttgaggagatgaggtcaagctacattagagagctcatcaaggcaattggtttgaggcaaaaaggagttgtgtcgagctcacagcgtttctatcaacttacaaaacttcttgataacttgcatgatcttgtcaaacaacttcatctgtactgcttgaatacatttatccagtcccgggcactgagtgttgaatttccagaaatgatgtctgaagttattgctgcacaattacccaagatattggcagggatggtgaaaccccttctctttcataaaaagtga

SEQ ID NO: 292110 - DNA, 2750 bp, Artificial Sequence
  derived and/or modified sequence
atgactgagctgaaggcaaagggtccccgggctccccacgtggcgggcggcccgccctcccccgaggtcggatccccactgctgtgtcgcccagccgcaggtccgttcccggggagccagacctcggacaccttgcctgaagtttcggccatacctatctccctggacgggctactcttccctcggccctgccagggacaggacccctccgacgaaaagacgcaggaccagcagtcgctgtcggacgtggagggcgcatattccagagctgaagctacaaggggtgctggaggcagcagttctagtcccccagaaaaggacagcggactgctggacagtgtcttggacactctgttggcgccctcaggtcccgggcagagccaacccagccctcccgcctgcgaggtcaccagctcttggtgcctgtttggccccgaacttcccgaagatccaccggctgcccccgccacccagcgggtgttgtccccgctcatgagccggtccgggtgcaaggttggagacagctccgggacggcagctgcccataaagtgctgccccggggcctgtcaccagcccggcagctgctgctcccggcctctgagagccctcactggtccggggccccagtgaagccgtctccgcaggccgctgcggtggaggttgaggaggaggatggctctgagtccgaggagtctgcgggtccgcttctgaagggcaaacctcgggctctgggtggcgcggcggctggaggaggagccgcggctgtcccgccgggggcggcagcaggaggcgtcgccctggtccccaaggaagattcccgcttctcagcgcccagggtcgccctggtggagcaggacgcgccgatggcgcccgggcgctccccgctggccaccacggtgatggatttcatccacgtgcctatcctgcctctcaatcacgccttattggcagcccgcactcggcagctgctggaagacgaaagttacgacggcggggccggggctgccagcgcctttgccccgccgcggagttcaccctgtgcctcgtccaccccggtcgctgtaggcgacttccccgactgcgcgtacccgcccgacgccgagcccaaggacgacgcgtaccctctctatagcgacttccagccgcccgctctaaagataaaggaggaggaggaaggcgcggaggcctccgcgcgctccccgcgttcctaccttgtggccggtgccaaccccgcagccttcccggatttcccgttggggccaccgcccccgctgccgccgcgagcgaccccatccagacccggggaagcggcggtgacggccgcacccgccagtgcctcagtctcgtctgcgtcctcctcggggtcgaccctggagtgcatcctgtacaaagcggagggcgcgccgccccagcagggcccgttcgcgccgccgccctgcaaggcgccgggcgcgagcggctgcctgctcccgcgggacggcctgccctccacctccgcctctgccgccgccgccggggcggcccccgcgctctaccctgcactcggcctcaacgggctcccgcagctcggctaccaggccgccgtgctcaaggagggcctgccgcaggtctacccgccctatctcaactacctgaggccggattcagaagccagccagagcccacaatacagcttcgagtcattacctcagaagatttgtttaatctgtggggatgaagcatcaggctgtcattatggtgtccttacctgtgggagctgtaaggtcttctttaagagggcaatggaagggcagcacaactacttatgtgctggaagaaatgactgcatcgttgataaaatccgcagaaaaaactgcccagcatgtcgccttagaaagtgctgtcaggctggcatggtccttggaggtcgaaaatttaaaaagttcaataaagtcagagttgtgagagcactggatgctgttgctctcccacagccagtgggcgttccaaatgaaagccaagccctaagccagagattcactttttcaccaggtcaagacatacagttgattccaccactgatcaacctgttaatgagcattgaaccagatgtgatctatgcaggacatgacaacacaaaacctgacacctccagttctttgctgacaagtcttaatcaactaggcgagaggcaacttctttcagtagtcaagtggtctaaatcattgccaggttttcgaaacttacatattgatgaccagataactctcattcagtattcttggatgagcttaatggtgtttggtctaggatggagatcctacaaacacgtcagtgggcagatgctgtattttgcacctgatctaatactaaatgaatcccacaggagtttgtcaagcttcaagttagccaagaagagttcctctgtatgaaagtattgttacttcttaatacaattcctttggaagggctacgaagtcaaacccagtttgaggagatgaggtcaagctacattagagagctcatcaaggcaattggtttgaggcaaaaaggagttgtgtcgagctcacagcgtttctatcaacttacaaaacttcttgataacttgcatgatcttgtcaaacaacttcatctgtactgcttgaatacatttatccagtcccgggcactgagtgttgaatttccagaaatgatgtctgaagttattgctgcacaattacccaagatattggcagggatggtgaaaccccttctctttcataaaaagtga

SEQ ID NO: 292111 - DNA, 2816 bp, Artificial Sequence
  derived and/or modified sequence
agtccacagctgtcactaatcggggtaagccttgttgtatttgtgcgtgtgggtggcattctcaatgagaactagcttcacttgtcatttgagtgaaatctacaacccgaggcggctagtgctcccgcactactgggatctgagatcttcggagatgactgtcgcccgcagtacggagccagcagaagtccgacccttcctgggaatgggctgtaccgagaggtccgactagccccagggttttagtgagggggcagtggaactcagcgagggactgagagcttcacagcatgcacgagtttgatgccagagaaaaagtcgggagataaaggagccgcgtgtcactaaattgccgtcgcagccgcagccactcaagtgccggacttgtgagtactctgcgtctccagtcctcggacagaagttggagaactctcttggagaactccccgagttaggagacgagatctcctaacaattactactttttcttgcgctccccacttgccgctcgctgggacaaacgacagccacagttcccctgacgacaggatggaggccaagggcaggagctgaccagcgccgccctcccccgcccccgacccaggaggtggagatccctccggtccagccacattcaacacccactttctcctccctctgcccctatattcccgaaaccccctcctccttcccttttccctcctcctggagacgggggaggagaaaaggggagtccagtcgtcatgactgagctgaaggcaaagggtccccgggctccccacgtggcgggcggcccgccctcccccgaggtcggatccccactgctgtgtcgcccagccgcaggtccgttcccggggagccagacctcggacaccttgcctgaagtttcggccatacctatctccctggacgggctactcttccctcggccctgccagggacaggacccctccgacgaaaagacgcaggaccagcagtcgctgtcggacgtggagggcgcatattccagagctgaagctacaaggggtgctggaggcagcagttctagtcccccagaaaaggacagcggactgctggacagtgtcttggacactctgttggcgccctcaggtcccgggcagagccaacccagccctcccgcctgcgaggtcaccagctcttggtgcctgtttggccccgaacttcccgaagatccaccggctgcccccgccacccagcgggtgttgtccccgctcatgagccggtccgggtgcaaggttggagacagctccgggacggcagctgcccataaagtgctgccccggggcctgtcaccagcccggcagctgctgctcccggcctctgagagccctcactggtccggggccccagtgaagccgtctccgcaggccgctgcggtggaggttgaggaggaggatggctctgagtccgaggagtctgcgggtccgcttctgaagggcaaacctcgggctctgggtggcgcggcggctggaggaggagccgcggctgtcccgccgggggcggcagcaggaggcgtcgccctggtccccaaggaagattcccgcttctcagcgcccagggtcgccctggtggagcaggacgcgccgatggcgcccgggcgctccccgctggccaccacggtgatggatttcatccacgtgcctatcctgcctctcaatcacgccttattggcagcccgcactcggcagctgctggaagacgaaagttacgacggcggggccggggctgccagcgcctttgccccgccgcggagttcaccctgtgcctcgtccaccccggtcgctgtaggcgacttccccgactgcgcgtacccgcccgacgccgagcccaaggacgacgcgtaccctctctatagcgacttccagccgcccgctctaaagataaaggaggaggaggaaggcgcggaggcctccgcgcgctccccgcgttcctaccttgtggccggtgccaaccccgcagccttcccggatttcccgttggggccaccgcccccgctgccgccgcgagcgaccccatccagacccggggaagcggcggtgacggccgcacccgccagtgcctcagtctcgtctgcgtcctcctcggggtcgaccctggagtgcatcctgtacaaagcggagggcgcgccgccccagcagggcccgttcgcgccgccgccctgcaaggcgccgggcgcgagcggctgcctgctcccgcgggacggcctgccctccacctccgcctctgccgccgccgccggggcggcccccgcgctctaccctgcactcggcctcaacgggctcccgcagctcggctaccaggccgccgtgctcaaggagggcctgccgcaggtctacccgccctatctcaactacctgaggccggattcagaagccagccagagcccacaatacagcttcgagtcattacctcagaagatttgtttaatctgtggggatgaagcatcaggctgtcattatggtgtccttacctgtgggagctgtaaggtcttctttaagagggcaatggaagggcagcacaactacttatgtgctggaagaaatgactgcatcgttgataaaatccgcagaaaaaactgcccagcatgtcgccttagaaagtgctgtcaggctggcatggtccttggaggttttcgaaacttacatattgatgaccagataactctcattcagtattcttggatgagcttaatggtgtttggtctaggatggagatcctacaaacacgtcagtgggcagatgctgtattttgcacctgatctaatactaaatgaggaaagtattgttacttcttaa

SEQ ID NO: 292112 - DNA, 189 bp, Artificial Sequence
  derived and/or modified sequence
atgctccaggtcgtccaggaaggtaatccagcgccattcatcattaacaccgtgaaaagaggcagaagggaccgtgagcgtcagaggacaccatgggcccctcatccattaggctttcaggaacggaggtacatttacgagtcccccaatcacagggggaaggacagctccttccttgcccagaagtag

SEQ ID NO: 292113 - DNA, 1720 bp, Artificial Sequence
  derived and/or modified sequence
ggcttctggaatggactgagtccatcgtggaaagggctgggggcaggaggaggtggggaggggcactgcctgcggaaggtaggattagatcattagctcagtgacctcctagggtttcgatgtgctatgttctcatcctacagttggtttggtaatgatctgcaagtcccggagagcaacagcacagctctgcctgacgctctcattaaaatctatgcagccaagctcggcactttgtagcagccggccttgcgaagcctcctcagctcggggggccggggacccagtgagccgagaggccctctgggctccacttatgcatatgcaccaaaaaaaaaaaaaaaaaaaaaaggcttctttagacccagagccctttaagatgataaaggacccaatgcaggtaatcctgtttttggactcacgtaatgtagaatgcaaagtttagtgattatttaatctgggcctaagctagtgagagtatggaacaatggcccataaggactcctaagcgccgaagccaaggagcctcctcccttcctggttcaccccgcccaagggacctgcccccattcctgtggccctggggcccagcttccaatagtgtcagaagcaacttgtggctttgccttggttgtgagatgggtacattccaaaggagcagcctgggggagggggcaggctcagccagcccttggaggctcagagcagctggcccaggctccagctcgcctccagtggaagcccgagcgccctcagaaacgaccctggccaatgtcaacgcagagccgaggcggtgttgtcacggctaatgtgaaatctcttcccgtggcgcccatcctctgactctgcagtgccagcttggacagattgaggtctctgtggctttggtgaccctgcttaagcattcccaccgtgtcccagctctgctctaggactgcctcccactgcggcccctcacctgacttcagggtatggggagggagggagccagtgctccaaggccagggggctttgctcatgagagatgtcaggcttcctggaggcatcaggctttgagccctgctggggtccaactgacctgggaccaggtgtcgcgcagagatgtgcctcattctgtgcctccttctgtgcctcctaccatgttccctttaactgtgcctcagtgtgggttagggaacaattttgttattgtattaagtttattcagttaattcacttgaggaactaaccagtttttactttctgtctagaatgatgtacatgtagtagagtaagccataatgctcccaaagtgccttgttttctctgatacaaacatatttataaggacatattcctgtgggttcttgggtgtgtttgccacatcaagattttagggaaggggggtatatgtgtagtagggatgccgtttgaaaacaggcactcttcccctgaggatgggaaaggagctcttcagttggagatctaggcagtgggttaagccagacccctaaagtgaccctttcctcttctgccctattcttctcagaccctcagaaagacatccaatttttttaaatccctgtagctccaagcctggtctcatttgcttccctgccaggctcatcgtgtgtataccacatttgtgccccactgacctgaaggttccatgtaactgtatacacatgaatacttaaatgccaacatttaaaataatttgataaagtctttgtagccactc

SEQ ID NO: 292114 - DNA, 951 bp, Artificial Sequence
  derived and/or modified sequence
atggagagcaatgtgaaagtgcagagacaagagggagctaaagtgagcctgatgtctccagaccagcttagaaataagttcccttggatcaataccgaaggggttgcccttgcgagttacggaatggaagacgaaggctggtttgacccatggtgcctgctgcaggggctacgaaggaaggtccagtcattgggcgttctcttctgccaaggtgaggtaacacggtttgtgagctccagtcaaagaatgctgaccaccgatgacaaggccgtagtgctcaagcggattcacgaggtgcacgtgaagatggacagatccttggagtatcagcctgttgagtgcgcgatcgtaattaacgcagctggggcttggtccgcacaaatagccgccctggctggagtaggcgagggacccccagggaccctgcagggtaccaagctccctgtagagccccggaaaagatatgtgtatgtttggcactgcccacagggacccggtctcgagacaccactggttgctgacactagcggagcttatttcagacgggaaggcctcggatctaactacctgggcggccgcagccccacagagcaggaggaaccagacccagccaatttggaagtcgatcacgatttttttcaggataaggtgtggccccaccttgcgctgcgcgtccctgctttcgagactttaaaagtgcaatctgcctgggcaggctactacgattacaacacgttcgatcaaaatggcgtagttgggccacatcctcttgtcgtaaatatgtattttgctacaggcttctctggccatggtcttcagcaggccccgggtattgggagagctgttgcggagatggtgcttaagggccgcttccagacgatagacctgagtcctttcttgttcactcggttttatctcggggaaaagattcaggaaaataacatcatttag

SEQ ID NO: 292115 - DNA, 951 bp, Artificial Sequence
  derived and/or modified sequence
atggagagcaatgtgaaggtgcagaggcaggagggcgccaaggtgtccctgatgagcccagaccagctgaggaacaagttcccctggatcaacacagagggcgtggccctggccagctatggcatggaggatgagggctggtttgacccctggtgcctgctgcagggcctgcggaggaaggtgcagagcctgggcgtgctcttctgccagggcgaggtgaccaggtttgtgagcagcagccagaggatgctgaccacagatgacaaggctgtggtgctgaagagaattcatgaggtgcacgtgaagatggacaggagcctggagtaccagcctgtggagtgtgccatcgtcatcaatgctgctggggcctggagcgcccagattgctgccctggccggcgtgggggagggccccccaggcaccctgcagggcaccaagctgcctgtggagcccaggaagagatatgtgtatgtgtggcactgcccccagggccctggcctggagacccccctggtggccgacaccagcggggcctacttcagaagagagggcctgggcagcaactacctgggcggccgcagccccacagagcaggaggagccagaccctgccaacctggaggtggaccatgacttcttccaggacaaggtgtggccccacctggccctgcgggtgcctgcctttgagaccctgaaggtgcagagcgcctgggccggctactatgactacaacacctttgaccagaatggagtggtgggcccccaccccctggtggtgaacatgtactttgccaccggcttcagcggccacggcctgcagcaggcccctggcatcggccgggctgtggccgagatggtgctgaagggccgcttccagaccatcgacctgagccccttcctgttcacccgcttctacctgggggagaagatccaggagaacaacatcatctag

SEQ ID NO: 292116 - DNA, 951 bp, Artificial Sequence
  derived and/or modified sequence
atggagagcaacgtgaaggtgcagcggcaggagggcgccaaggtgtctctgatgagccccgaccagctgcgtaataaatttccctggataaacacagagggggtggcccttgcctcctacggaatggaagatgaaggttggtttgacccgtggtgcctgctgcaggggcttagacggaaggtacagagtctgggagtactgttctgtcaaggtgaggtcaccaggtttgtgtctagctctcagcggatgcttaccaccgacgataaagccgtggttttaaagaggatacacgaagtccacgtcaaaatggataggagcttggagtaccagccagtggaatgcgccattgtgataaatgcggctggagcatggtccgcccagattgccgctctggcaggcgtgggagagggaccgccaggtaccctgcagggcactaagctgccagtcgagccgagaaaacggtacgtctatgtgtggcactgcccacagggcccaggccttgaaactccactggtcgccgatacttccggcgcatactttcgccgggaggggttgggtagcaattatctggggggacgctcccctacagagcaagaggaacccgatccagccaacctcgaggtggatcacgacttcttccaggacaaagtgtggccacaccttgctcttagagtgcccgcttttgaaaccctgaaagtgcagtcagcttgggcaggttactacgattacaacactttcgaccaaaatggggtcgttgggccacaccctctggtggttaacatgtatttcgccacaggcttcagcgggcatggtttgcagcaggctccaggtatcgggcgggccgtggctgagatggtcctcaagggccgcttccagaccatcgacctgtctccattcctgttcacgcggttctatctgggcgagaagatacaagagaataacataatttag

SEQ ID NO: 292117 - DNA, 951 bp, Artificial Sequence
  derived and/or modified sequence
atggagagcaatgtcaaggtccagcgccaggaaggggctaaggtgtcgttaatgtcccctgatcagctgagaaacaagttcccatggattaacaccgaaggcgtggccctggcatcttatggtatggaggatgaaggttggttcgatccatggtgtctgctgcagggactccgacgaaaggtacaaagcctgggggttctcttttgccagggtgaggtgacacgatttgtgtcaagcagtcagaggatgcttacaaccgacgataaagctgtcgtgctgaagcgcattcatgaggttcatgtcaagatggacaggtccctcgaatatcagccagtagagtgtgctatcgtgatcaacgccgctggggcttggagcgcacagatcgccgctctcgctggcgtcggtgaagggcctcccggtaccctgcagggaaccaaactcccagtggagcccaggaagaggtatgtgtacgtttggcactgtccacagggacctgggctggaaaccccactggttgcagatacaagcggcgcttacttccggagggagggactgggcagtaattatttaggtgggcgatcccctaccgagcaggaggagcccgacccagccaacctcgaagttgaccatgatttctttcaggacaaagtctggccacatctcgctttgcgcgtgcctgcttttgaaactctgaaagtgcagagtgcctgggcaggctattatgattacaacaccttcgatcaaaatggggtggtcggtcctcacccccttgtggtcaatatgtactttgcaaccggattctcagggcatggccttcagcaggcgcctggtattgggagggccgtggccgagatggtcctgaaaggacgtttccagactatcgatctgtccccgtttttgtttacaaggttctatctgggagaaaagattcaggagaacaatatcatctag

SEQ ID NO: 292118 - DNA, 951 bp, Artificial Sequence
  derived and/or modified sequence
atggagagcaacgtgaaggtgcagagacaggagggcgccaaggtgagcctgatgagccccgaccagctgagaaacaagttcccctggatcaacaccgagggcgtggccctggccagctacggcatggaggacgagggctggttcgacccctggtgcctgctgcagggcctgagaagaaaggtgcagagcctgggcgtgctgttctgccagggcgaggtgaccagattcgtgagcagcagccagagaatgctgaccaccgacgacaaggccgtggtgctgaagagaatccacgaggtgcacgtgaagatggacagaagcctggagtaccagcccgtggagtgcgccatcgtgatcaacgccgccggcgcctggagcgcccagatcgccgccctggccggcgtgggcgagggcccccccggcaccctgcagggcaccaagctgcccgtggagcccagaaagagatacgtgtacgtgtggcactgcccccagggccccggcctggagacccccctggtggccgacaccagcggcgcctacttcagaagagagggcctgggcagcaactacctgggcggcagaagccccaccgagcaggaggagcccgaccccgccaacctggaggtggaccacgacttcttccaggacaaggtgtggccccacctggccctgagagtgcccgccttcgagaccctgaaggtgcagagcgcctgggccggctactacgactacaacaccttcgaccagaacggcgtggtgggcccccaccccctggtggtgaacatgtacttcgccaccggcttcagcggccacggcctgcagcaggcccccggcatcggcagagccgtggccgagatggtgctgaagggcagattccagaccatcgacctgagccccttcctgttcaccagattctacctgggcgagaagatccaggagaacaacatcatctag

SEQ ID NO: 292119 - protein, 1191 aa, Artificial Sequence
  derived and/or modified sequence
MEAMSPQQETLGGQPGRSSSLTGVSRLAGGSCTKKKMKTLAERRRSAPSLILDKALQKRPTTRDSPSASVDTCTFLSSLVCSNRTLLIDGRAELKRGLQRQERHLFLFNDLFVVAKIKYNNNFKIKNKIKLTDMWTASCVDEVGEGNTNAMKSFVLGWPTVNFVATFSSPEQKDKWLSLLQRYINLEKEKDYPKSIPLKIFAKDIGNCAYSKTITVMNSDTANEVINMSLPMLGITGSERDYQLWVNSGKEEAPYPLIGHEYPYGIKMSHLRDSALLTPGSKDSTTPFNLQEPFLMEQLPREMQCQFILKPSRLAAAQQLSDSGHKTFKRRRSIINWAFWRGSSTHLDNLPSSPTSPMPGQLFGISLPNICENDNLPKPVLDMLFFLNQKGPLTKGIFRQSANVKSCRELKEKLNSGVEVHLDCESIFVIASVLKDFLRNIPGSIFSSDLYDHWVSVMDQGNDEEKINTVQRLLDQLPRANVVLLRYLFGVLHNIEQHSSSNQMTAFNLAVCVAPSILWPPASSSPELENEFTKKVSLLIQFLIENCLRIFGEEITSLFREVSVRCDTRENASDISCFQLNDSSYDSLENELNEDVDAPCSDLVKKLGQGSRSMDSVLTLSDYDLDQPEVEGLLTLSDFDLAHSKDEDVQMKRPLESKPVNILVYTKIPLRDHARAPSAMCTPSYLSTAAANAAKSLRRHRRCSEPSIDYLDSKLSYLREFYQKKLRKSSCDAILSQKDEDYLKQNQPLQEEGKTCFKQSLVTGTDVSKKNATTQNTKKKSLSGSEGNHVKLFPKSKPVAISVASYSPMSSQDHSKNQPFDVNTSGYSPPHTADALKGPRTHRRCSEPNIEDQNRKLTYLRGIYSKKQHKTSCEAGLLHGEEDYLKRHKSLQMEGQKLINQSLVMGIEVGKSSATNQNTEKVLPPRLNLCPRTSYSSLSSPGTSPSGSSVSSQDSAFSQISEHSVFTPTETSSPIDCTFQAQRKREDLSPDFSNASHVSGMPGPSSGQACSRPAYTKKDTMEWHSQMHSVTLHPSTWLRNGVASLKNWSLKKKAKAARPEEEKIASPKGPLEPPPHASGVPEANSLQEEQKDLPLRAAEGLSPVQSAQRCSSSPFQDSERHCSSPFSLVESRLKLCMKSHEEIEPGSQSSSGSLPWERASASSWTLEDATSPDSGPTVVCDIEDRYLTKDI

SEQ ID NO: 292120 - protein, 1155 aa, Artificial Sequence
  derived and/or modified sequence
MKTLAERRRSAPSLILDKALQKRPTTRDSPSASVDTCTFLSSLVCSNRTLLIDGRAELKRGLQRQERHLFLFNDLFVVAKIKYNNNFKIKNKIKLTDMWTASCVDEVGEGNTNAMKSFVLGWPTVNFVATFSSPEQKDKWLSLLQRYINLEKEKDYPKSIPLKIFAKDIGNCAYSKTITVMNSDTANEVINMSLPMLGITGSERDYQLWVNSGKEEAPYPLIGHEYPYGIKMSHLRDSALLTPGSKDSTTPFNLQEPFLMEQLPREMQCQFILKPSRLAAAQQLSDSGHKTFKRRRSIINWAFWRGSSTHLDNLPSSPTSPMPGQLFGISLPNICENDNLPKPVLDMLFFLNQKGPLTKGIFRQSANVKSCRELKEKLNSGVEVHLDCESIFVIASVLKDFLRNIPGSIFSSDLYDHWVSVMDQGNDEEKINTVQRLLDQLPRANVVLLRYLFGVLHNIEQHSSSNQMTAFNLAVCVAPSILWPPASSSPELENEFTKKVSLLIQFLIENCLRIFGEEITSLFREVSVRCDTRENASDISCFQLNDSSYDSLENELNEDVDAPCSDLVKKLGQGSRSMDSVLTLSDYDLDQPEVEGLLTLSDFDLAHSKDEDVQMKRPLESKPVNILVYTKIPLRDHARAPSAMCTPSYLSTAAANAAKSLRRHRRCSEPSIDYLDSKLSYLREFYQKKLRKSSCDAILSQKDEDYLKQNQPLQEEGKTCFKQSLVTGTDVSKKNATTQNTKKKSLSGSEGNHVKLFPKSKPVAISVASYSPMSSQDHSKNQPFDVNTSGYSPPHTADALKGPRTHRRCSEPNIEDQNRKLTYLRGIYSKKQHKTSCEAGLLHGEEDYLKRHKSLQMEGQKLINQSLVMGIEVGKSSATNQNTEKVLPPRLNLCPRTSYSSLSSPGTSPSGSSVSSQDSAFSQISEHSVFTPTETSSPIDCTFQAQRKREDLSPDFSNASHVSGMPGPSSGQACSRPAYTKKDTMEWHSQMHSVTLHPSTWLRNGVASLKNWSLKKKAKAARPEEEKIASPKGPLEPPPHASGVPEANSLQEEQKDLPLRAAEGLSPVQSAQRCSSSPFQDSERHCSSPFSLVESRLKLCMKSHEEIEPGSQSSSGSLPWERASASSWTLEDATSPDSGPTVVCDIEDRYLTKDI

SEQ ID NO: 292121 - DNA, 3576 bp, Artificial Sequence
  derived and/or modified sequence
atggaggccatgagcccccagcaggagaccctgggcggccagcccggcagaagcagcagcctgaccggcgtgagcagactggccggcggcagctgcaccaagaagaagatgaagaccctggccgagagaagaagaagcgcccccagcctgatcctggacaaggccctgcagaagagacccaccaccagagacagccccagcgccagcgtggacacctgcaccttcctgagcagcctggtgtgcagcaacagaaccctgctgatcgacggcagagccgagctgaagagaggcctgcagagacaggagagacacctgttcctgttcaacgacctgttcgtggtggccaagatcaagtacaacaacaacttcaagatcaagaacaagatcaagctgaccgacatgtggaccgccagctgcgtggacgaggtgggcgagggcaacaccaacgccatgaagagcttcgtgctgggctggcccaccgtgaacttcgtggccaccttcagcagccccgagcagaaggacaagtggctgagcctgctgcagagatacatcaacctggagaaggagaaggactaccccaagagcatccccctgaagatcttcgccaaggacatcggcaactgcgcctacagcaagaccatcaccgtgatgaacagcgacaccgccaacgaggtgatcaacatgagcctgcccatgctgggcatcaccggcagcgagagagactaccagctgtgggtgaacagcggcaaggaggaggccccctaccccctgatcggccacgagtacccctacggcatcaagatgagccacctgagagacagcgccctgctgacccccggcagcaaggacagcaccacccccttcaacctgcaggagcccttcctgatggagcagctgcccagagagatgcagtgccagttcatcctgaagcccagcagactggccgccgcccagcagctgagcgacagcggccacaagaccttcaagagaagaagaagcatcatcaactgggccttctggagaggcagcagcacccacctggacaacctgcccagcagccccaccagccccatgcccggccagctgttcggcatcagcctgcccaacatctgcgagaacgacaacctgcccaagcccgtgctggacatgctgttcttcctgaaccagaagggccccctgaccaagggcatcttcagacagagcgccaacgtgaagagctgcagagagctgaaggagaagctgaacagcggcgtggaggtgcacctggactgcgagagcatcttcgtgatcgccagcgtgctgaaggacttcctgagaaacatccccggcagcatcttcagcagcgacctgtacgaccactgggtgagcgtgatggaccagggcaacgacgaggagaagatcaacaccgtgcagagactgctggaccagctgcccagagccaacgtggtgctgctgagatacctgttcggcgtgctgcacaacatcgagcagcacagcagcagcaaccagatgaccgccttcaacctggccgtgtgcgtggcccccagcatcctgtggccccccgccagcagcagccccgagctggagaacgagttcaccaagaaggtgagcctgctgatccagttcctgatcgagaactgcctgagaatcttcggcgaggagatcaccagcctgttcagagaggtgagcgtgagatgcgacaccagagagaacgccagcgacatcagctgcttccagctgaacgacagcagctacgacagcctggagaacgagctgaacgaggacgtggacgccccctgcagcgacctggtgaagaagctgggccagggcagcagaagcatggacagcgtgctgaccctgagcgactacgacctggaccagcccgaggtggagggcctgctgaccctgagcgacttcgacctggcccacagcaaggacgaggacgtgcagatgaagagacccctggagagcaagcccgtgaacatcctggtgtacaccaagatccccctgagagaccacgccagagcccccagcgccatgtgcacccccagctacctgagcaccgccgccgccaacgccgccaagagcctgagaagacacagaagatgcagcgagcccagcatcgactacctggacagcaagctgagctacctgagagagttctaccagaagaagctgagaaagagcagctgcgacgccatcctgagccagaaggacgaggactacctgaagcagaaccagcccctgcaggaggagggcaagacctgcttcaagcagagcctggtgaccggcaccgacgtgagcaagaagaacgccaccacccagaacaccaagaagaagagcctgagcggcagcgagggcaaccacgtgaagctgttccccaagagcaagcccgtggccatcagcgtggccagctacagccccatgagcagccaggaccacagcaagaaccagcccttcgacgtgaacaccagcggctacagccccccccacaccgccgacgccctgaagggccccagaacccacagaagatgcagcgagcccaacatcgaggaccagaacagaaagctgacctacctgagaggcatctacagcaagaagcagcacaagaccagctgcgaggccggcctgctgcacggcgaggaggactacctgaagagacacaagagcctgcagatggagggccagaagctgatcaaccagagcctggtgatgggcatcgaggtgggcaagagcagcgccaccaaccagaacaccgagaaggtgctgccccccagactgaacctgtgccccagaaccagctacagcagcctgagcagccccggcaccagccccagcggcagcagcgtgagcagccaggacagcgccttcagccagatcagcgagcacagcgtgttcacccccaccgagaccagcagccccatcgactgcaccttccaggcccagagaaagagagaggacctgagccccgacttcagcaacgccagccacgtgagcggcatgcccggccccagcagcggccaggcctgcagcagacccgcctacaccaagaaggacaccatggagtggcacagccagatgcacagcgtgaccctgcaccccagcacctggctgagaaacggcgtggccagcctgaagaactggagcctgaagaagaaggccaaggccgccagacccgaggaggagaagatcgccagccccaagggccccctggagccccccccccacgccagcggcgtgcccgaggccaacagcctgcaggaggagcagaaggacctgcccctgagagccgccgagggcctgagccccgtgcagagcgcccagagatgcagcagcagccccttccaggacagcgagagacactgcagcagccccttcagcctggtggagagcagactgaagctgtgcatgaagagccacgaggagatcgagcccggcagccagagcagcagcggcagcctgccctgggagagagccagcgccagcagctggaccctggaggacgccaccagccccgacagcggccccaccgtggtgtgcgacatcgaggacagatacctgaccaaggacatctag

SEQ ID NO: 292122 - DNA, 3468 bp, Artificial Sequence
  derived and/or modified sequence
atgaagaccctggccgagagaagaagaagcgcccccagcctgatcctggacaaggccctgcagaagagacccaccaccagagacagccccagcgccagcgtggacacctgcaccttcctgagcagcctggtgtgcagcaacagaaccctgctgatcgacggcagagccgagctgaagagaggcctgcagagacaggagagacacctgttcctgttcaacgacctgttcgtggtggccaagatcaagtacaacaacaacttcaagatcaagaacaagatcaagctgaccgacatgtggaccgccagctgcgtggacgaggtgggcgagggcaacaccaacgccatgaagagcttcgtgctgggctggcccaccgtgaacttcgtggccaccttcagcagccccgagcagaaggacaagtggctgagcctgctgcagagatacatcaacctggagaaggagaaggactaccccaagagcatccccctgaagatcttcgccaaggacatcggcaactgcgcctacagcaagaccatcaccgtgatgaacagcgacaccgccaacgaggtgatcaacatgagcctgcccatgctgggcatcaccggcagcgagagagactaccagctgtgggtgaacagcggcaaggaggaggccccctaccccctgatcggccacgagtacccctacggcatcaagatgagccacctgagagacagcgccctgctgacccccggcagcaaggacagcaccacccccttcaacctgcaggagcccttcctgatggagcagctgcccagagagatgcagtgccagttcatcctgaagcccagcagactggccgccgcccagcagctgagcgacagcggccacaagaccttcaagagaagaagaagcatcatcaactgggccttctggagaggcagcagcacccacctggacaacctgcccagcagccccaccagccccatgcccggccagctgttcggcatcagcctgcccaacatctgcgagaacgacaacctgcccaagcccgtgctggacatgctgttcttcctgaaccagaagggccccctgaccaagggcatcttcagacagagcgccaacgtgaagagctgcagagagctgaaggagaagctgaacagcggcgtggaggtgcacctggactgcgagagcatcttcgtgatcgccagcgtgctgaaggacttcctgagaaacatccccggcagcatcttcagcagcgacctgtacgaccactgggtgagcgtgatggaccagggcaacgacgaggagaagatcaacaccgtgcagagactgctggaccagctgcccagagccaacgtggtgctgctgagatacctgttcggcgtgctgcacaacatcgagcagcacagcagcagcaaccagatgaccgccttcaacctggccgtgtgcgtggcccccagcatcctgtggccccccgccagcagcagccccgagctggagaacgagttcaccaagaaggtgagcctgctgatccagttcctgatcgagaactgcctgagaatcttcggcgaggagatcaccagcctgttcagagaggtgagcgtgagatgcgacaccagagagaacgccagcgacatcagctgcttccagctgaacgacagcagctacgacagcctggagaacgagctgaacgaggacgtggacgccccctgcagcgacctggtgaagaagctgggccagggcagcagaagcatggacagcgtgctgaccctgagcgactacgacctggaccagcccgaggtggagggcctgctgaccctgagcgacttcgacctggcccacagcaaggacgaggacgtgcagatgaagagacccctggagagcaagcccgtgaacatcctggtgtacaccaagatccccctgagagaccacgccagagcccccagcgccatgtgcacccccagctacctgagcaccgccgccgccaacgccgccaagagcctgagaagacacagaagatgcagcgagcccagcatcgactacctggacagcaagctgagctacctgagagagttctaccagaagaagctgagaaagagcagctgcgacgccatcctgagccagaaggacgaggactacctgaagcagaaccagcccctgcaggaggagggcaagacctgcttcaagcagagcctggtgaccggcaccgacgtgagcaagaagaacgccaccacccagaacaccaagaagaagagcctgagcggcagcgagggcaaccacgtgaagctgttccccaagagcaagcccgtggccatcagcgtggccagctacagccccatgagcagccaggaccacagcaagaaccagcccttcgacgtgaacaccagcggctacagccccccccacaccgccgacgccctgaagggccccagaacccacagaagatgcagcgagcccaacatcgaggaccagaacagaaagctgacctacctgagaggcatctacagcaagaagcagcacaagaccagctgcgaggccggcctgctgcacggcgaggaggactacctgaagagacacaagagcctgcagatggagggccagaagctgatcaaccagagcctggtgatgggcatcgaggtgggcaagagcagcgccaccaaccagaacaccgagaaggtgctgccccccagactgaacctgtgccccagaaccagctacagcagcctgagcagccccggcaccagccccagcggcagcagcgtgagcagccaggacagcgccttcagccagatcagcgagcacagcgtgttcacccccaccgagaccagcagccccatcgactgcaccttccaggcccagagaaagagagaggacctgagccccgacttcagcaacgccagccacgtgagcggcatgcccggccccagcagcggccaggcctgcagcagacccgcctacaccaagaaggacaccatggagtggcacagccagatgcacagcgtgaccctgcaccccagcacctggctgagaaacggcgtggccagcctgaagaactggagcctgaagaagaaggccaaggccgccagacccgaggaggagaagatcgccagccccaagggccccctggagccccccccccacgccagcggcgtgcccgaggccaacagcctgcaggaggagcagaaggacctgcccctgagagccgccgagggcctgagccccgtgcagagcgcccagagatgcagcagcagccccttccaggacagcgagagacactgcagcagccccttcagcctggtggagagcagactgaagctgtgcatgaagagccacgaggagatcgagcccggcagccagagcagcagcggcagcctgccctgggagagagccagcgccagcagctggaccctggaggacgccaccagccccgacagcggccccaccgtggtgtgcgacatcgaggacagatacctgaccaaggacatctag

SEQ ID NO: 292123 - DNA, 3576 bp, Artificial Sequence
  derived and/or modified sequence
atggaagcgatgtccccacagcaggaaactttggggggacagcctggtcgctccagctctctcacaggggtctctaggcttgccggtggctcctgcaccaagaagaagatgaaaaccctcgcagagcgtaggcggtccgctccaagcctgatactggacaaggccttgcagaaacgacccacaactagagactctccatcagcaagtgtggatacctgtacttttctgtcctccctggtatgctccaatcgcacattactgattgatggacgagcagaactgaagagaggcctgcagcgccaggaacgccatttgtttctcttcaatgacttgtttgtggtagcaaagattaagtacaataacaacttcaaaattaaaaataaaattaagctgacggacatgtggacggctagctgcgtcgacgaagtcggggagggaaataccaacgctatgaaatcctttgtgctgggatggcctacagtcaatttcgtggccactttttcatctccagaacagaaagataagtggctgtctctgcttcagaggtatataaatctcgagaaagagaaggactaccctaaatccattccactgaagattttcgcaaaggacatcggcaattgcgcttatagtaaaacaataacggtgatgaatagtgacaccgctaacgaagtgattaacatgagtctccccatgctcggaattactggaagtgaacgagactaccagctgtgggtgaacagtggcaaagaagaagccccttatcccctaattggccacgagtacccttacgggatcaaaatgtcccatctacgggactcagctctccttacccccgggagtaaggattctactacgcctttcaacctgcaggaacccttcctgatggagcagctcccgagggagatgcagtgtcagttcatactgaagccctctaggctggctgcggctcagcaactctccgatagcgggcacaaaaccttcaaaaggcgacgtagtattataaactgggccttctggaggggctcatcaacgcatctcgacaacctgccttctagtcccactagtccaatgccaggacagctcttcggaatatccctgcccaatatctgcgaaaatgacaatctgccgaagccggttctggatatgctgttcttcctgaaccagaagggccccctgaccaaaggcatctttaggcagtcggctaacgtcaagagctgccgggagctgaaggaaaaactgaattctggagttgaggttcaccttgactgtgaatctatcttcgtcattgccagtgttcttaaagattttctgcgcaacattccggggtccatatttagctccgacttgtacgaccactgggtcagcgtgatggatcagggcaacgacgaagaaaaaatcaataccgtgcaaagacttctggatcagttacctcgtgccaatgttgttttactgagatacctcttcggggttcttcataacatcgagcagcacagcagttcaaatcagatgaccgccttcaatctcgccgtttgcgtggctccctctattctgtggcctccagcctcctccagtcctgagctggaaaatgagtttactaaaaaggtaagtctcctcatccagtttttaatcgaaaattgtctgcggattttcggagaagaaataaccagcctgttcagagaggtgtccgttagatgtgatacgagggaaaatgcaagtgacatctcttgcttccaactgaatgatagctcctatgactcactggagaacgaactgaacgaagacgtcgacgcaccctgttcagatcttgttaaaaagttggggcaagggagccggtcgatggactctgtgttaacactcagtgattatgatctggaccagccagaggtggagggcctgcttaccctttcagactttgaccttgcccactctaaggacgaggatgttcaaatgaaaagaccactagaatctaagcccgtgaatatcttagtttacactaaaattcctttaagagatcacgcccgtgccccatccgccatgtgcacaccctcgtacctgtccacagcagcagccaacgcagcgaaaagtctccgtaggcataggcgctgtagcgaaccgtctatagactacctggattccaagctcagttatctgcgggaattctatcaaaagaagttgcggaagtcatcctgcgacgctatactgtcccagaaagatgaagactacctgaagcagaaccagcccctgcaggaggaaggaaagacatgctttaagcagtccttggtgacggggaccgatgtatctaagaagaacgctaccactcagaacaccaaaaagaagagcctgtccggctccgagggaaatcacgtcaagctttttcccaagagcaagccagtagctatttccgtggctagctattcacccatgtctagtcaggatcacagtaaaaaccagccttttgatgtcaacacatcgggatattccccaccgcacacagccgacgctcttaagggacctcgaactcatagaagatgttctgaacctaatattgaggaccagaacaggaagctgacatacctgagaggtatctattccaaaaagcaacacaagacgtcatgcgaagcagggctgttgcacggcgaggaggattatctgaaaaggcataagtctcttcagatggagggccagaagctgataaatcagtccctggtgatgggcattgaggttggcaagagttcggctaccaaccagaatactgagaaagttctccctcctagactgaacctctgccctaggaccagctatagctcactgagctcgcctgggacatctccatctggttctagcgtgtcttcacaggatagcgcatttagccagataagcgaacactcagtttttacacctacagagacctcatcgccgatcgactgtaccttccaggcacagcggaagagggaagatctgagccctgacttttctaacgcctcgcacgtgagcggcatgcccgggccaagtagcggccaggcctgcagccgcccagcttataccaaaaaggatacaatggagtggcattcccagatgcattccgttacgcttcacccttcaacatggctcaggaacggcgtggcttcccttaaaaattggagcctaaaaaagaaggccaaagcagcccgccctgaggaagagaagatagcctctccaaagggacccctggagccgcctcctcacgcttccggcgtgcctgaggcgaatagcctgcaggaggagcagaaagatttgcccctgagagccgccgaggggctgagtccagttcaatccgcccagcgctgttcctcaagtccattccaggactccgagcgccattgttcttccccgttctccctggttgaaagtagactcaagctctgcatgaaatcccacgaggaaattgagccagggagtcagtcttccagtggctccctgccatgggaacgggcctccgcttcctcatggaccctggaagacgcaacctctcctgactcaggtccaaccgtggtatgcgatatcgaggacagatacttgactaaggacatttag

SEQ ID NO: 292124 - DNA, 3468 bp, Artificial Sequence
  derived and/or modified sequence
atgaagacactagctgaaagaaggaggtctgctccgagcctcatcctcgataaagcactccaaaaacggcccacaactagagattctccaagcgcctcagtcgatacttgtaccttcctctcatcactggtgtgcagcaatcgcacccttctgattgatggccgtgctgagcttaaaaggggcctgcagagacaggaacgacatctcttcctcttcaacgacctgttcgttgtggccaagatcaaatacaacaataactttaagatcaaaaacaaaatcaaactgaccgacatgtggactgccagctgtgtggatgaggtgggagaaggaaacacaaatgcaatgaaaagctttgtacttggctggcctacagtgaatttcgttgcaacctttagtagtcccgagcaaaaagataagtggctaagcttgctgcaacgatacatcaatttagagaaagaaaaagactatcccaagagtatacccctcaaaatcttcgcaaaagatataggaaattgtgcatatagcaagactataacagtgatgaacagtgatactgcaaatgaggttattaacatgtcattgcctatgctgggcatcactgggtccgagcgcgactaccagttatgggtgaactcgggtaaggaagaggccccctaccctctgattgggcatgagtatccatacggaattaagatgtcacatcttcgcgacagtgccctgcttaccccaggttcaaaagattccactacccccttcaatcttcaggagccttttttaatggaacagctgcctagggaaatgcaatgccagttcatcctcaaaccctccaggctggcggcagcccagcagctttccgattctgggcacaagactttcaagcggcggagatcaatcatcaattgggctttttggaggggaagcagcacacacctggacaacttgccaagttccccaacttcacctatgccaggccagttgttcggaatttctctgcctaacatctgcgaaaacgacaatctgcctaagcccgtgttggatatgttattttttttaaaccagaagggtcccctaactaagggaatattcaggcagagcgccaatgttaagtcatgtagggagctaaaggaaaaattgaattctggggtcgaagtacacctcgactgcgaatccatctttgtgattgcttcagtgctgaaggatttcctgcgaaatatccctggaagcattttctcctcagacttatatgatcattgggtgtcggtgatggaccagggaaatgatgaagagaagatcaatacagtgcagaggctgttagatcaactgcctagagctaacgttgttctgctcagatatctgttcggtgtactacacaacatcgagcagcactcatcctccaaccagatgaccgccttcaacctggcggtatgcgtggccccatctattctctggccccccgctagtagctcacctgaactggaaaatgaattcaccaagaaagtgagtctccttatccaatttctcatagagaactgtctccgaatattcggcgaggagattaccagcctgtttagggaggtctcagtgaggtgtgacacacgagagaacgcctctgacatcagctgttttcagcttaacgactcttcttatgactcattggagaatgagcttaatgaagatgtggacgctccttgcagtgacctcgttaaaaagctgggccagggctccaggtcaatggattctgtactgacactctcagattatgatctggaccagccagaggttgaaggcctattaaccctgagcgacttcgatcttgcccactctaaggatgaggacgtacagatgaagcgccccctcgaatcaaaacccgttaacattttggtttatacgaagatccctctgcgggaccacgcccgagctccatcagctatgtgtaccccctcatacctgtccacagctgctgccaacgccgccaagtctttgcggcgccaccgacgttgcagtgagcctagtattgactacctggacagtaagttgtcttacctgcgcgaattctaccaaaaaaaactgcgcaagtcttcatgcgacgctattctctcgcagaaagatgaagattatctgaagcagaaccaaccactgcaggaagagggaaaaacatgttttaaacaaagtctggttactggcacggacgtcagtaagaaaaacgccactacccagaacaccaaaaagaagtctcttagcgggagtgaaggaaaccacgtaaagttattcccgaaaagtaaacccgtagctattagcgtagcatcttactcccccatgtcttcgcaagatcacagtaaaaaccagccttttgacgtcaacacatccggatattcccctcctcatactgcggatgctttgaaaggcccccgcactcaccgccgttgctctgaacctaacattgaggatcagaaccgaaagctgacgtatttacggggaatctatagtaagaaacagcataaaacaagttgtgaggccggactgctccacggcgaggaggattaccttaagagacacaagtccctgcagatggaggggcagaagctcatcaaccagtccttggttatgggcattgaagtcggtaaatcctcagctacaaaccaaaatacagaaaaggtcctgccgccacgtctgaacttatgcccgcgcacatcctatagctcactatcttcccctgggacgtctccgtccggtagttccgtgtcctcccaggatagcgcattctctcaaatttctgagcactcagtcttcacaccaacagaaactagctccccaatagactgcacatttcaggcccagagaaagcgggaagatctgtcccctgacttttcaaacgctagtcacgtgtccgggatgcctgggccatcgtcaggacaagcatgctcaagaccggcgtacaccaaaaaggacacaatggagtggcactcacagatgcattctgtgaccttgcaccctagtacatggctgagaaacggcgtggcgtcactcaagaattggagtctcaagaaaaaggcaaaagcagcccggccagaagaagaaaagattgccagtccaaaaggccccctagagccccctccccatgcatctggcgtgcccgaggctaacagccttcaggaagaacagaaagacctcccattgcgggctgcagaggggctgtcacccgtgcagagcgctcagcgttgcagttcatctccattccaggactctgagcggcactgctcaagcccattctctctggtggaatctagactcaagttatgcatgaagagtcatgaagaaatcgaacctggaagccaaagcagttctggaagcttaccttgggaacgggcttctgcctcatcctggactttggaggatgcaacgagcccagattcaggtcccacagtggtctgcgatatcgaggaccgctatttgaccaaagatatatag

SEQ ID NO: 292125 - DNA, 3468 bp, Artificial Sequence
  derived and/or modified sequence
atgaaaaccctggccgagcgtcgcaggtctgctcccagtctgatactggataaggccctgcagaaaagaccaaccacaagagactctccttccgcctcagtagacacgtgtaccttcctgtcttcgctggtttgttcaaatagaactctgcttatagatgggcgggccgagctcaagcggggtttgcaaaggcaggagagacacctgttcttgttcaatgacttgtttgttgtcgctaagattaaatataacaacaattttaaaatcaagaacaagatcaaacttactgatatgtggactgccagctgtgtcgacgaagttggggagggtaatacaaatgcaatgaagtcatttgtcctgggatggcctaccgtgaatttcgtggccactttttcgagcccagagcagaaggacaaatggctgagcttgctgcagaggtacatcaacttggaaaaagaaaaggattatcctaaaagcattccccttaaaatcttcgccaaagatattggaaactgcgcatacagcaaaactattaccgtgatgaatagtgataccgccaatgaagtgattaatatgagcctgcccatgctcggcatcactggttctgaacgggattaccaactttgggtcaatagtggtaaagaggaagctccttacccactcattgggcacgagtacccctatgggatcaaaatgtcccatctgagggattcagccttacttacacccgggtctaaggacagcaccacgccatttaatctgcaggaaccctttcttatggaacagctgccccgggagatgcagtgccagtttattttgaaaccctcaaggctcgccgccgcccagcagctgagtgacagcggccataaaacattcaagcgaaggagaagtattatcaactgggctttctggcggggcagctccacccacctggataatcttccttcttcccccacttcccccatgcccggccagctatttggcatcagtctgcccaacatctgcgagaacgacaacttaccaaagccagtgctggatatgctcttttttcttaaccagaaggggcccctgaccaagggcattttccgccagtctgccaatgtgaaaagctgcagggagctcaaagaaaaacttaactccggggttgaggtccacttagattgcgagtctatcttcgtgattgcctctgttctgaaagactttcttagaaatataccagggtcaatcttttcaagcgacttgtatgatcactgggtttccgttatggaccagggcaacgacgaggagaaaatcaacacggtgcaacgcctgttggaccaactgccaagagcgaatgtggtccttcttcggtatctgttcggtgtgctgcacaatatagagcagcattcctcttcgaatcaaatgacggcgttcaatctcgcagtgtgcgttgccccatcgatcctgtggcccccagcttcatccagccctgagctcgaaaacgagttcaccaaaaaggtgagtctgcttatacagttcctcatcgaaaactgcctccgtatcttcggtgaggaaatcacctcactcttccgtgaagtctccgtacgctgcgacacccgtgaaaatgctagcgatattagctgcttccagctcaatgactctagttatgattccctggaaaacgagctgaatgaggacgtggatgctccttgctccgacctcgtcaagaagctggggcaggggagcagatccatggacagcgtcctgaccctgagcgactacgatctcgatcagcctgaagtagagggtttgcttacgctttccgatttcgacttggcacactctaaggatgaagacgtgcagatgaaaaggccactggagtcgaaacctgtgaacattctcgtctacactaaaatccctctaagagatcatgctagagcgccgagcgctatgtgcaccccatcttatctcagtaccgccgcagctaatgccgccaagtctttgcgtagacataggcgctgcagcgagccctccatcgactatttagatagtaagctctcctacctacgcgagttctaccaaaagaagttgcgcaagtcaagttgtgacgcaatcctttcacagaaggacgaagactatttgaaacagaatcagcctctgcaggaagaaggcaaaacttgttttaaacaaagtctggtcaccggcaccgacgttagcaagaagaacgcgacgacccagaataccaagaagaagtcactgagcgggtccgaaggtaaccacgtgaagctgttccctaagagcaaacctgtcgctatctcagttgctagctattctcccatgtcaagtcaagatcactccaagaatcagccctttgacgtcaatacctccggatactcaccaccgcacacagcggacgctctgaagggcccccggacgcacagacgttgctctgagcccaacatcgaggaccaaaacaggaagctgacatatctgcgcggcatctacagcaagaaacagcacaagacctcctgtgaggccggcttgctgcacggagaagaagactatctgaagcgccacaaatccttacagatggagggtcaaaagctaattaaccagagcctggtaatggggatcgaggtggggaagtccagtgccactaaccaaaacactgagaaggtgctccccccacgtctgaacctgtgtcctcggacttcctatagcagccttagctcacccggtacttctccctccgggagtagcgtgtctagtcaggatagtgcgttctctcagataagcgagcatagtgtgtttacaccaactgaaacatcctctcctatagattgcacattccaggcacagcgcaagcgcgaagatctgtcacccgacttcagcaatgcctcacacgttagtggcatgcccggcccaagtagcggccaggcttgctctcggcccgcctataccaagaaggacaccatggagtggcacagtcagatgcattctgtcacgctgcatccatccacgtggttgcgtaacggcgtggccagcctcaaaaactggagtctgaagaaaaaggccaaagctgcacgcccagaggaggaaaagatagcctctcccaaaggacctctggaaccacctccacacgcatcaggggtgccggaggccaactcactgcaagaagagcaaaaggatctgccacttcgtgctgccgagggtttgtctccagtgcagtccgctcagcgctgttcgtcatctccatttcaagactctgagcgccactgttcctccccttttagcctcgtggaaagtcggcttaagttgtgtatgaaaagtcacgaggaaatagagcccggaagccagtccagctctggctcccttccttgggagagagcctccgccagcagctggactctcgaggatgcgacctccccagatagtggccctaccgtcgtgtgtgacatagaggaccgctatctgactaaggatatctag

SEQ ID NO: 292126 - DNA, 3576 bp, Artificial Sequence
  derived and/or modified sequence
atggaggccatgagcccccagcaggagaccctgggcggccagcccggccgcagcagcagcctgactggagtgtcccggctggccggcggcagctgcaccaagaagaagatgaagaccctggccgagcggcggcgcagcgcccccagcctcatcctggacaaggccctgcagaagaggcccaccacccgggacagccccagcgcctctgtggacacctgcaccttcctgagcagcctggtgtgcagcaacagaaccctgctgattgatggccgggcagagctgaagaggggcctgcagaggcaggagcggcacctgttcctgttcaatgacctgtttgtggtggccaagatcaagtacaacaacaacttcaagatcaagaacaagatcaagctgacagacatgtggacagccagctgtgtggatgaggtgggggagggcaacaccaatgccatgaagagctttgtgctgggctggcccaccgtgaactttgtggccaccttcagcagccctgagcagaaggacaagtggctgagcctgctgcagcgctacatcaacctggagaaggagaaggactaccccaagagcatccccctgaagatctttgccaaggacatcggcaactgtgcctacagcaagaccatcaccgtgatgaacagcgacacagccaatgaagtcatcaacatgagcctgcccatgctgggcatcaccggcagcgagcgggactaccagctgtgggtgaacagcggcaaggaggaggccccctaccccctcatcggccacgagtacccctacggcatcaagatgagccacctgcgggacagcgccctgctgaccccaggcagcaaggacagcaccacccccttcaacctgcaggagcccttcctgatggagcagctgccccgggagatgcagtgccagttcatcctgaagcccagccggctggccgccgcccagcagctgagtgacagcggccacaagaccttcaagagaagaagaagcatcatcaactgggccttctggaggggcagcagcacccacctggacaacctgcccagcagccccaccagccccatgcctggccagctgtttggcatcagcctgcccaacatctgtgaaaatgacaacctgcccaagcctgtgctggacatgctgttcttcctgaaccagaagggccccctgaccaagggcatcttccggcagagcgccaacgtgaagagctgccgggagctgaaggagaagctgaacagcggcgtggaggtgcacctggactgtgagagcatcttcgtcatcgcctctgtgctgaaggacttcctgaggaacatccctggcagcatcttcagcagtgacctgtatgaccactgggtgtctgtgatggaccagggcaatgatgaggagaagatcaacacagtgcagaggctgctggaccagctgccccgggccaacgtggtgctgctgcgctacctgtttggagtgctgcacaacatcgagcagcacagcagcagcaaccagatgacagccttcaacctggccgtgtgtgtggcccccagcatcctgtggcccccagccagcagcagccctgagctggagaatgagttcaccaagaaggtgtccctgctgatccagttcctgattgagaactgcctgcgcatctttggagaggagatcaccagcctcttccgggaggtgtctgtgcgctgtgacacccgggagaatgccagtgacatcagctgcttccagctgaatgacagcagctatgacagcctggagaatgagctgaatgaagatgtggatgccccctgcagcgacctggtgaagaagctgggccagggcagccgctccatggacagcgtgctgaccctgagtgactatgacctggaccagcctgaggtggagggcctgctgaccctgagtgactttgacctggcccacagcaaggatgaagatgtgcagatgaagaggcccctggagagcaagcctgtgaacatcctggtgtacaccaagatccccctgcgggaccacgcccgggcccccagcgccatgtgcacccccagctacctgagcacagctgctgccaatgctgccaagagcctgcggcggcaccggcgctgcagcgagcccagcattgactacctggacagcaagctgagctacctgcgggagttctaccagaagaagctgaggaagagcagctgtgatgccatcctgagccagaaggatgaggactacctgaagcagaaccagcccctgcaggaggagggcaagacctgcttcaagcagagcctggtgactggaacagatgtgtccaagaagaatgccaccacccagaacaccaagaagaagagcctgagcggcagcgagggcaaccacgtgaagctgttccccaagagcaagcctgtggccatctctgtggccagctacagccccatgagcagccaggaccacagcaagaaccagccctttgatgtgaacaccagcggctacagccccccccacacagcagatgccctgaagggccccaggacccaccggcgctgcagcgagcccaacatcgaggaccagaacaggaagctgacctacctgcggggcatctacagcaagaagcagcacaagaccagctgtgaggccggcctgctgcatggagaggaggactacctgaagaggcacaagagcctgcagatggagggccagaagctgatcaaccagagcctggtgatgggcatcgaggtgggcaagagcagcgccaccaaccagaacacagagaaggtgctgcccccccggctgaacctgtgccccaggaccagctacagcagcctgagcagccctggcaccagccccagcggcagctctgtgagcagccaggacagcgccttcagccagatcagcgagcacagcgtcttcacccccacagagaccagcagccccatcgactgcaccttccaggcccagaggaagcgggaggacctgagcccagacttcagcaatgccagccacgtgtctggcatgcctggccccagcagcggccaggcctgcagcaggcctgcctacaccaagaaggacaccatggagtggcacagccagatgcacagcgtgaccctgcaccccagcacctggctgagaaatggagtggccagcctgaagaactggagcctgaagaagaaggccaaggccgcccggcctgaggaggagaagatcgccagccccaagggccccctggagcccccaccccacgccagcggcgtgcctgaggccaacagcctgcaggaggagcagaaggacctgcccctgcgggctgctgagggcctgagccctgtgcagagcgcccagcgctgcagcagcagccccttccaggacagcgagcggcactgcagcagccccttcagcctggtggagagccggctgaagctgtgcatgaagagccatgaggagattgagcccggcagccagagcagcagcggcagcctgccctgggagcgggccagcgccagctcctggaccctggaggatgccaccagcccagacagcggccccaccgtggtgtgtgacattgaagatcgctacctgaccaaggacatctag

SEQ ID NO: 292127 - DNA, 3468 bp, Artificial Sequence
  derived and/or modified sequence
atgaagaccctggccgagcggcggcgcagcgcccccagcctcatcctggacaaggccctgcagaagaggcccaccacccgggacagccccagcgcctctgtggacacctgcaccttcctgagcagcctggtgtgcagcaacagaaccctgctgattgatggccgggcagagctgaagaggggcctgcagaggcaggagcggcacctgttcctgttcaatgacctgtttgtggtggccaagatcaagtacaacaacaacttcaagatcaagaacaagatcaagctgacagacatgtggacagccagctgtgtggatgaggtgggggagggcaacaccaatgccatgaagagctttgtgctgggctggcccaccgtgaactttgtggccaccttcagcagccctgagcagaaggacaagtggctgagcctgctgcagcgctacatcaacctggagaaggagaaggactaccccaagagcatccccctgaagatctttgccaaggacatcggcaactgtgcctacagcaagaccatcaccgtgatgaacagcgacacagccaatgaagtcatcaacatgagcctgcccatgctgggcatcaccggcagcgagcgggactaccagctgtgggtgaacagcggcaaggaggaggccccctaccccctcatcggccacgagtacccctacggcatcaagatgagccacctgcgggacagcgccctgctgaccccaggcagcaaggacagcaccacccccttcaacctgcaggagcccttcctgatggagcagctgccccgggagatgcagtgccagttcatcctgaagcccagccggctggccgccgcccagcagctgagtgacagcggccacaagaccttcaagagaagaagaagcatcatcaactgggccttctggaggggcagcagcacccacctggacaacctgcccagcagccccaccagccccatgcctggccagctgtttggcatcagcctgcccaacatctgtgaaaatgacaacctgcccaagcctgtgctggacatgctgttcttcctgaaccagaagggccccctgaccaagggcatcttccggcagagcgccaacgtgaagagctgccgggagctgaaggagaagctgaacagcggcgtggaggtgcacctggactgtgagagcatcttcgtcatcgcctctgtgctgaaggacttcctgaggaacatccctggcagcatcttcagcagtgacctgtatgaccactgggtgtctgtgatggaccagggcaatgatgaggagaagatcaacacagtgcagaggctgctggaccagctgccccgggccaacgtggtgctgctgcgctacctgtttggagtgctgcacaacatcgagcagcacagcagcagcaaccagatgacagccttcaacctggccgtgtgtgtggcccccagcatcctgtggcccccagccagcagcagccctgagctggagaatgagttcaccaagaaggtgtccctgctgatccagttcctgattgagaactgcctgcgcatctttggagaggagatcaccagcctcttccgggaggtgtctgtgcgctgtgacacccgggagaatgccagtgacatcagctgcttccagctgaatgacagcagctatgacagcctggagaatgagctgaatgaagatgtggatgccccctgcagcgacctggtgaagaagctgggccagggcagccgctccatggacagcgtgctgaccctgagtgactatgacctggaccagcctgaggtggagggcctgctgaccctgagtgactttgacctggcccacagcaaggatgaagatgtgcagatgaagaggcccctggagagcaagcctgtgaacatcctggtgtacaccaagatccccctgcgggaccacgcccgggcccccagcgccatgtgcacccccagctacctgagcacagctgctgccaatgctgccaagagcctgcggcggcaccggcgctgcagcgagcccagcattgactacctggacagcaagctgagctacctgcgggagttctaccagaagaagctgaggaagagcagctgtgatgccatcctgagccagaaggatgaggactacctgaagcagaaccagcccctgcaggaggagggcaagacctgcttcaagcagagcctggtgactggaacagatgtgtccaagaagaatgccaccacccagaacaccaagaagaagagcctgagcggcagcgagggcaaccacgtgaagctgttccccaagagcaagcctgtggccatctctgtggccagctacagccccatgagcagccaggaccacagcaagaaccagccctttgatgtgaacaccagcggctacagccccccccacacagcagatgccctgaagggccccaggacccaccggcgctgcagcgagcccaacatcgaggaccagaacaggaagctgacctacctgcggggcatctacagcaagaagcagcacaagaccagctgtgaggccggcctgctgcatggagaggaggactacctgaagaggcacaagagcctgcagatggagggccagaagctgatcaaccagagcctggtgatgggcatcgaggtgggcaagagcagcgccaccaaccagaacacagagaaggtgctgcccccccggctgaacctgtgccccaggaccagctacagcagcctgagcagccctggcaccagccccagcggcagctctgtgagcagccaggacagcgccttcagccagatcagcgagcacagcgtcttcacccccacagagaccagcagccccatcgactgcaccttccaggcccagaggaagcgggaggacctgagcccagacttcagcaatgccagccacgtgtctggcatgcctggccccagcagcggccaggcctgcagcaggcctgcctacaccaagaaggacaccatggagtggcacagccagatgcacagcgtgaccctgcaccccagcacctggctgagaaatggagtggccagcctgaagaactggagcctgaagaagaaggccaaggccgcccggcctgaggaggagaagatcgccagccccaagggccccctggagcccccaccccacgccagcggcgtgcctgaggccaacagcctgcaggaggagcagaaggacctgcccctgcgggctgctgagggcctgagccctgtgcagagcgcccagcgctgcagcagcagccccttccaggacagcgagcggcactgcagcagccccttcagcctggtggagagccggctgaagctgtgcatgaagagccatgaggagattgagcccggcagccagagcagcagcggcagcctgccctgggagcgggccagcgccagctcctggaccctggaggatgccaccagcccagacagcggccccaccgtggtgtgtgacattgaagatcgctacctgaccaaggacatctag

SEQ ID NO: 292128 - DNA, 3576 bp, Artificial Sequence
  derived and/or modified sequence
atggaggccatgagcccccagcaggagaccctgggcggccagcccgggaggagcagctcactcacaggggtttcgcggctggcagggggctcttgcactaagaaaaaaatgaagacattggcagagcgcaggcgcagcgccccctcactgattctggataaagcgcttcagaagagaccaactacaagagatagcccgtctgcatccgttgacacatgtacatttctgtcatctcttgtttgttctaacaggacccttttgatcgacggccgtgccgaactcaaacggggactgcagcgccaggagaggcatctgttcttattcaacgatctgtttgtcgtcgccaagattaaatacaacaataactttaaaatcaagaataaaatcaagctcaccgacatgtggacagcttcctgcgtggatgaggtaggcgagggcaacacaaatgccatgaagtcctttgtcctggggtggcccactgtaaacttcgtcgccacgttctcgagtcctgaacaaaaggataaatggctctctctcctgcagagatatattaatctggagaaggaaaaggactacccaaagtcaatccctctgaagattttcgctaaggacatcgggaattgcgcttattcaaagacaattactgtaatgaactctgatacagctaacgaagtaatcaacatgagtcttccaatgctcggaattactggctccgagcgggactatcaactctgggtaaactcaggcaaagaggaagctccataccccctgattgggcatgaatacccttacgggatcaagatgagccacctgcgggattccgctctgctgacacccggcagcaaagactccacaactccttttaacctgcaagaaccctttctcatggaacagctgccaagagaaatgcagtgccagtttattttgaaaccgagtcgcctcgccgctgcgcagcagctgagcgacagcggccacaaaaccttcaagcgaaggaggtcaattattaattgggcattttggcgcggaagcagcactcatctggacaacctacccagctccccaacctctcccatgcctggccagttgttcgggatttcactcccaaacatttgtgagaacgacaatctgcctaaacctgttctcgacatgctcttcttcctaaaccagaaagggccactgacgaagggaatctttcgtcaaagcgccaatgtgaaatcatgcagggagctgaaggaaaaactaaattcaggagtggaggtgcacctagactgcgagagcatttttgtcattgcatctgttctgaaggactttttgcgtaacattcctggatccattttcagcagcgacctctacgatcactgggtctctgtgatggaccaaggcaacgacgaggagaaaattaacaccgtgcagaggcttctggatcaacttccccgggcaaacgtggtgctgttaagatacctctttggagtgctgcataatatcgagcaacactcatcatcaaaccagatgaccgctttcaacttggccgtgtgtgtcgccccttccattctgtggccacctgccagtagtagcccagagcttgagaatgaatttaccaagaaagtctctctccttatccagtttctcatcgagaactgtctcaggattttcggggaggaaattacatctttgtttcgggaagttagtgtgcggtgcgacaccagggaaaatgcgtcagatatcagctgcttccagttgaacgatagctcgtatgactccctggagaacgaactgaatgaagatgtcgatgccccgtgtagcgacctcgtgaagaagctgggccagggcagtcgctcaatggattccgttctgactctttccgactatgacctggaccaacctgaggtagaaggcctcctgaccttgtctgatttcgatctggcccacagtaaagatgaagacgtgcaaatgaagagacccctagagagcaagcctgtaaacatcttggtgtatacaaagattcctctgcgggatcacgccagagcgcccagcgccatgtgtacgccctcttatctcagtacagctgcagccaatgccgccaaaagtctccgacggcacagacggtgcagtgagccttctatagactaccttgactccaagctgtcatatcttagggaattttaccagaaaaagctgagaaaaagctcgtgtgatgcaattttgtcccagaaagacgaggactacctgaagcaaaaccagcctctacaagaggaaggcaaaacctgtttcaagcagagcctcgtgacgggaacagacgtgtccaagaagaacgccacgactcagaacactaaaaaaaagtcattgtcagggagtgagggcaatcacgtgaaattattccccaaatctaaaccggtcgccatctctgtggccagttatagccccatgtcgtcacaggaccattctaaaaaccagccatttgatgtgaacacatcaggctactctcctcctcataccgcagacgcccttaaaggcccacgtactcatcgtcgatgctctgagcccaacatcgaggatcaaaacaggaagctcacctacttgagaggaatttactcgaaaaagcagcacaaaactagttgcgaggctggcctcctccatggggaggaggactaccttaaacgacataaatcccttcaaatggaaggtcagaaactgatcaaccagagcctcgttatgggtatcgaagtgggcaaaagtagtgccaccaaccaaaataccgagaaagtactgccccccagactgaacctgtgtcctcgaacaagctacagttcactgtcttctccgggaacctcgccctcgggctcatccgtgtctagccaagatagcgccttttcccaaatctccgagcacagtgtttttacacccactgaaacaagctctccaatcgactgcaccttccaggcgcaacgcaagcgcgaggatctgtcgcccgatttttctaacgcctcacacgtcagtggaatgcctggtccaagcagcgggcaggcctgttccagacctgcctacaccaagaaggacacaatggagtggcacagccaaatgcacagcgtgaccttgcacccctctacttggctccgtaacggagtggcctctttaaaaaattggtctctcaagaagaaagccaaggcggctagacctgaagaggaaaagatagcatcaccaaagggacccctggaacctcccccacatgcgagtggcgtgccagaggctaactcactccaggaggaacagaaggatctgccattgcgtgctgctgaggggttatccccggttcagagcgcgcagaggtgctcgtcatctccattccaggattccgagagacattgttcaagccccttctcccttgtggagagccgtctgaagctgtgtatgaagtcccatgaggagattgagccaggatcccagtcgagctctgggagtttaccttgggagagggcaagcgcttcgtcctggaccctggaggatgcgactagccccgattccgggccaactgtcgtatgtgatatcgaagacagatatcttacgaaagatatctag

SEQ ID NO: 292129 - DNA, 3468 bp, Artificial Sequence
  derived and/or modified sequence
atgaagaccctggccgagcggcggcggagcgcccccagcctgatcctggacaaagccctgcagaaacgtcccacgacaagagacagcccttccgcatctgttgacacctgtacgtttctgagtagcctcgtttgtagcaataggaccctccttatagacgggagagccgagctgaaacggggcctgcagaggcaggaaagacacctgtttttgttcaatgacctgttcgtggtagcgaagattaagtataataataacttcaagattaagaacaagattaaattgacagacatgtggactgccagctgtgtagacgaagttggcgagggaaatacaaacgccatgaaatccttcgttctcggttggccaacggtgaattttgtggccaccttcagctcgcccgaacagaaggacaaatggctgtctttgctgcagcgctacatcaatctggagaaagaaaaagattaccccaaaagtatccctctgaagatctttgccaaagacattgggaactgtgcctacagcaaaaccattacagtgatgaacagtgacacagccaatgaggtcataaacatgagtctgccaatgcttgggattacaggctcagaacgcgactaccagctgtgggtgaacagtggtaaggaggaggccccatacccactgatcggccacgaatatccctacggtatcaagatgagccatctccgtgattccgccctacttacaccggggtctaaagattctacgacaccttttaacctgcaagaaccctttctgatggagcaactgcctcgcgaaatgcagtgccagtttatccttaaaccgagtcgcctcgccgcagcccagcagctttccgatagtgggcacaagacttttaagcgtcgccggtcaattatcaactgggccttctggagaggctcatccacacacctggacaacctgcctagcagtcctacctccccgatgcccggccagcttttcggcatttctctgcccaatatttgtgaaaatgataacctccctaaaccagtcctggacatgctgttctttttaaatcagaagggtccactgactaagggcatctttagacagtctgccaacgtgaagagctgtcgcgagctcaaggagaaactgaactctggggtggaggtgcacctcgactgcgagagcatttttgtgatcgccagtgtgctgaaagatttcttgcggaacatccccggttctatcttttctagcgatctatacgaccactgggtgagcgtgatggaccaaggcaacgatgaagagaagatcaatacagtgcaacgcctgcttgaccagttgcccagggctaacgtggtgcttctgagatacctgtttggagttctgcataatatcgagcagcactcatcctccaaccaaatgacagccttcaatctggcagtctgcgtcgctccgtccatcctgtggccaccggcatccagtagccctgagttagagaatgagttcaccaagaaggtgagtctgctgattcaattcctgattgagaattgtctgcgtattttcggcgaagagataacttcgctgttcagggaagtgtccgttcgctgcgatacccgcgaaaatgccagtgatatatcatgcttccagctgaatgactcctcatacgatagtttagaaaatgaattaaacgaggatgttgatgctccatgttccgatctagtcaagaagctggggcaaggtagcaggtcgatggattcagtgctgaccttaagtgattatgatctggatcagccagaagtggaagggttattgacactgagtgattttgaccttgcacacagcaaagatgaggacgtccagatgaaaagaccactggaatccaagcccgttaatattttggtgtacacgaagatacctctccgtgatcatgccagggcccctagtgcaatgtgcactccctcatatctgtcaacagctgcagctaacgcagcgaagagtttgcgaaggcacagaagatgtagtgagccaagcatagattaccttgattctaaattgtcatacctccgggagttttaccagaaaaagctgcgtaaatctagttgtgatgccattctgtcccaaaaggatgaagattatctgaagcaaaatcaacctctgcaagaagaaggcaagacatgttttaaacagtctctggtcactggtacagacgtgagcaagaagaatgctacaacgcagaacacaaaaaaaaaatctctctctggtagcgagggcaaccacgttaagttgttcccaaagagcaagcccgtggccatctccgtcgcatcttactcgcccatgagctcacaagatcattcaaaaaaccaaccattcgacgtaaatacctccggatatagcccaccacataccgccgatgcgttgaaaggcccacggacccaccgacgatgttccgagccaaatattgaagatcagaacaggaaattgacttaccttcggggcatatacagtaaaaaacaacacaagactagttgtgaggctggcctgctgcatggggaggaggattacctcaaacgccacaaaagtctgcaaatggaggggcagaagcttatcaaccagtcccttgttatgggaatcgaagtcggtaaaagttccgccacaaaccagaacaccgagaaagtgcttcccccccgtctgaatctctgtcccaggactagttactcttctctgtcctcccccgggacgtccccctcaggctcttcagtgtctagtcaggactcggcattcagtcaaattagcgaacactccgtgtttacccccaccgaaacaagctcaccaattgactgcacttttcaggctcagcggaagagagaggacctatccccagatttctctaacgccagtcatgtgtctggaatgcctggtcctagtagtggacaggcttgttctagacctgcctatacaaaaaaagacaccatggagtggcactcacaaatgcactccgttacccttcatccaagcacttggctgaggaacggtgtggcttcgttaaagaactggagcctgaagaagaaggcaaaggccgccaggcctgaagaagagaagatcgcttcgcccaagggcccgttggagcccccgccccacgcctctggtgttcctgaggcaaacagcttacaggaagagcaaaaggacctgccattgagggccgccgagggcttgtcccccgtgcagtcagcccagagatgtagttcctccccttttcaggactctgagagacactgttcttctccattctccctggtggaatcaaggctaaaactttgcatgaaatcacatgaggaaatcgagcccggttcgcagagctcatctgggtccctaccttgggaaagggccagcgccagctcttggaccctggaagacgctacttcacccgattccggcccaaccgtcgtatgtgatatcgaggaccgctatctgaccaaggatatctag

SEQ ID NO: 292130 - DNA, 3468 bp, Artificial Sequence
  derived and/or modified sequence
atgaagaccctggccgagcggcggcggagcgcccccagcctgatcctcgacaaggctctgcagaagcggccgacaactagagactctccgtcggcctctgtagatacttgtaccttcctgtcttctctcgtgtgtagtaacaggactttgctgattgacggccgggccgaattgaagcgcgggttgcagcggcaggagagacatttatttctgtttaacgatctgtttgttgtggccaagattaagtacaacaacaactttaagataaagaacaaaatcaaactgaccgatatgtggaccgctagctgtgtggatgaggtgggggaaggcaatactaatgccatgaagtcattcgttctcggatggcccacggtgaactttgttgcgactttctcctcacccgaacaaaaggataagtggctgtccctgttacagaggtatatcaatctggagaaggaaaaagactaccctaaatcaatacccctgaaaatttttgccaaagacatcggcaattgtgcctattcaaaaacaattacggtcatgaacagtgacactgccaatgaagtgattaatatgtctctgcccatgctgggaatcactggatctgagcgcgactaccagttatgggtcaattctgggaaagaagaagccccctatccccttattggccacgagtatccatacggaataaagatgtcacatctgcgcgatagtgcactactcactccgggatccaaagacagtaccactccattcaatctgcaggagccatttttgatggagcagctcccgcgggagatgcagtgtcagtttattcttaagccctcccggcttgcagcggcccaacagctgtcggattcaggacacaaaacattcaagagacgacgaagcatcatcaactgggccttctggcgaggaagcagcacacacctggacaacctccccagcagtcccacttcaccaatgcctgggcagctgtttggtatatcattacccaatatctgtgagaacgacaatttacccaagcccgtgctagacatgttgttcttcctcaaccagaagggcccgctcaccaaggggatttttcggcagagcgctaacgtcaagagctgcagggaacttaaggagaagctcaatagcggagtggaagtccacctcgactgtgagagtatattcgtgattgcctcagttctaaaggattttcttagaaatatacccgggagcatctttagttccgatttatacgaccactgggtctcagtgatggatcagggaaatgatgaggaaaaaatcaacactgttcaacggctgttggatcagctcccacgtgccaatgtagttttgctgcggtacctgttcggcgtgttacacaatattgagcagcatagttcttcaaaccagatgactgctttcaatttagctgtgtgcgtcgccccatccattctgtggccccccgccagcagttcgcctgagttggagaacgagtttaccaaaaaggtgagcttgctgattcagtttcttattgagaattgcctcaggatatttggggaggagatcacctcgttattccgcgaagtctccgtgcggtgtgatacaagagaaaatgcatcagatatatcctgttttcaacttaacgattccagctacgacagtcttgaaaatgaactaaacgaagacgttgacgccccttgcagtgacctggttaaaaaactgggacaggggtcccggtcaatggacagcgtgttgaccctctctgattacgacctggatcagcccgaggtggagggactgctcacactcagcgacttcgacctggcccactcgaaagacgaggacgttcagatgaagcggcctctcgaaagcaaacccgtgaacatcctggtttatactaagatccctctccgggaccacgctcgggcaccctccgcaatgtgtacaccttcttacttatctactgcagcggctaatgcagcgaagtcactacgccgccacagacgatgctcagagccctcaatcgactacctggattctaagctaagctacctgcgggagttctaccagaagaagctgcggaaatcgagctgtgacgccatattatcccaaaaggatgaggactacttaaaacaaaatcaacccctacaagaggaggggaaaacgtgctttaaacagagcctggtgactggcaccgatgtgtctaaaaagaacgcgactacacagaacaccaaaaagaaatccctctcgggatcagaggggaatcacgtgaagctatttccgaagtctaagcccgttgccatctcagtggcttcctattcaccaatgtctagtcaagaccactcaaaaaatcagccattcgacgtgaacaccagcgggtatagccctccccacaccgctgacgcattaaagggcccccgcacccacaggaggtgcagcgagcctaacatcgaggatcagaacaggaaacttacgtatttgcggggcatttacagtaagaagcagcataagacgtcttgcgaagcggggcttctgcatggtgaggaagattacttaaagcggcataagagtctccaaatggaagggcagaagctcattaatcagagcctcgtgatgggcatcgaggtaggtaaatcatctgccaccaatcagaacaccgagaaggttctgccccctagactgaatctgtgcccccgaactagttattcttctctttcgtcccctggtactagtccgtccggctcatccgtttcatcccaggactccgcattctcccagatttctgagcatagcgttttcacccccaccgaaactagtagtccaatagattgcacattccaggcccagaggaaaagggaggacctgagcccagatttctctaacgccagccacgtctccggtatgccaggtcctagcagcggacaagcctgctctaggcctgcatatacaaagaaagacacaatggaatggcattctcaaatgcacagtgtcaccctccacccgtccacttggcttcgcaatggggtggctagcctgaagaattggagcttgaaaaaaaaagcaaaggcggcacgccctgaagaagaaaaaatagcttccccaaagggaccactggagcctccaccgcatgcatcaggggtgccagaagccaatagtctccaagaggaacaaaaagatctgccactgcgggctgccgagggattgagccccgtccagtccgcccagaggtgctcgtcaagtcctttccaagatagtgagcgtcactgttcgtctcccttttcactggttgagtccaggctgaaactgtgcatgaagtcccatgaggaaatcgaacctgggagccagagttcttccggctctctaccctgggagcgggctagtgcatcatcttggacattggaagacgcgactagccctgattccggacccactgtggtttgcgatatcgaggatagatacctcacaaaggatatatag

SEQ ID NO: 292131 - DNA, 3576 bp, Artificial Sequence
  derived and/or modified sequence
atggaggccatgtctccacagcaggagactctgggtggccagccaggcaggagttcgtccctgacaggggtgagtcggttagcgggagggtcctgcactaaaaagaaaatgaagacgttggcagaacgaaggcggagcgcaccgtccctgattttagataaggccttgcagaagcggcctaccactcgcgatagcccatctgcctctgtggatacatgcacatttctgagtagtctggtgtgctcaaatcgaacactgctgatagacggcagagcagaactgaaaagaggccttcagagacaggagagacatctgttcctgttcaatgacctgtttgtggttgccaaaatcaaatacaacaacaacttcaagatcaagaacaaaataaaactgactgacatgtggacggcatcgtgcgtggatgaggtaggtgaaggcaacaccaatgctatgaagtccttcgtgctgggatggcccaccgtgaatttcgtggccactttcagttctcccgaacagaaggacaaatggctgagcttgcttcagcggtatatcaatctagaaaaggagaaggattacccaaaatccatccccctgaagatcttcgcaaaagatatcggcaattgtgcttactctaaaacgatcaccgtgatgaactccgatacagccaatgaggtgataaacatgtcgcttccaatgctgggcattactgggtcagaacgtgactatcagctctgggtcaattccgggaaggaagaagccccttaccccttgattggccacgagtatccttacggaattaaaatgtctcacttgagagacagtgccctcctgaccccgggatccaaagactcgacaacaccctttaacctgcaggagccattcctgatggagcagcttccacgggagatgcaatgccagtttattcttaaacccagtcggctggctgcggctcaacaactgtctgacagtgggcataagacattcaagaggaggcggagcataattaattgggccttttggagggggtcatcaacacatctagataacttgccctccagccccacatccccaatgccgggtcagctgttcgggatatcccttcctaacatttgtgaaaacgacaatcttcctaaaccggtcttagatatgttgttttttctgaaccagaaaggacctctgaccaaagggatattcagacagtccgcgaacgtgaaatcttgcagggaactgaaggagaaacttaactctggagtggaggtgcaccttgactgtgagagcatttttgtcattgccagcgtgctgaaggattttctgagaaacattcccggaagtattttttcgtctgacttatatgatcattgggtcagtgtgatggatcaggggaacgacgaagaaaagattaatacggtccagagactgttagatcagcttcctcgtgccaatgttgtgctgctaagatatctctttggtgtgttgcacaacatcgagcagcactcaagcagcaatcaaatgaccgccttcaacctggccgtctgcgttgctccttccatactctggcccccagcctctagctctcccgaactggagaacgagtttacaaaaaaggttagtctgctcatccagtttcttatcgagaactgcctgcggatttttggggaggaaataacgtctctgtttcgagaagtgagcgtgcgctgcgatacccgcgaaaacgcttctgacatatcctgtttccaactcaatgacagtagttacgattccttggagaacgagcttaatgaggatgtcgatgccccatgcagtgatcttgtgaaaaagcttggccagggttctcgctctatggatagcgtcctgacactgtccgactacgatcttgatcaacctgaggttgaaggtctcttgacactctccgattttgatctcgcccactctaaggatgaagatgtgcaaatgaagaggccactggaaagcaagccagtcaatattctagtgtataccaaaatccccttgcgagatcacgcacgcgctccgagcgctatgtgtaccccgtcttatctcagcaccgccgcagctaatgctgccaaatccctgaggcggcaccgcaggtgcagtgagccatctatcgactacctggactcgaaactgtcctacctgagggaattctaccagaaaaagctgaggaagtcatcttgtgacgcaattctaagtcaaaaagacgaagactacctaaagcagaaccaacccctgcaagaagaggggaagacatgcttcaagcagtctctggtgaccgggaccgacgtatcaaagaagaacgctacaacacagaataccaagaagaagtcattgtctggttccgagggtaatcacgtgaaactattccccaaatcaaagccagttgccatttccgttgcttcttacagccccatgtcgtctcaggatcactccaaaaatcagccatttgacgtgaatacctccggctattcgccgcctcacacagcagacgcactgaagggaccgagaacacatcgcaggtgcagtgaacctaacatagaagatcagaatcgcaaacttacttacctgagggggatttactccaaaaaacagcacaagactagctgcgaggccggtctcctgcatggcgaggaagattacctgaagagacacaaaagcctgcagatggaggggcagaagttaataaaccagagcttagtgatgggaatagaggtgggtaagagctctgccacaaatcagaacacagagaaggtgctgccacctagactcaatttatgtcccaggacttcttactccagcctgtcttcgccaggtacctcaccaagtggttcttccgtgtcgagccaggattcggcgttttctcagatatcagagcactcagtgttcacacctacggagacaagctcaccaattgactgcaccttccaggctcagagaaagagggaagatctcagtccagacttctccaatgcatctcatgtgtcaggtatgccaggtccttcttctggacaggcatgtagtagacccgcttataccaaaaaggacactatggagtggcatagccagatgcactcagtcacactgcaccctagtacatggctgaggaatggagttgcgtccctgaaaaactggtctctgaagaaaaaggccaaagcggcaagaccagaggaagagaaaatagcaagcccaaagggaccattagaacctccaccacatgcctccggcgtgcctgaagctaactctctccaagaggagcaaaaagatctgcctctgagggccgctgagggcctctctccggtgcagtccgcacagagatgcagctcctcccctttccaagattccgaaagacactgttcctctccctttagtctggtggagtcgaggttgaagctgtgcatgaagtcccatgaagagatcgagcctggaagccagtctagtagtggcagcttgccctgggagagggcctcagcctccagttggaccctggaggacgccacctccccagactccggtcccaccgtggtgtgtgatatagaggaccgctatctgaccaaggatatttag

SEQ ID NO: 292132 - DNA, 3468 bp, Artificial Sequence
  derived and/or modified sequence
atgaagacactggcggagcggaggcgttccgccccttcactgattctggacaaagcacttcagaaaaggcccaccactagagactcgccgagtgcttccgtcgacacgtgcacttttttgtcatccttggtgtgcagtaaccgcacattgctgatagatgggagagccgaactgaaacggggtcttcagcgacaagagagacaccttttcctgttcaacgatttatttgtcgtggcaaagatcaaatataataataatttcaagattaaaaataaaataaaactaacagatatgtggaccgcgtcttgcgtggatgaggtaggggagggaaacactaacgctatgaaatcttttgtgttgggctggccaactgtaaattttgtagccacgttttcctcaccagaacagaaagataagtggttatcgctcctacagcggtacatcaacctcgagaaggaaaaggactatcccaagagtatccccctgaagatttttgccaaagacatcggaaactgcgcctactccaagaccattacagttatgaatagtgacacagccaatgaggtcatcaacatgtcccttccgatgttaggtataactggctccgaaagggactatcagctgtgggtcaactctgggaaggaagaagcaccgtatcccttaatcgggcatgagtatccttatggaattaaaatgagtcatctcagggactctgctctcctgacgccaggctctaaagacagcactactccattcaatctgcaagagccctttctcatggagcaactccccagagaaatgcagtgtcaatttattctcaagcccagccgacttgccgctgctcaacaactttccgactcgggacataaaactttcaaacggagacgatcaatcatcaactgggccttctggcgtgggtccagtacccacctggacaatctgccctcatcacctaccagcccaatgcctggacaactgttcggaatctctctgcctaatatctgcgagaatgacaatctgcccaagcctgtcctggacatgttgttttttcttaaccagaagggaccccttacgaaggggatcttcaggcaaagcgcgaacgtgaaaagttgtagagagctcaaggagaagttaaactctggggtagaagtgcatctggattgtgagagtatctttgtaatagcctcagtgctgaaggatttccttagaaacatccccggaagcatattttccagtgatctgtatgaccattgggtatccgtgatggatcaggggaatgacgaggagaagatcaacacggtccagcggctgttggatcaactgccacgagccaatgtggttttgctgcgctatctgttcggcgtgctccacaatattgaacagcattccagctccaaccaaatgacggccttcaatctggcggtatgcgtggctccgtctatcctttggcctccagccagctcctcaccagagctcgaaaacgagttcacaaaaaaggtgtccctgttgattcagttcctgattgagaattgcctccgcatcttcggtgaggagattacctctctcttcagggaagtctccgtcagatgcgacacccgcgaaaatgcaagtgacatctcctgtttccaactgaatgactcaagctatgatagtttggagaatgaactaaacgaggacgtggacgccccttgctcggacctagttaagaagctcgggcaagggtctcgatcgatggattcggtgctcactttgtctgactatgacttggatcagcccgaggtcgaggggcttttaacactaagcgattttgaccttgcccattccaaagacgaggacgtacaaatgaaacgtcccctggagtcaaaacctgtcaacatcttggtttacaccaaaatccctctgcgggatcatgccagggcgccaagcgcaatgtgcaccccctcttacctgtccacagccgctgccaacgcagctaagagtctccgacggcacaggcggtgctccgaaccgtcaatcgactacctcgattcaaagctcagttacctaagggaattttaccagaagaagctccggaaatctagctgcgatgctattctctcacagaaggacgaggactacctgaagcaaaatcagccgttgcaggaggagggcaagacttgcttcaaacagtctctggtgactggtactgacgtgtcaaaaaaaaatgctactacccagaataccaagaaaaaaagcctgtctggctcggaggggaatcacgtaaaactgttccctaaatcaaaacccgtggcaatatctgttgcctcatacagcccgatgagttcccaggatcattccaagaatcaacccttcgatgtgaatactagcggttactctcctccgcacacagccgacgctctcaaaggaccaaggacacatagaaggtgcagtgagcccaatatcgaagatcaaaaccgcaaactgacttatctaagaggcatatacagcaagaagcaacacaaaacatcatgcgaagccggactgcttcacggtgaggaggattacctgaagaggcacaagagtctccagatggagggtcagaagctcatcaaccagtcgctcgtaatgggcatagaagtcgggaaatctagtgctacaaatcagaatacagagaaggtgctgcccccacggctgaacctatgccctcgaacctcctacagcagcctgtcaagtcccggaacctcaccctctggatcatccgtgtccagtcaagattctgcattcagccagatttccgagcactccgtcttcactcctacagaaaccagctctcccatagattgtacctttcaggcccagaggaaacgggaggaccttagcccagacttcagtaacgcatctcatgtgagcggcatgccgggaccgtcctctggtcaggcctgctcaaggccggcatataccaagaaggatacaatggaatggcactcccagatgcactctgttactctccatcctagtacatggctgagaaatggcgtggcttcccttaagaactggtctcttaaaaagaaggccaaagcagctagacccgaagaagaaaagattgccagccctaaaggaccccttgaaccaccccctcacgcctctggagtacccgaggcaaacagcctccaggaggagcagaaggacttgcccttgagagctgccgaggggctgtctccggtgcagtcagcccagcggtgcagctcatcaccttttcaggacagcgagcggcactgctcaagtccttttagtctggttgagtcacgtctgaagctttgtatgaagtcacacgaggagatcgaacctgggtcacagagtagctcaggtagccttccatgggagcgggcatcagctagctcctggacactggaggacgcaactagccctgactccggtccgacagtggtttgcgacatcgaagatagatatctcaccaaagatatttag

SEQ ID NO: 292133 - DNA, 3468 bp, Artificial Sequence
  derived and/or modified sequence
atgaaaacactggcggagcgaagaagatctgccccatccttgattctagacaaggcattacagaagagaccaaccacacgcgattctcccagcgcttctgttgacacgtgtaccttcctttcatcgctcgtctgctcaaaccggacactgttaatagacgggagggcggagttaaagcgcggacttcagagacaagagaggcatctgttcctttttaatgacttgtttgtggtggccaaaattaagtacaataataactttaagattaaaaataaaatcaagctgaccgatatgtggaccgccagctgcgtggatgaggtgggagaaggaaacaccaatgccatgaaaagcttcgtgcttgggtggcccacagtgaattttgtagcgacattttcctctccagagcaaaaggacaaatggctgtcgctgctgcagcggtatataaatctggagaaggagaaagattatcccaagagtattcccttaaagatcttcgccaaagatattgggaactgtgcatattccaagacaattacagtaatgaacagtgacaccgccaatgaggtcataaatatgtctttacccatgttggggatcaccgggtccgagagagactatcaactgtgggtcaatagtggcaaggaagaggccccttatcccctaatcggacatgagtatccctatggcataaaaatgtcgcatctgcgcgacagtgcactgctgactccgggatctaaagatagtacaaccccatttaatctacaggaaccgttcctgatggaacagctccccagagagatgcagtgtcagtttattctgaagccttctagattggccgctgctcagcagctcagtgactcaggccataagacttttaagcgccgtcggtccattatcaactgggctttctggagggggagttccacccaccttgacaacttgccgagctctcccacatcccccatgcccggacagctatttggcatctctctgcccaatatctgtgagaatgataacctgcccaaaccagttttggacatgttattctttctaaaccaaaaaggcccattgaccaaagggatttttcgccagtcagccaatgtgaaatcctgcagagaattgaaggaaaaactgaacagtggagtggaggtgcaccttgactgtgaatcaatctttgtaatcgcctcagtccttaaagatttccttcggaatattccgggttctatctttagttcggacctgtacgaccattgggtatcagtcatggaccagggcaatgatgaagagaagattaacacagttcaacgactgcttgatcaactaccccgagccaacgtagtgctgctgaggtacctcttcggagttctgcataacattgaacagcactcttcaagtaatcagatgactgcgtttaatctagcagtttgcgttgctccatccatcttgtggccaccagcatccagtagtcctgagttagaaaatgagtttacgaagaaggtctcactcctgattcaattcttgatagagaattgtctgcgtatttttggtgaagaaatcacatccctgtttcgcgaggtgtccgtgaggtgtgacacccgagagaacgcttctgacatctcatgtttccaactaaacgatagctcctacgactctctggagaatgagcttaacgaggatgtggatgcaccatgttcagatctggtgaagaaattgggtcagggttccaggagcatggacagcgtcctcaccctaagcgactacgatctggaccagcctgaggtcgaagggcttcttaccctatcagacttcgatctagcacacagtaaggatgaggacgtccagatgaaaagaccactggagtctaagccagtgaatatcctggtttacactaagatccctctgcgagatcacgcccgagccccatccgccatgtgcactccaagttacctgagcaccgccgcagccaatgctgccaaatctttgagacgacacagacggtgttcagaaccttctattgattaccttgactcaaagctgtcctatctaagggagttttaccagaagaaacttcggaaatcctcatgtgacgccatcctgtcccagaaggatgaggattatctgaagcaaaaccaacctctgcaggaagaaggcaagacgtgcttcaaacagtcactcgtcaccggaactgacgttagcaagaaaaatgcaactacgcaaaacacaaaaaagaagagtctttcagggtccgaggggaaccacgtcaaattgttcccaaagtctaagccagtggcgatctcggtcgcctcttatagcccgatgtctagccaggaccactctaagaaccagccctttgacgtgaatacttccggatattcgcctccgcacaccgccgacgccctgaagggaccacggacgcatcgaaggtgttctgagccaaatatcgaagatcaaaaccgcaagctcacttatctccgtggaatatactccaagaagcagcacaagacctcttgtgaggcagggttgttgcatggagaagaagactatctcaagagacacaagtccctgcagatggaaggccagaaactaattaatcagtctcttgtcatggggatcgaggtgggaaagtccagtgcgactaatcagaataccgaaaaagtcctccctcccagattaaatctgtgtcctcggacatcgtacagcagtcttagctccccgggaacctccccatctggctctagtgtgagcagtcaagactctgcattttcccaaatctccgaacacagtgtgttcactccaacggagacatcgtcaccaatcgattgtaccttccaggcccagcgcaagagagaggatctgagtccggattttagcaacgcaagccacgtgtccgggatgcccggaccaagtagcggccaggcttgtagcagacccgcttatacaaagaaagatactatggagtggcattctcagatgcactcggtcactttacacccttcaacatggttgcggaacggtgtggccagcctgaagaactggagcctcaagaagaaagcaaaagcagccaggccagaggaggaaaagatcgcctcgccgaagggcccacttgagcctcctccgcacgccagtggcgtccccgaggctaactccctccaggaagagcagaaggaccttcctctgcgggctgctgaagggcttagtccagtgcaatcagctcaacgctgttctagttctcctttccaggatagcgaaaggcattgttctagcccctttagcctcgtggagagccggctgaaactgtgcatgaagagccatgaggaaatcgaacctggcagccagtccagctccggatcgctgccttgggagagagcatctgcgagttcatggactctggaagacgccacaagcccagacagcgggcctaccgtggtgtgcgacatcgaagataggtatctgacaaaggacatctag

SEQ ID NO: 292134 - DNA, 6189 bp, Artificial Sequence
  derived and/or modified sequence
gaggcgcgtgtccgtgcactagaggcccccgtgcgtgacacaggccgatgagctcctgcgggctgcacccacgcggagtcacagaccgaaaagcccgcggtgtcgagcgcaggcggaggtacatggccccgacgggaggcgcgcggcgagcacccggagctcggctccctgcctgagcacggcagccgcgcctccgcccgcgcgtcctcgcccctccggccggcagcccgcggacatgatcgtgtagcctcctcctgggctgggatttgtttgaagattttcttcatggaagcgatgtccccccagcaggagactctagggggacagccggggcgctcctcttccctgacaggagtgtctcggctcgcgggaggcagctgcaccaagaagaaaatgaaaacactagcagaaaggaggaggagcgctccatctcttatcctggataaagccctacaaaaacggcctactaccagggacagtccttctgctagtgttgacacatgcacatttctgtcatcattagtgtgctccaataggactctgctgattgatggccgggcagaactcaaaagaggcctccagaggcaggagcggcatcttttcctattcaatgatctgtttgttgtggccaaaatcaaatataacaataactttaagataaaaaataaaattaaattaactgatatgtggacagcaagctgtgtggatgaagtgggagaaggcaacaccaatgccatgaaatcctttgttttgggctggcccacagtgaactttgtggccactttcagttctccagaacaaaaggacaaatggctctctctccttcagagatacatcaatctagagaaagaaaaggactacccgaagagcattcccctcaaaatcttcgccaaggacattgggaattgtgcctactctaaaactataacagtaatgaattcagatacagcgaatgaagttatcaacatgtcattaccaatgctagggataactggctctgagagagattaccagttgtgggtcaattctggcaaagaagaggctccatacccactcattgggcatgaatatccatatggaattaaaatgagccatcttcgagactctgcactcctgacaccgggatcaaaggactctaccacccctttcaacctccaggagcccttccttatggaacagctcccccgagagatgcagtgccagttcatcctgaagcccagccgcctggctgcagcccagcaactgagtgattcaggtcataagacatttaaaaggagaagatctatcataaactgggccttctggcgaggttctagcactcacctggacaacttgccctcatcgccaacatcacctatgccaggacagctctttggaatttctctgccaaatatttgtgagaatgacaatctgcccaaacctgtcttggatatgcttttctttcttaatcaaaaaggacctctcaccaaaggtatcttcaggcaatcagccaatgtgaaatcctgcagagaactaaaagagaaattgaattctggagtcgaagtacacctagactgtgaatctatttttgtgatagcatctgtcttaaaggattttctgcgaaatattccaggaagtattttttcatcagatctctatgatcactgggtctctgtaatggatcaaggaaatgatgaagagaaaataaatactgttcaaaggctattagaccagcttccgagagccaatgttgttctcctaaggtatctttttggggtgttacacaacattgagcaacattcctcatccaatcagatgactgcatttaatttagctgtgtgtgtcgctccaagtattctttggcctcctgcttcctccagcccagaactagaaaacgaatttacaaaaaaggtttccctgcttatacaatttctgattgagaattgccttaggatatttggagaagaaatcacttccctcttcagagaggtttcagtgagatgtgacactagagagaatgcctcagatatttcttgctttcaactgaatgactcctcctatgacagcttggaaaatgagctaaatgaggatgttgatgcaccatgcagtgacttggtaaagaaacttggccaggggagcagaagcatggactctgtcttaaccctcagtgactatgatcttgaccagcccgaggtggaaggccttttaaccctaagcgactttgacttggcccattctaaagatgaagatgttcaaatgaaacggcctcttgaatccaagccggtgaacattttagtgtacacaaagatcccactgcgggatcatgccagggccccatctgccatgtgcacacccagctacctgtccacagctgcagcaaatgctgcaaaaagcctgaggcgacaccggcgttgctcagagcccagcatcgactatctggattcaaagctttcctacctcagggagttttatcagaaaaagctacgcaagtccagctgtgatgcaattctttctcaaaaagatgaagactatctgaagcagaatcaacccctccaggaggaaggaaagacatgttttaaacagagtttagtcacaggcactgatgtcagcaagaaaaatgccactactcaaaacactaagaagaaaagcttgtctggtagtgaaggaaatcacgtgaaacttttccctaagtctaagccagtggccatttctgtggcatcttatagtcctatgtcctcacaggatcattccaagaaccagccctttgatgtgaatacatctggatactccccaccacacacagcagatgccctcaagggtccaaggacacatcggcgctgctcagagcccaacatagaagaccagaaccgcaagctgacctatctcaggggaatttattcaaagaaacaacataaaaccagctgtgaagctggtctcttgcatggagaggaggattatctcaaacggcataagtctttgcaaatggaggggcagaagctcattaatcagagtttagtcatggggattgaggtgggcaagagtagtgccacaaaccaaaacactgagaaggttttacccccaagattaaacctttgcccaaggaccagctattccagcttatcctccccaggcacttccccatccggctcatcagtaagctcccaagacagtgctttttctcagatttctgaacactctgtgtttacacccactgagacttcctctccaatagattgcacttttcaggctcagagaaaacgggaagacctttctcctgactttagcaatgccagccatgtttccggaatgcccggtccctcatcagggcaggcttgcagccgcccagcctatacaaagaaggacaccatggagtggcattcacaaatgcattctgtaactcttcatcccagcacatggttgagaaatggtgtggccagtttgaaaaactggtccctcaaaaagaaagcaaaggcagccagaccagaggaagagaaaatagcttctccaaaaggacccttagagccacccccacatgcttctggtgttccagaagccaactcactgcaagaggaacaaaaagacttgcccttaagggcagctgaaggactgtcccctgtgcagtcagcccaaaggtgtagttcttctcccttccaggactcagagagacactgtagctctccattcagcctggtggagagcagacttaagctgtgcatgaagtcacatgaggaaatagagcctggtagtcagagctcttctggttctctgccttgggaaagagcctcagccagctcttggactctagaggatgcgaccagcccagactcagggcctacagtggtctgcgacattgaggacaggtatttaaccaaagacatttaagcatagtaagaatctgatgtccacaagaacaggaactgggttaataataatagacaataattattatgacccctttgtataagatacctgggagaggtagcataaggattatcattgctaatacttaggacaacgaaataattctctttattgagactacttgacaaatactttatgctaaaaattttgtcacctaagtgtttgggaggctttttcttattaaaggttgggattggtcctgtcatgtggttttagagatactaacagagggctagagaaagcatcttctgcagaggaagcacttatgggaacagtctgtgagattgatgtcctgagaagaccaagatatcaggaatgaggaataggggcctgaggagagaggggaagggtacagagaaaccatctacattccatggaatgtttttaataagtaggcaagaaaaatgccactaatcaaagcattaagtgtgtccagtaatgaagaacatcatataaaatctttccctaaatctaagccagtggccatttttgtgggatcttactaatcacgtgtccttacagaatcattccaagaaccagcccattgctacagctagagtggagaaaaacagagtgactcaaaagccatgggtaccatgatatcagttttgttggttgtatttgtcggtttgttttttcattcatgttgaagtgctttgcaaggcttcaggaaacagagttgtgaggagaaagaagaaaatggctgcccatttcagtaccctttcaaaggtatctctgcctaggaacattcttcagaaatgcaacttcttctatttagaaggtgacctcctgacagcgttcactctcaatatggaggaaaagaccacaacaactgtcctttctcaattacacaaatgctgttaaaatgtgatcaaaccatggcatcactttgctgaaatgtttctgcacagtcctgcctcttagattacagtcagccagaaaaacatacttataaatcatcccttttctgatttttgtagtttggcaattgagagagcaatattgaggttggccggttataaggagtcccacaatagaatacccaacaaagtggctgccaggccttctcagacagccatttgctttgggttttgcttccagacgttgttccatatttttgccccaaatgtttcatggcttataccccattggtttattttatatccatggacctttctttctctgctttcttgacttaaaggttgcagcagtacatctcgtcacctaggaatagattatcaggccttgccaactagtatgcagggatggcactaaaaatggatgtgcatcttctttcacattaactactaacctataagaagttgctctgagcccatttatttaaactctttagttcaccatcagatggacctttctctcacaagctagcttattccaaattatttgtcttattaatcaccagaaaatggtcatatcaaatgttctttcttttttgttctaaaggttgcattttcagttataggggaaaaaatattttctctaagatagaagaagttatttcagtattagctataggtgctacctacctcttggggacatggccctgtttgcgctaaccattacaatgatcttttagaactctgtatccaaagagctacttcgtgacactggccatctgagtcacagatgtgaagtcgatttcactttataactaaccagtcctacatattaagacttctaagtgtccatatgcatcttttttggtataatatataaagtcagcagggactcccctttcccttagggcatactactgtcagtcagaactgcaagatgtgaatgaagctcttaacggcttggagtgtctttctggaagaaattgccttttttttttttttcatgttagcaggtaaaaaatcattcacccaatttgaagcatagaagaaaatagttgctgaggttttttaataaccattcctactatctgtgttcccttagatactcctgtaattcttaatgtgaatagtttgttaatattgctgtaaagtattatattgtatgatttgaagacagactatatgtcattttattatactccatcaatctataatatattagactgatgctttatctaaaatgctttgagtttgtataatatatcttgacaaattttactaccatatgttatgtaataaatgtgtatttttgtacttgcagaaactgctgctaacttttaaagttgtttggttttcaaggcactgataatggatatgtatgaagtccatgctgtctgttaaataaaatgccattctgcagaattaaccatcc

SEQ ID NO: 292135 - DNA, 5998 bp, Artificial Sequence
  derived and/or modified sequence
gtagccttctcaatagcttagccaaatttcggcgtcctcgctctgtctgcattttccttcattgctctttcacgtttggaatgcccccgtctctgcagcctgcagacagcggaaaccgcgggtgcaaatgtgcaggggccgctgacatgaccggctgcagaagcccactcagggttacccgaacaggctagcgttcgggattgcacaagagaaaatgaaaacactagcagaaaggaggaggagcgctccatctcttatcctggataaagccctacaaaaacggcctactaccagggacagtccttctgctagtgttgacacatgcacatttctgtcatcattagtgtgctccaataggactctgctgattgatggccgggcagaactcaaaagaggcctccagaggcaggagcggcatcttttcctattcaatgatctgtttgttgtggccaaaatcaaatataacaataactttaagataaaaaataaaattaaattaactgatatgtggacagcaagctgtgtggatgaagtgggagaaggcaacaccaatgccatgaaatcctttgttttgggctggcccacagtgaactttgtggccactttcagttctccagaacaaaaggacaaatggctctctctccttcagagatacatcaatctagagaaagaaaaggactacccgaagagcattcccctcaaaatcttcgccaaggacattgggaattgtgcctactctaaaactataacagtaatgaattcagatacagcgaatgaagttatcaacatgtcattaccaatgctagggataactggctctgagagagattaccagttgtgggtcaattctggcaaagaagaggctccatacccactcattgggcatgaatatccatatggaattaaaatgagccatcttcgagactctgcactcctgacaccgggatcaaaggactctaccacccctttcaacctccaggagcccttccttatggaacagctcccccgagagatgcagtgccagttcatcctgaagcccagccgcctggctgcagcccagcaactgagtgattcaggtcataagacatttaaaaggagaagatctatcataaactgggccttctggcgaggttctagcactcacctggacaacttgccctcatcgccaacatcacctatgccaggacagctctttggaatttctctgccaaatatttgtgagaatgacaatctgcccaaacctgtcttggatatgcttttctttcttaatcaaaaaggacctctcaccaaaggtatcttcaggcaatcagccaatgtgaaatcctgcagagaactaaaagagaaattgaattctggagtcgaagtacacctagactgtgaatctatttttgtgatagcatctgtcttaaaggattttctgcgaaatattccaggaagtattttttcatcagatctctatgatcactgggtctctgtaatggatcaaggaaatgatgaagagaaaataaatactgttcaaaggctattagaccagcttccgagagccaatgttgttctcctaaggtatctttttggggtgttacacaacattgagcaacattcctcatccaatcagatgactgcatttaatttagctgtgtgtgtcgctccaagtattctttggcctcctgcttcctccagcccagaactagaaaacgaatttacaaaaaaggtttccctgcttatacaatttctgattgagaattgccttaggatatttggagaagaaatcacttccctcttcagagaggtttcagtgagatgtgacactagagagaatgcctcagatatttcttgctttcaactgaatgactcctcctatgacagcttggaaaatgagctaaatgaggatgttgatgcaccatgcagtgacttggtaaagaaacttggccaggggagcagaagcatggactctgtcttaaccctcagtgactatgatcttgaccagcccgaggtggaaggccttttaaccctaagcgactttgacttggcccattctaaagatgaagatgttcaaatgaaacggcctcttgaatccaagccggtgaacattttagtgtacacaaagatcccactgcgggatcatgccagggccccatctgccatgtgcacacccagctacctgtccacagctgcagcaaatgctgcaaaaagcctgaggcgacaccggcgttgctcagagcccagcatcgactatctggattcaaagctttcctacctcagggagttttatcagaaaaagctacgcaagtccagctgtgatgcaattctttctcaaaaagatgaagactatctgaagcagaatcaacccctccaggaggaaggaaagacatgttttaaacagagtttagtcacaggcactgatgtcagcaagaaaaatgccactactcaaaacactaagaagaaaagcttgtctggtagtgaaggaaatcacgtgaaacttttccctaagtctaagccagtggccatttctgtggcatcttatagtcctatgtcctcacaggatcattccaagaaccagccctttgatgtgaatacatctggatactccccaccacacacagcagatgccctcaagggtccaaggacacatcggcgctgctcagagcccaacatagaagaccagaaccgcaagctgacctatctcaggggaatttattcaaagaaacaacataaaaccagctgtgaagctggtctcttgcatggagaggaggattatctcaaacggcataagtctttgcaaatggaggggcagaagctcattaatcagagtttagtcatggggattgaggtgggcaagagtagtgccacaaaccaaaacactgagaaggttttacccccaagattaaacctttgcccaaggaccagctattccagcttatcctccccaggcacttccccatccggctcatcagtaagctcccaagacagtgctttttctcagatttctgaacactctgtgtttacacccactgagacttcctctccaatagattgcacttttcaggctcagagaaaacgggaagacctttctcctgactttagcaatgccagccatgtttccggaatgcccggtccctcatcagggcaggcttgcagccgcccagcctatacaaagaaggacaccatggagtggcattcacaaatgcattctgtaactcttcatcccagcacatggttgagaaatggtgtggccagtttgaaaaactggtccctcaaaaagaaagcaaaggcagccagaccagaggaagagaaaatagcttctccaaaaggacccttagagccacccccacatgcttctggtgttccagaagccaactcactgcaagaggaacaaaaagacttgcccttaagggcagctgaaggactgtcccctgtgcagtcagcccaaaggtgtagttcttctcccttccaggactcagagagacactgtagctctccattcagcctggtggagagcagacttaagctgtgcatgaagtcacatgaggaaatagagcctggtagtcagagctcttctggttctctgccttgggaaagagcctcagccagctcttggactctagaggatgcgaccagcccagactcagggcctacagtggtctgcgacattgaggacaggtatttaaccaaagacatttaagcatagtaagaatctgatgtccacaagaacaggaactgggttaataataatagacaataattattatgacccctttgtataagatacctgggagaggtagcataaggattatcattgctaatacttaggacaacgaaataattctctttattgagactacttgacaaatactttatgctaaaaattttgtcacctaagtgtttgggaggctttttcttattaaaggttgggattggtcctgtcatgtggttttagagatactaacagagggctagagaaagcatcttctgcagaggaagcacttatgggaacagtctgtgagattgatgtcctgagaagaccaagatatcaggaatgaggaataggggcctgaggagagaggggaagggtacagagaaaccatctacattccatggaatgtttttaataagtaggcaagaaaaatgccactaatcaaagcattaagtgtgtccagtaatgaagaacatcatataaaatctttccctaaatctaagccagtggccatttttgtgggatcttactaatcacgtgtccttacagaatcattccaagaaccagcccattgctacagctagagtggagaaaaacagagtgactcaaaagccatgggtaccatgatatcagttttgttggttgtatttgtcggtttgttttttcattcatgttgaagtgctttgcaaggcttcaggaaacagagttgtgaggagaaagaagaaaatggctgcccatttcagtaccctttcaaaggtatctctgcctaggaacattcttcagaaatgcaacttcttctatttagaaggtgacctcctgacagcgttcactctcaatatggaggaaaagaccacaacaactgtcctttctcaattacacaaatgctgttaaaatgtgatcaaaccatggcatcactttgctgaaatgtttctgcacagtcctgcctcttagattacagtcagccagaaaaacatacttataaatcatcccttttctgatttttgtagtttggcaattgagagagcaatattgaggttggccggttataaggagtcccacaatagaatacccaacaaagtggctgccaggccttctcagacagccatttgctttgggttttgcttccagacgttgttccatatttttgccccaaatgtttcatggcttataccccattggtttattttatatccatggacctttctttctctgctttcttgacttaaaggttgcagcagtacatctcgtcacctaggaatagattatcaggccttgccaactagtatgcagggatggcactaaaaatggatgtgcatcttctttcacattaactactaacctataagaagttgctctgagcccatttatttaaactctttagttcaccatcagatggacctttctctcacaagctagcttattccaaattatttgtcttattaatcaccagaaaatggtcatatcaaatgttctttcttttttgttctaaaggttgcattttcagttataggggaaaaaatattttctctaagatagaagaagttatttcagtattagctataggtgctacctacctcttggggacatggccctgtttgcgctaaccattacaatgatcttttagaactctgtatccaaagagctacttcgtgacactggccatctgagtcacagatgtgaagtcgatttcactttataactaaccagtcctacatattaagacttctaagtgtccatatgcatcttttttggtataatatataaagtcagcagggactcccctttcccttagggcatactactgtcagtcagaactgcaagatgtgaatgaagctcttaacggcttggagtgtctttctggaagaaattgccttttttttttttttcatgttagcaggtaaaaaatcattcacccaatttgaagcatagaagaaaatagttgctgaggttttttaataaccattcctactatctgtgttcccttagatactcctgtaattcttaatgtgaatagtttgttaatattgctgtaaagtattatattgtatgatttgaagacagactatatgtcattttattatactccatcaatctataatatattagactgatgctttatctaaaatgctttgagtttgtataatatatcttgacaaattttactaccatatgttatgtaataaatgtgtatttttgtacttgcagaaactgctgctaacttttaaagttgtttggttttcaaggcactgataatggatatgtatgaagtccatgctgtctgttaaataaaatgccattctgcag

SEQ ID NO: 292136 - DNA, 5880 bp, Artificial Sequence
  derived and/or modified sequence
gaggcgcgtgtccgtgcactagaggcccccgtgcgtgacacaggccgatgagctcctgcgggctgcacccacgcggagtcacagaccgaaaagaaaatgaaaacactagcagaaaggaggaggagcgctccatctcttatcctggataaagccctacaaaaacggcctactaccagggacagtccttctgctagtgttgacacatgcacatttctgtcatcattagtgtgctccaataggactctgctgattgatggccgggcagaactcaaaagaggcctccagaggcaggagcggcatcttttcctattcaatgatctgtttgttgtggccaaaatcaaatataacaataactttaagataaaaaataaaattaaattaactgatatgtggacagcaagctgtgtggatgaagtgggagaaggcaacaccaatgccatgaaatcctttgttttgggctggcccacagtgaactttgtggccactttcagttctccagaacaaaaggacaaatggctctctctccttcagagatacatcaatctagagaaagaaaaggactacccgaagagcattcccctcaaaatcttcgccaaggacattgggaattgtgcctactctaaaactataacagtaatgaattcagatacagcgaatgaagttatcaacatgtcattaccaatgctagggataactggctctgagagagattaccagttgtgggtcaattctggcaaagaagaggctccatacccactcattgggcatgaatatccatatggaattaaaatgagccatcttcgagactctgcactcctgacaccgggatcaaaggactctaccacccctttcaacctccaggagcccttccttatggaacagctcccccgagagatgcagtgccagttcatcctgaagcccagccgcctggctgcagcccagcaactgagtgattcaggtcataagacatttaaaaggagaagatctatcataaactgggccttctggcgaggttctagcactcacctggacaacttgccctcatcgccaacatcacctatgccaggacagctctttggaatttctctgccaaatatttgtgagaatgacaatctgcccaaacctgtcttggatatgcttttctttcttaatcaaaaaggacctctcaccaaaggtatcttcaggcaatcagccaatgtgaaatcctgcagagaactaaaagagaaattgaattctggagtcgaagtacacctagactgtgaatctatttttgtgatagcatctgtcttaaaggattttctgcgaaatattccaggaagtattttttcatcagatctctatgatcactgggtctctgtaatggatcaaggaaatgatgaagagaaaataaatactgttcaaaggctattagaccagcttccgagagccaatgttgttctcctaaggtatctttttggggtgttacacaacattgagcaacattcctcatccaatcagatgactgcatttaatttagctgtgtgtgtcgctccaagtattctttggcctcctgcttcctccagcccagaactagaaaacgaatttacaaaaaaggtttccctgcttatacaatttctgattgagaattgccttaggatatttggagaagaaatcacttccctcttcagagaggtttcagtgagatgtgacactagagagaatgcctcagatatttcttgctttcaactgaatgactcctcctatgacagcttggaaaatgagctaaatgaggatgttgatgcaccatgcagtgacttggtaaagaaacttggccaggggagcagaagcatggactctgtcttaaccctcagtgactatgatcttgaccagcccgaggtggaaggccttttaaccctaagcgactttgacttggcccattctaaagatgaagatgttcaaatgaaacggcctcttgaatccaagccggtgaacattttagtgtacacaaagatcccactgcgggatcatgccagggccccatctgccatgtgcacacccagctacctgtccacagctgcagcaaatgctgcaaaaagcctgaggcgacaccggcgttgctcagagcccagcatcgactatctggattcaaagctttcctacctcagggagttttatcagaaaaagctacgcaagtccagctgtgatgcaattctttctcaaaaagatgaagactatctgaagcagaatcaacccctccaggaggaaggaaagacatgttttaaacagagtttagtcacaggcactgatgtcagcaagaaaaatgccactactcaaaacactaagaagaaaagcttgtctggtagtgaaggaaatcacgtgaaacttttccctaagtctaagccagtggccatttctgtggcatcttatagtcctatgtcctcacaggatcattccaagaaccagccctttgatgtgaatacatctggatactccccaccacacacagcagatgccctcaagggtccaaggacacatcggcgctgctcagagcccaacatagaagaccagaaccgcaagctgacctatctcaggggaatttattcaaagaaacaacataaaaccagctgtgaagctggtctcttgcatggagaggaggattatctcaaacggcataagtctttgcaaatggaggggcagaagctcattaatcagagtttagtcatggggattgaggtgggcaagagtagtgccacaaaccaaaacactgagaaggttttacccccaagattaaacctttgcccaaggaccagctattccagcttatcctccccaggcacttccccatccggctcatcagtaagctcccaagacagtgctttttctcagatttctgaacactctgtgtttacacccactgagacttcctctccaatagattgcacttttcaggctcagagaaaacgggaagacctttctcctgactttagcaatgccagccatgtttccggaatgcccggtccctcatcagggcaggcttgcagccgcccagcctatacaaagaaggacaccatggagtggcattcacaaatgcattctgtaactcttcatcccagcacatggttgagaaatggtgtggccagtttgaaaaactggtccctcaaaaagaaagcaaaggcagccagaccagaggaagagaaaatagcttctccaaaaggacccttagagccacccccacatgcttctggtgttccagaagccaactcactgcaagaggaacaaaaagacttgcccttaagggcagctgaaggactgtcccctgtgcagtcagcccaaaggtgtagttcttctcccttccaggactcagagagacactgtagctctccattcagcctggtggagagcagacttaagctgtgcatgaagtcacatgaggaaatagagcctggtagtcagagctcttctggttctctgccttgggaaagagcctcagccagctcttggactctagaggatgcgaccagcccagactcagggcctacagtggtctgcgacattgaggacaggtatttaaccaaagacatttaagcatagtaagaatctgatgtccacaagaacaggaactgggttaataataatagacaataattattatgacccctttgtataagatacctgggagaggtagcataaggattatcattgctaatacttaggacaacgaaataattctctttattgagactacttgacaaatactttatgctaaaaattttgtcacctaagtgtttgggaggctttttcttattaaaggttgggattggtcctgtcatgtggttttagagatactaacagagggctagagaaagcatcttctgcagaggaagcacttatgggaacagtctgtgagattgatgtcctgagaagaccaagatatcaggaatgaggaataggggcctgaggagagaggggaagggtacagagaaaccatctacattccatggaatgtttttaataagtaggcaagaaaaatgccactaatcaaagcattaagtgtgtccagtaatgaagaacatcatataaaatctttccctaaatctaagccagtggccatttttgtgggatcttactaatcacgtgtccttacagaatcattccaagaaccagcccattgctacagctagagtggagaaaaacagagtgactcaaaagccatgggtaccatgatatcagttttgttggttgtatttgtcggtttgttttttcattcatgttgaagtgctttgcaaggcttcaggaaacagagttgtgaggagaaagaagaaaatggctgcccatttcagtaccctttcaaaggtatctctgcctaggaacattcttcagaaatgcaacttcttctatttagaaggtgacctcctgacagcgttcactctcaatatggaggaaaagaccacaacaactgtcctttctcaattacacaaatgctgttaaaatgtgatcaaaccatggcatcactttgctgaaatgtttctgcacagtcctgcctcttagattacagtcagccagaaaaacatacttataaatcatcccttttctgatttttgtagtttggcaattgagagagcaatattgaggttggccggttataaggagtcccacaatagaatacccaacaaagtggctgccaggccttctcagacagccatttgctttgggttttgcttccagacgttgttccatatttttgccccaaatgtttcatggcttataccccattggtttattttatatccatggacctttctttctctgctttcttgacttaaaggttgcagcagtacatctcgtcacctaggaatagattatcaggccttgccaactagtatgcagggatggcactaaaaatggatgtgcatcttctttcacattaactactaacctataagaagttgctctgagcccatttatttaaactctttagttcaccatcagatggacctttctctcacaagctagcttattccaaattatttgtcttattaatcaccagaaaatggtcatatcaaatgttctttcttttttgttctaaaggttgcattttcagttataggggaaaaaatattttctctaagatagaagaagttatttcagtattagctataggtgctacctacctcttggggacatggccctgtttgcgctaaccattacaatgatcttttagaactctgtatccaaagagctacttcgtgacactggccatctgagtcacagatgtgaagtcgatttcactttataactaaccagtcctacatattaagacttctaagtgtccatatgcatcttttttggtataatatataaagtcagcagggactcccctttcccttagggcatactactgtcagtcagaactgcaagatgtgaatgaagctcttaacggcttggagtgtctttctggaagaaattgccttttttttttttttcatgttagcaggtaaaaaatcattcacccaatttgaagcatagaagaaaatagttgctgaggttttttaataaccattcctactatctgtgttcccttagatactcctgtaattcttaatgtgaatagtttgttaatattgctgtaaagtattatattgtatgatttgaagacagactatatgtcattttattatactccatcaatctataatatattagactgatgctttatctaaaatgctttgagtttgtataatatatcttgacaaattttactaccatatgttatgtaataaatgtgtatttttgtacttgcagaaactgctgctaacttttaaagttgtttggttttcaaggcactgataatggatatgtatgaagtccatgctgtctgttaaataaaatgccattctgcag

SEQ ID NO: 292137 - DNA, 2623 bp, Artificial Sequence
  derived and/or modified sequence
gttttctgcccccacattcttggaaatgctctacatttttggaaacacctacagtcaaaatgagctttaagcagagcttttgaccttagcagtatcttctgcagacctgtgtcaggctctcacctcccaaaggattggaatgcaccagagctaggggtcgagacaaggccccagcctgtatctcaggctgaaacgtgaaaaccaagttaaggaaaatatggtgaagaagattcttgcatacccctactccagctgagtgcccaggattttctgcgaaatattccaggaagtattttttcatcagatctctatgatcactgggtctctgtaatggatcaaggaaatgatgaagagaaaataaatactgttcaaaggctattagaccagcttccgagagccaatgttgttctcctaaggtatctttttggggtgttacacaacattgagcaacattcctcatccaatcagatgactgcatttaatttagctgtgtgtgtcgctccaagtattctttggcctcctgcttcctccagcccagaactagaaaacgaatttacaaaaaaggtttccctgcttatacaatttctgattgagaattgccttaggatatttggagaagaaatcacttccctcttcagagaggtttcagtgagatgtgacactagagagaatgcctcagatatttcttgctttcaactgaatgactcctcctatgacagcttggaaaatgagctaaatgaggatgttgatgcaccatgcagtgacttggtaaagaaacttggccaggggagcagaagcatggactctgtcttaaccctcagtgactatgatcttgaccagcccgaggtggaaggccttttaaccctaagcgactttgacttggcccattctaaagatgaagatgttcaaatgaaacggcctcttgaatccaagccggtgaacattttagtgtacacaaagatcccactgcgggatcatgccagggccccatctgccatgtgcacacccagctacctgtccacagctgcagcaaatgctgcaaaaagcctgaggcgacaccggcgttgctcagagcccagcatcgactatctggattcaaagctttcctacctcagggagttttatcagaaaaagctacgcaagtccagctgtgatgcaattctttctcaaaaagatgaagactatctgaagcagaatcaacccctccaggaggaaggaaagacatgttttaaacagagtttagtcacaggcactgatgtcagcaagaaaaatgccactactcaaaacactaagaagaaaagcttgtctggtagtgaaggaaatcacgtgaaacttttccctaagtctaagccagtggccatttctgtggcatcttatagtcctatgtcctcacaggatcattccaagaaccagccctttgatgtgaatacatctggatactccccaccacacacagcagatgccctcaagggtccaaggacacatcggcgctgctcagagcccaacatagaagaccagaaccgcaagctgacctatctcaggggaatttattcaaagaaacaacataaaaccagctgtgaagctggtctcttgcatggagaggaggattatctcaaacggcataagtctttgcaaatggaggggcagaagctcattaatcagagtttagtcatggggattgaggtgggcaagagtagtgccacaaaccaaaacactgagaaggttttacccccaagattaaacctttgcccaaggaccagctattccagcttatcctccccaggcacttccccatccggctcatcagtaagctcccaagacagtgctttttctcagatttctgaacactctgtgtttacacccactgagacttcctctccaatagattgcacttttcaggctcagagaaaacgggaagacctttctcctgactttagcaatgccagccatgtttccggaatgcccggtccctcatcagggcaggcttgcagccgcccagcctatacaaagaaggacaccatggagtggcattcacaaatgcattctgtaactcttcatcccagcacatggttgagaaatggtgtggccagtttgaaaaactggtccctcaaaaagaaagcaaaggcagccagaccagaggaagagaaaatagcttctccaaaaggacccttagagccacccccacatgcttctggtgttccagaagccaactcactgcaagaggaacaaaaagacttgcccttaagggcagctgaaggactgtcccctgtgcagtcagcccaaaggtgtagttcttctcccttccaggactcagagagacactgtagctctccattcagcctggtggagagcagacttaagctgtgcatgaagtcacatgaggaaatagagcctggtagtcagagctcttctggttctctgccttgggaaagagcctcagccagctcttggactctagaggatgcgaccagcccagactcagggcctacagtggtctgcgacattgaggacagaaactgctgctaacttttaaagttgtttggttttcaaggcactgataatggatatgtatgaagtccatgctgtctgttaaataaaatgccattctgcagaattaaccatc

SEQ ID NO: 292138 - DNA, 2763 bp, Artificial Sequence
  derived and/or modified sequence
atggccaacggtaccgcggacgtgcgaaaacttttcatctttacaaccactcagaattatttcggtttaatgtctgaactgtgggaccagccgttgctgtgtaactgtctggagatcaacaatttcctggatgatggaaatcagatgctcctgagggtgcagcgtagtgacgctgggataagtttctccaatacaatcgaattcggagataccaaagacaaggtgctggtattttttaaattgaggcccgaagtgattacggacgagaatcttcacgacaacattcttgtgagttctatgctagaaagcccaatcagctccctctaccaggcagtgcgacaggtattcgctccgatgctgctcaaagaccaggaatggtctcgcaactttgatccaaaactgcagaacctgctgagcgagttggaggctggcttaggaattgtgcttcggcgcagcgacactaacctaaccaagctgaaattcaaggaggatgatactagaggcatactgactccgagcgacgaattccagttttggatcgaacaggcccataggggcaacaaacagatttccaaagaacgggcgaattactttaaggaactgtttgaaaccatcgccagggagttttataacctcgattccctgagcttactggaagttgtggacctcgtggaaacaactcaggatgtcgttgatgatgtgtggaggcagaccgagcacgatcactaccccgaaagtagaatgctgcatctgttggatattatcggtgggtcattcgggcggtttgtacagaagaagttgggtacccttaacctgtgggaggatccctactacctcgtgaaagagtccttgaaggcaggtattagcatttgcgagcagtgggtcatagtctgtaatcacctcaccggccaggtctggcaacggtacgtcccccacccttggaagaacgagaagtatttccctgagaccctcgacaagctaggtaaacgcctagaggaagtgttagccattcggacgattcacgagaagtttctctactttcttcccgcttcagaggagaagatcatttgcctgacccgcgtattcgagcctttcacaggcctgaatcccgtgcagtacaacccgtatacagaaccattgtggaaggcggccgtgtcacagtatgagaagatcatcgcacctgcagagcagaaaattgccggcaagctcaaaaactacatttccgaaatccaggactctccacaacaattgctccaggcttttcttaaatacaaggagctcgttaagcgtcccacgatctccaaggagctgatgctggagagagagacactattggctagactagtggattccataaaagactttcggctggacttcgaaaacagatgccgtgggatccctggagacgcatcgggacccctctctggcaagaatctaagcgaggttgtcaatagcatcgtgtgggtgcgccagttggaacttaaagtggacgacacaattaagatcgccgaggccctgctttccgatttaccaggtttcagatgctttcatcagtccgccaaggacttgctggatcagctgaagctgtatgaacaagaacagtttgacgattggtcgcgggacatccagagcggtctgagcgattctaggtccggactgtgtattgaggccagttcccggattatggagctggattcaaatgacggattgctgaaggtccactactctgaccgtctagtgattttgctgagggaggtgagacaactgtccgctctgggcttcgttatccccgctaagatacagcaggtggccaatattgcccagaaattttgtaagcaagccatcatcctgaaacaagtggcccacttctacaactccatcgaccaacaaatgattcagtcccagaggcccatgatgctgcagtctgccttggccttcgaacagatcatcaaaaactctaaagctggctccggcggcaagtctcagatcacatgggacaacccgaaggagctcgagggatacattcagaaactgcagaatgccgctgaacggttagcgactgaaaatagaaaactccgcaaatggcatactaccttttgcgagaaagttgtagtgctcatgaatatcgacctattgaggcagcagcagagatggaaagacggcctgcaggagctcaggaccggcttggctacagtggaggcgcagtgtcctttggcttggcagtccaagtgggaagggcctgaagatccgttacagtatcttaggggcctggtcgcgcgcgctctcgcgatccaaaactgggtagacaaggccgaaaaacaggccctgctgtccgaaacccttgatctctcagagcttttccatcctgataccttccttaatgcccttcggcaggagaccgccagagccgtgggaaggtcagttgattcactgaaatttgtcgcgtcgtggaagggaagactgcaagaggccaaattgcagattaaaatttccggattactgcttgaaggttgcagcttcgacggaaatcaactctctgagaatcagctggacagcccttctgtttccagtgtgctgccatgtttcatggggtggatccctcaggatgcctgcgggccttactcaccagacgagtgtatctcactgccagtttatacctccgcagaacgcgatcgggttgtgacaaacatcgatgttccgtgtgggggtaatcaagaccagtggatacagtgcggggctgccttgtttctgaaaaaccaatag

SEQ ID NO: 292139 - DNA, 1515 bp, Artificial Sequence
  derived and/or modified sequence
atgggccagggccaagctgatctcgctattcagatgttaaaggagtgcgcgcgcaacggtgattggctgtgcctaaaaaatctgcatcttgtggtttcctggctccccgtgctggagaaagagctgaatacgttgcagccgaaggatacattcaggttgtggcttacagcagaagttcatcctaactttacacctattctgttacaatcctcacttaagataacatatgagagtcctcccgggttgaagaaaaatctaatgagaacctacgagtcttggacaccggagcaaatctccaaaaaagacaatacgcatcgcgcacacgctttattctctttggcttggttccacgctgcctgccaagagcgccgaaactacatcccgcagggctggaccaaattttatgaatttagtctgtcggatctgcgcgccggctataacataatcgacaggttgtttgatggcgctaaggacgtgcaatgggaatttgtgcatggacttttggagaacgcgatttatggcggtaggattgataactatttcgatctacgcgtcttgcagtcttacttaaagcagtttttcaattcttctgtcattgatgtgttcaatcagcgcaataagaagtcgatttttccctattcagtgtcgctgccccagtcctgtagcattctcgactaccgtgcagttattgagaaaattcctgaagatgataagccaagcttcttcggtctgccagcgaacatcgccagaagttcccagagaatgattagctcccaagtcatctcgcagctgagaatcctcggcaggtccattacagccggaagcaagttcgaccgggagatctggagcaacgagctctcacccgtgctgaacttatggaaaaagttgaatcaaaattcaaatctgatacatcagaaggttcctccaccaaatgaccgccaggggtctcccatcttgtcgttcatcattctggaacagtttaatgccattaggctcgtgcagtctgtacaccagtctttagccgcgctgtcgaaagttatcagaggcacaactctgctgtcttcagaggtacagaagttggcgtctgccttgctgaaccagaaatgtccattggcatggcaatcaaagtgggagggtccagaggaccccctgcagtatctgcgcgggctggtggcgcgcgcgctagctattcaaaactgggtggacaaagctgagaagcaggctttgctgtctgagacactggatctctcggagctgttccaccccgacactttcttgaatgccttgagacaggaaactgcccgggcggttggtcgcagcgtggattccttgaagttcgtggcatcttggaagggccgcctgcaggaggcaaaactacagattaagatctctgggctactgctcgagggatgcagtttcgacggcaatcagctcagtgaaaaccagctagacagtcctagcgtatcctccgttcttccttgtttcatgggatggatccctcaggacctattgtag

SEQ ID NO: 292140 - DNA, 2763 bp, Artificial Sequence
  derived and/or modified sequence
atggccaatggaacagcagatgtgaggaagctgttcatcttcaccaccacccagaactacttcggcctgatgtctgagctgtgggaccagcccctgctgtgcaactgcctggagatcaacaacttcctggatgatggcaaccagatgctgctgcgggtgcagaggagtgatgctggcatctccttcagcaacaccatcgagtttggagacaccaaggacaaggtgctggtgttcttcaagctgcggcctgaggtgatcacagatgagaacctgcatgacaacatcctggtgtcctccatgctggagagccccatcagcagcctgtaccaggccgtgcggcaggtgtttgcccccatgctgctgaaggaccaggagtggagcaggaactttgaccccaagctgcagaacctgctgtctgagctggaggccggcctgggcatcgtgctgcggcggagtgacaccaacctgaccaagctgaagttcaaggaggatgacacccggggcatcctgacccccagtgatgagttccagttctggattgagcaggcccaccggggcaacaagcagatcagcaaggagcgggccaactacttcaaggagctgtttgagaccatcgcccgggagttctacaacctggacagcctgagcctgctggaggtggtggacctggtggagaccacccaggatgtggtggatgatgtgtggaggcagacagaacatgaccactacccagagagcaggatgctgcacctgctggacatcattggaggcagctttggccgctttgtgcagaagaagctgggcaccctgaacctgtgggaggacccctactacctggtgaaggagagcctgaaggccggcatcagcatctgtgagcagtgggtgattgtgtgcaaccacctgaccggccaggtgtggcagagatatgtgccccacccctggaagaatgagaagtacttccctgagaccctggacaagctgggcaagaggctggaggaggtgctggccatccgcaccatccacgagaagttcctgtacttcctgcctgccagcgaggagaagatcatctgcctgaccagggtgtttgagcccttcaccggcctgaaccctgtgcagtacaacccctacacagagcccctgtggaaggctgctgtgtcccagtatgagaagatcatcgccccagctgagcagaagattgctgggaagctgaagaactacatcagcgagatccaggacagcccccagcagctgctgcaggccttcctgaagtacaaggagctggtgaagaggcccaccatcagcaaggagctgatgctggagcgggagaccctgctggcccggctggtggacagcatcaaggacttccggctggactttgagaaccgctgccggggcatccctggagatgccagcggccccctgagcggcaagaacctgtctgaggtggtgaacagcatcgtgtgggtgcggcagctggagctgaaggtggatgacaccatcaagattgctgaggccctgctgagtgacctgcccggcttccgctgcttccaccagagcgccaaggacctgctggaccagctgaagctgtatgagcaggagcagtttgatgactggagccgggacatccagagcggcctgagtgacagccgcagcggcctgtgcatcgaggccagcagccgcatcatggagctggacagcaatgatggcctgctgaaggtgcactacagcgaccggctggtgatcctgctgcgggaggtgcggcagctgagcgccctgggcttcgtcatcccagccaagatccagcaggtggccaacatcgcccagaagttctgcaagcaggccatcatcctgaagcaggtggcccacttctacaacagcattgaccagcagatgatccagagccagaggcccatgatgctgcagagcgccctggcctttgagcagatcatcaagaacagcaaggccggcagcggcggcaagagccagatcacctgggacaaccccaaggagctggagggctacatccagaagctgcagaatgctgctgagcggctggccacagagaacaggaagctgaggaagtggcacaccaccttctgtgagaaggtggtggtgctgatgaacatcgacctgctgcggcagcagcagcgctggaaggatggcctgcaggagctgaggacaggcctggccaccgtggaggcccagtgccccctggcctggcagagcaagtgggagggccctgaggaccccctgcagtacctgcggggcctggtggcccgggccctggccatccagaactgggtggacaaggccgagaagcaggccctgctgtctgagaccctggacctgtctgagctgttccacccagacaccttcctgaatgccctgcggcaggagacagcccgggctgtgggccgctctgtggacagcctgaagtttgtggcctcctggaagggccgcctgcaggaggccaagctgcagatcaagatcagcggcctgctgctggagggctgcagctttgatggcaaccagctgtctgagaaccagctggacagccccagcgtgtcctctgtgctgccctgcttcatgggctggatcccccaggatgcctgtggcccctacagcccagatgagtgcatcagcctgcctgtgtacaccagcgctgagcgggacagagtggtgaccaacattgatgtgccctgtggcggcaaccaggaccagtggatccagtgtggggccgccctcttcctgaagaaccagtag

SEQ ID NO: 292141 - DNA, 1515 bp, Artificial Sequence
  derived and/or modified sequence
atgggccagggccaggccgacctggccatccagatgctgaaggaatgtgccagaaatggagactggctgtgcctgaagaacctgcacctggtggtgtcctggctgcctgtgctggagaaggagctgaacaccctgcagcccaaggacaccttccggctgtggctgacagctgaggtgcaccccaacttcacccccatcctgctgcagagcagcctgaagatcacctatgagagccccccaggcctgaagaagaacctgatgaggacctatgagagctggaccccagagcagatcagcaagaaggacaacacccaccgggcccacgccctcttcagcctggcctggttccacgccgcctgccaggagaggaggaactacatcccccagggctggaccaagttctatgagttcagcctgagtgacctgcgggccggctacaacatcatcgaccggctgtttgatggagccaaggatgtgcagtgggagtttgtgcacggcctgctggagaatgccatctatggaggaagaattgacaactactttgacctgcgggtgctgcagagctacctgaagcagttcttcaacagctctgtgattgatgtgttcaaccagaggaacaagaagagcatcttcccctacagcgtgtccctgccccagagctgcagcatcctggactaccgggccgtcatcgagaagatcccagaagatgacaagcccagcttcttcggcctgcctgccaacatcgcccggagcagccagaggatgatcagcagccaggtgatcagccagctgcgcatcctgggccgcagcatcacagctggcagcaagtttgaccgggagatctggagcaatgagctgagccctgtgctgaacctgtggaagaagctgaaccagaacagcaacctgatccaccagaaggtgcccccaccaaatgaccggcagggcagccccatcctgtccttcatcatcctggagcagttcaatgccatccggctggtgcagagcgtgcaccagagcctggccgccctgagcaaggtgatccggggcaccaccctgctgagcagcgaggtgcagaagctggccagcgccctgctgaaccagaagtgccccctggcctggcagagcaagtgggagggccctgaggaccccctgcagtacctgcggggcctggtggcccgggccctggccatccagaactgggtggacaaggccgagaagcaggccctgctgtctgagaccctggacctgtctgagctgttccacccagacaccttcctgaatgccctgcggcaggagacagcccgggctgtgggccgctctgtggacagcctgaagtttgtggcctcctggaagggccgcctgcaggaggccaagctgcagatcaagatcagcggcctgctgctggagggctgcagctttgatggcaaccagctgtctgagaaccagctggacagccccagcgtgtcctctgtgctgccctgcttcatgggctggatcccccaggacctgctgtag

SEQ ID NO: 292142 - DNA, 2763 bp, Artificial Sequence
  derived and/or modified sequence
atggccaacggcaccgccgacgtgcggaagctgttcatcttcaccactacccagaactacttcggcttgatgagcgaactttgggatcagccactgctttgtaattgcctggaaattaataactttcttgacgatggcaatcagatgcttctcagagtgcaaaggtccgacgcggggatatccttttctaacaccattgaattcggcgacactaaggacaaagtcttagtgttctttaagctacggccggaagttattacagatgagaatctgcatgacaacattctcgtcagctcaatgctggagtccccaattagcagcctttaccaggccgtgaggcaggtctttgcaccaatgctcttgaaagatcaggagtggagcagaaacttcgaccctaaactccaaaaccttctctctgaattggaagccggcctaggaatcgtgctgaggagaagtgatacaaacctcaccaagctgaaatttaaggaggacgacaccagagggatactgacaccttctgatgagttccaattctggattgaacaggcccatcgcgggaacaagcagatctctaaagaaagggcaaattattttaaagagcttttcgagactatagcccgcgagttttataacttggattccctgagcctgttggaggtggtggaccttgtggagacaactcaggatgtggtggacgatgtgtggcggcagaccgaacacgatcactatcctgaatcccgcatgctgcatctactggatatcatcgggggctccttcggtcgtttcgtgcagaagaagctcgggactctgaatctttgggaggatccttactaccttgtcaaggaaagcctgaaggcaggtataagtatatgcgagcagtgggtaatagtttgcaatcatctgactgggcaagtgtggcaacgctacgttcctcacccatggaagaatgaaaagtattttcccgagacactcgataagctgggcaaaaggctggaagaggttctcgctattcgcactattcacgagaagtttctgtactttctgcccgcaagcgaggagaaaattatctgcttaacccgagtcttcgaaccatttacggggctgaatccagtacaatacaatccctacaccgagcccctctggaaggctgccgttagccagtatgagaaaatcatcgcccctgccgaacagaagattgcaggcaaactgaaaaactacattagcgagatccaagattcaccacaacagttgctgcaggcttttctgaagtacaaagaactggtgaagagacccacaattagtaaggaactgatgcttgagagggaaaccctgctagctaggctagtagactcaatcaaagactttcggctggattttgaaaaccgctgtcgaggtatcccaggggacgcatcaggtcccttatcgggaaaaaacctatctgaggtggtgaattctatagtgtgggtgcgccagctcgagttgaaagtcgatgacactattaagatcgccgaagctctgctgagcgacctgcctgggttccggtgttttcatcaaagcgctaaagacctactggaccagctcaagctgtatgaacaggagcagttcgacgactggtcacgggacatacagtccggcttgagcgatagtcgcagcggattgtgcattgaggcatccagcaggatcatggaactggatagcaatgacggactcctgaaagtgcactatagcgatcggctcgttattctcctgcgggaagttagacaactgtctgcattggggttcgtcattcccgccaaaatacagcaggtcgccaatatagcacagaaattttgcaaacaggctatcattctgaaacaggtggcccatttctacaacagcatagaccagcagatgatccaatcccagcggcctatgatgttacagtcagccctagcattcgaacagatcattaagaatagtaaagccggctccggtggtaaatcccagatcacctgggacaacccaaaggaactggagggctacatccagaagctgcagaacgcagcggaacgcctggcaaccgagaaccggaagcttcggaagtggcacaccacgttctgtgagaaggtcgtggttctcatgaacatcgacctcctgcgacagcagcagcgctggaaggatggtctgcaggagctgaggacaggccttgctacggtggaagcccagtgccctcttgcatggcaaagcaagtgggagggacctgaagaccctctgcagtacctccggggtctggtggcaagggcattggcaattcaaaattgggttgataaagccgaaaagcaggcactcctgagtgaaacactcgatctcagtgagctcttccacccagacacgttcctgaacgcgctcagacaggaaactgcacgcgccgtcggccgcagtgtggactccctgaaattcgttgcatcttggaaaggcaggcttcaagaggccaaactgcagataaagattagtggcttactgctggagggctgtagttttgatggcaaccagctgtctgagaaccagctcgattctccaagtgtaagttccgtgcttccttgtttcatggggtggatcccccaggacgcctgcggtccatactctccagatgagtgcatcagcctgcccgtgtacaccagcgccgagcgggacagggtagtgactaacatcgatgtcccctgcgggggaaaccaggatcagtggattcagtgcggcgccgccctcttcttgaaaaaccagtag

SEQ ID NO: 292143 - DNA, 1515 bp, Artificial Sequence
  derived and/or modified sequence
atgggccagggccaggccgacctggccatccagatgctgaaggagtgcgcacgaaacggtgactggttatgtctgaaaaacctgcatcttgtggtttcttggctcccagttcttgagaaagagctgaacaccttgcaacccaaagacaccttccgcttgtggttgaccgccgaagtccaccctaacttcacgccaattctcctgcagtcatctctcaagatcacgtacgaatccccaccaggcttaaagaaaaacctgatgcgcacctacgagtcttggacccctgagcagattagtaagaaagataacactcacagagctcacgctttgttttcactggcatggttccacgcagcctgtcaagagcgtcgaaattacattccacaggggtggaccaaattctacgagttttcactgtcggacttgagggcgggctataacattatcgatcggctcttcgatggcgccaaggacgtccaatgggaattcgtccatggtctcctggagaatgccatctatggaggacggatagacaattatttcgacctgcgtgtgctacagtcctacctaaagcagttcttcaacagtagcgtgatcgacgtgttcaatcaacggaacaaaaaaagcatttttccatattcggtcagcctgccgcagtcttgttctattctggactatcgagccgtcattgagaagattcctgaagatgacaagccctcatttttcggactaccagcgaatatcgcgcggagttcccagagaatgatttcaagccaggttatctcacaattaaggatcctggggcggtccattacagctggatctaaatttgaccgggagatctggtcaaacgagctctccccggtgttgaacctgtggaaaaagctcaatcagaactccaacctgattcaccaaaaagtacccccgccgaacgaccggcaagggtccccgattttgagttttataattctggagcagtttaacgccatccggctcgtgcaaagtgtccaccagtccctagccgctctgagcaaggtcattagaggtaccactctcttgagttctgaggttcaaaaacttgcttctgccctgctcaaccagaagtgcccactggcttggcagtccaagtgggagggcccagaggacccactccaataccttaggggactcgtggccagagccctggcaattcagaattgggtggataaagccgaaaagcaagctctgctaagcgaaacactagatcttagtgagctgttccaccccgacacatttctgaacgcactccgccaggagacagcccgcgcagtcgggcgctccgttgactcacttaaatttgttgcttcctggaaggggcgattacaggaggccaaactgcagatcaagatttccggcctactcctggagggatgctcattcgacggtaatcagttgtctgagaaccagctggacagccctagtgtttccagtgttctcccatgcttcatggggtggatcccacaggacctgctctag

SEQ ID NO: 292144 - DNA, 2763 bp, Artificial Sequence
  derived and/or modified sequence
atggccaacgggactgccgatgtgaggaaacttttcatctttacaacgacacaaaactattttggattgatgtcagagctgtgggaccagcctctgctatgtaactgcctagagattaacaacttcctggacgatggcaaccaaatgttactgcgcgttcagcgctctgatgcgggaattagtttttctaataccatcgaattcggtgatacaaaggacaaggttctggtgttcttcaagcttcgccctgaggtgattaccgacgagaatttacatgacaacatccttgtgagctctatgcttgagtctcctatctcatccctgtaccaggcagtcaggcaggtgttcgcccctatgctgctaaaggaccaggaatggtctagaaactttgaccctaagctccagaatctgttgagcgaattagaggccggacttgggatagttctgaggcgttccgacactaaccttacgaaactgaagttcaaagaagacgatacgaggggaattcttactccatctgatgagtttcagttttggattgaacaggcccaccggggaaacaagcagatcagcaaggagcgcgctaattacttcaaggagctgttcgaaaccattgcaagagaattttataaccttgactctttgagcctcctcgaagttgtggacctggtagagaccacccaagacgtggtagatgacgtttggcgtcagaccgaacacgaccactaccccgagtctaggatgttacatcttctcgacattataggtgggtctttcggaagattcgtgcaaaaaaagcttggaactctgaacctctgggaggacccctactacctggtaaaggaaagcctcaaagccggaatctcaatctgtgagcagtgggtgatagtgtgcaaccacttaaccggacaggtgtggcagagatacgtcccccatccctggaaaaatgagaaatacttccctgaaacgcttgataagctgggcaagaggctcgaagaggtcttggccatccgcacaattcatgaaaagtttttgtattttctgcccgcaagcgaggaaaaaattatttgcttgactagggtgtttgaacctttcaccgggttgaatcctgttcagtataacccatatacagagcctctgtggaaagcagctgtgtcacagtacgagaagataatcgctccagccgagcaaaaaatcgctgggaagttaaagaactatatctcagagatccaggacagcccacaacagttactgcaggcctttttaaaatataaggaactagttaaaagacccactatttccaaggagttgatgctagagcgagagaccctgcttgctaggctggtggatagtatcaaggactttagactggattttgaaaaccgctgcagagggattcccggtgatgcatcgggtcctctgagcggtaagaatctgtctgaggtggttaactcgattgtttgggtgcgacagctggagttgaaagtggatgataccatcaagatcgcagaggcactgctgtctgacctacccggattcaggtgtttccatcagagcgccaaagacctgctagaccagttgaagctgtacgagcaggagcagttcgacgattggagccgcgacatccagtccggactctcagattccagaagtggcctgtgtatcgaagcatcctcccgcattatggagttagactctaacgatggactgctgaaagtccattatagtgacaggctggtgattctacttcgagaagtccgacaactcagcgcactgggcttcgtgatccccgctaagatccagcaagtggcaaacatcgcgcagaagttctgcaagcaggctattattctgaagcaggtagctcatttttataatagcatcgaccagcagatgatccagagccagcggccaatgatgctgcaaagtgccctcgcttttgaacagatcataaaaaacagcaaggccggaagcggagggaagtctcaaataacttgggacaaccctaaggagctggagggatatattcagaagctgcagaacgcagccgagcggctcgccacagagaaccggaagctgcgcaagtggcacacgactttctgtgagaaagtcgtagtccttatgaacatcgatcttctgcgtcaacagcagcgctggaaggacggcctacaggaactgagaactgggctcgccacagtcgaagctcagtgccccctcgcctggcaaagcaagtgggagggtccggaggaccctctacagtacttacgcggattggtggcccgagccctggcgatccagaattgggtggacaaagctgagaaacaggctcttctatcggagaccctggacctgtctgaactgtttcatcctgacacttttttgaacgccttgaggcaagaaaccgccagagccgtggggagatccgtcgacagtctcaaattcgttgcttcctggaagggacgtctgcaggaggcaaaactacaaatcaagatttctgggctgctccttgaaggttgctcctttgacggaaatcagttaagtgagaatcagcttgatagtccaagcgtgtcctcagtgctgccctgtttcatggggtggatcccccaggatgcgtgcggaccatattcaccagacgagtgcatctcattgccagtttatacctccgcagaaagagaccgagtcgtgacaaatattgacgttccctgcggaggcaatcaagaccagtggatccagtgcggggctgccctgttcttaaaaaaccaatag

SEQ ID NO: 292145 - DNA, 1515 bp, Artificial Sequence
  derived and/or modified sequence
atgggccagggccaagccgacctggccattcagatgttgaaggaatgtgccaggaatggtgactggttatgcctcaagaacctgcacctcgtcgtttcctggctgcctgtactggagaaagaattgaataccttgcagccaaaagacaccttccggttgtggcttaccgccgaagtgcacccaaatttcacaccaatcctactgcaatccagcctgaagattacttacgaaagccctcccggtctcaagaagaatctgatgcgtacctacgaaagctggacacctgaacagatttccaaaaaagacaatacccatagagcacatgctcttttcagtcttgcttggtttcacgctgcctgtcaagagcgcagaaactatatcccccagggctggactaaattctacgagttcagccttagtgacctgagagctggatacaatattatcgacagactgtttgacggcgctaaggatgttcagtgggagttcgtacacgggctgctggagaatgcgatttacgggggtcgtattgacaactatttcgatctgagggtcctgcagtcctatcttaagcagttttttaactctagtgtaatcgatgtattcaatcaaagaaataaaaaaagcatcttcccttatagtgtcagcctgccacagtcttgcagcattttggattaccgcgcagtcatagagaagatacctgaggatgataagcctagcttctttggcctgccagccaatatcgccagatcctcccagaggatgatcagcagtcaggttatttcgcaactgaggatactcggacgctccattactgccggtagcaagttcgacagggaaatctggtctaatgagttgtccccggttttgaatctctggaagaagcttaatcaaaacagcaatctcattcaccagaaggttccgcctcctaatgaccggcaggggagccctattctctcctttatcattttggagcaatttaatgctatcagactagtacaaagcgtgcatcagagcctcgccgcactgtcaaaggtaataagaggcacaacgttgctgagctcggaagtgcaaaaactggcctcagccctcctgaatcaaaaatgtcccttggcctggcagtcaaaatgggaaggtcccgaggacccactccagtacttacgcggattggtagccagggctctggcaatccagaactgggtggataaagccgaaaaacaggctctgctgtcagagacattagacctgagcgagctcttccatcctgataccttcctgaacgctctccgccaggaaacagcccgagcagtgggcaggtccgtggattcactcaaattcgtggcaagttggaagggccgattgcaagaggctaagctgcagatcaagatctctggactcctgctggaggggtgttcattcgacggaaatcagctttctgaaaaccagcttgatagcccctccgtgagcagcgtactcccgtgtttcatgggctggattccacaggacttgctatag

SEQ ID NO: 292146 - DNA, 2763 bp, Artificial Sequence
  derived and/or modified sequence
atggccaacggcaccgccgacgtgagaaagctgttcatcttcaccaccacccagaactacttcggcctgatgagcgagctgtgggaccagcccctgctgtgcaactgcctggagatcaacaacttcctggacgacggcaaccagatgctgctgagagtgcagagaagcgacgccggcatcagcttcagcaacaccatcgagttcggcgacaccaaggacaaggtgctggtgttcttcaagctgagacccgaggtgatcaccgacgagaacctgcacgacaacatcctggtgagcagcatgctggagagccccatcagcagcctgtaccaggccgtgagacaggtgttcgcccccatgctgctgaaggaccaggagtggagcagaaacttcgaccccaagctgcagaacctgctgagcgagctggaggccggcctgggcatcgtgctgagaagaagcgacaccaacctgaccaagctgaagttcaaggaggacgacaccagaggcatcctgacccccagcgacgagttccagttctggatcgagcaggcccacagaggcaacaagcagatcagcaaggagagagccaactacttcaaggagctgttcgagaccatcgccagagagttctacaacctggacagcctgagcctgctggaggtggtggacctggtggagaccacccaggacgtggtggacgacgtgtggagacagaccgagcacgaccactaccccgagagcagaatgctgcacctgctggacatcatcggcggcagcttcggcagattcgtgcagaagaagctgggcaccctgaacctgtgggaggacccctactacctggtgaaggagagcctgaaggccggcatcagcatctgcgagcagtgggtgatcgtgtgcaaccacctgaccggccaggtgtggcagagatacgtgccccacccctggaagaacgagaagtacttccccgagaccctggacaagctgggcaagagactggaggaggtgctggccatcagaaccatccacgagaagttcctgtacttcctgcccgccagcgaggagaagatcatctgcctgaccagagtgttcgagcccttcaccggcctgaaccccgtgcagtacaacccctacaccgagcccctgtggaaggccgccgtgagccagtacgagaagatcatcgcccccgccgagcagaagatcgccggcaagctgaagaactacatcagcgagatccaggacagcccccagcagctgctgcaggccttcctgaagtacaaggagctggtgaagagacccaccatcagcaaggagctgatgctggagagagagaccctgctggccagactggtggacagcatcaaggacttcagactggacttcgagaacagatgcagaggcatccccggcgacgccagcggccccctgagcggcaagaacctgagcgaggtggtgaacagcatcgtgtgggtgagacagctggagctgaaggtggacgacaccatcaagatcgccgaggccctgctgagcgacctgcccggcttcagatgcttccaccagagcgccaaggacctgctggaccagctgaagctgtacgagcaggagcagttcgacgactggagcagagacatccagagcggcctgagcgacagcagaagcggcctgtgcatcgaggccagcagcagaatcatggagctggacagcaacgacggcctgctgaaggtgcactacagcgacagactggtgatcctgctgagagaggtgagacagctgagcgccctgggcttcgtgatccccgccaagatccagcaggtggccaacatcgcccagaagttctgcaagcaggccatcatcctgaagcaggtggcccacttctacaacagcatcgaccagcagatgatccagagccagagacccatgatgctgcagagcgccctggccttcgagcagatcatcaagaacagcaaggccggcagcggcggcaagagccagatcacctgggacaaccccaaggagctggagggctacatccagaagctgcagaacgccgccgagagactggccaccgagaacagaaagctgagaaagtggcacaccaccttctgcgagaaggtggtggtgctgatgaacatcgacctgctgagacagcagcagagatggaaggacggcctgcaggagctgagaaccggcctggccaccgtggaggcccagtgccccctggcctggcagagcaagtgggagggccccgaggaccccctgcagtacctgagaggcctggtggccagagccctggccatccagaactgggtggacaaggccgagaagcaggccctgctgagcgagaccctggacctgagcgagctgttccaccccgacaccttcctgaacgccctgagacaggagaccgccagagccgtgggcagaagcgtggacagcctgaagttcgtggccagctggaagggcagactgcaggaggccaagctgcagatcaagatcagcggcctgctgctggagggctgcagcttcgacggcaaccagctgagcgagaaccagctggacagccccagcgtgagcagcgtgctgccctgcttcatgggctggatcccccaggacgcctgcggcccctacagccccgacgagtgcatcagcctgcccgtgtacaccagcgccgagagagacagagtggtgaccaacatcgacgtgccctgcggcggcaaccaggaccagtggatccagtgcggcgccgccctgttcctgaagaaccagtag

SEQ ID NO: 292147 - DNA, 1515 bp, Artificial Sequence
  derived and/or modified sequence
atgggccagggccaggccgacctggccatccagatgctgaaggagtgcgccagaaacggcgactggctgtgcctgaagaacctgcacctggtggtgagctggctgcccgtgctggagaaggagctgaacaccctgcagcccaaggacaccttcagactgtggctgaccgccgaggtgcaccccaacttcacccccatcctgctgcagagcagcctgaagatcacctacgagagcccccccggcctgaagaagaacctgatgagaacctacgagagctggacccccgagcagatcagcaagaaggacaacacccacagagcccacgccctgttcagcctggcctggttccacgccgcctgccaggagagaagaaactacatcccccagggctggaccaagttctacgagttcagcctgagcgacctgagagccggctacaacatcatcgacagactgttcgacggcgccaaggacgtgcagtgggagttcgtgcacggcctgctggagaacgccatctacggcggcagaatcgacaactacttcgacctgagagtgctgcagagctacctgaagcagttcttcaacagcagcgtgatcgacgtgttcaaccagagaaacaagaagagcatcttcccctacagcgtgagcctgccccagagctgcagcatcctggactacagagccgtgatcgagaagatccccgaggacgacaagcccagcttcttcggcctgcccgccaacatcgccagaagcagccagagaatgatcagcagccaggtgatcagccagctgagaatcctgggcagaagcatcaccgccggcagcaagttcgacagagagatctggagcaacgagctgagccccgtgctgaacctgtggaagaagctgaaccagaacagcaacctgatccaccagaaggtgcccccccccaacgacagacagggcagccccatcctgagcttcatcatcctggagcagttcaacgccatcagactggtgcagagcgtgcaccagagcctggccgccctgagcaaggtgatcagaggcaccaccctgctgagcagcgaggtgcagaagctggccagcgccctgctgaaccagaagtgccccctggcctggcagagcaagtgggagggccccgaggaccccctgcagtacctgagaggcctggtggccagagccctggccatccagaactgggtggacaaggccgagaagcaggccctgctgagcgagaccctggacctgagcgagctgttccaccccgacaccttcctgaacgccctgagacaggagaccgccagagccgtgggcagaagcgtggacagcctgaagttcgtggccagctggaagggcagactgcaggaggccaagctgcagatcaagatcagcggcctgctgctggagggctgcagcttcgacggcaaccagctgagcgagaaccagctggacagccccagcgtgagcagcgtgctgccctgcttcatgggctggatcccccaggacctgctgtag

SEQ ID NO: 292148 - DNA, 2984 bp, Artificial Sequence
  derived and/or modified sequence
ctggtttcttcttccttcccccttcccccaacttccctccaccccttccaatcatggcgaacgggactgcggacgttcggaagctcttcatcttcactactacccagaattacttcgggttgatgtctgaactctgggatcagccactgttgtgcaactgtcttgaaatcaacaacttcttggatgacggcaaccagatgctcctcagggtgcagcgatccgacgcaggaatctccttttccaacacgattgagtttggtgacacaaaagataaagtgctggtgtttttcaagctgcgacctgaagtaattactgatgagaatctacatgataacattcttgtttcatctatgttagagtcacctattagttctctttaccaagcagtacggcaagtattcgcaccaatgttgttaaaggatcaggaatggagcagaaactttgatcccaaacttcagaatcttttgagtgaactagaagctgggttgggtatagttctacgaagatcagacactaacttaacaaaattgaaatttaaggaagatgacacacgaggtatccttacaccaagcgatgagttccagttttggatagaacaagctcaccgtggaaataaacagattagtaaagaaagagccaattattttaaagaattatttgaaacaattgcaagagagttttataacttggacagtctatccttactagaagttgttgacttggtggagactactcaggatgttgtagatgatgtgtggagacaaacagaacatgatcattatcctgagtcacgaatgttgcatctcttagacatcataggtggttcatttggaaggtttgttcagaaaaagttgggaactttgaacctgtgggaagatccttattatcttgtgaaagaaagtctgaaagctggtatttcaatttgtgaacagtgggtgatagtctgtaatcatctaacaggtcaggtgtggcagcgctatgttcctcatccatggaaaaatgaaaaatattttccagaaacacttgacaaacttggcaaacgccttgaagaggtcttggctattagaacaattcatgagaagtttctctattttctacctgccagtgaagagaaaatcatatgcctcactcgagtatttgaaccttttactggcctgaatcctgtgcaatataatccatatactgagcccttgtggaaagctgcggtgtctcaatatgaaaagattattgcacctgcggaacaaaaaatagcaggaaaattgaaaaattatatttcagaaattcaagacagtccacagcagcttcttcaagcattcctgaaatataaagagttggtaaagcgtccaactataagcaaagaattgatgttagaaagagaaactttactggcaagacttgtggactcaattaaagattttcgattagactttgagaatcggtgccgaggaattcctggtgatgcatctggaccactttctggcaaaaatctttcagaagttgtcaacagtatagtttgggttcgccagttggaattgaaggtagatgatactatcaagattgcagaggctcttttatctgacttgccaggatttcgatgtttccatcaaagtgccaaagatctcttagaccagcttaaactatatgaacaggaacaatttgatgattggtccagggatattcaatcaggtttatctgattccagatctggtttgtgtattgaggctagtagtcgaattatggaattggattctaatgatggattactaaaagtgcattattcagatcgtttggtgattcttctgagagaagttcgtcagctctctgcacttggctttgttattcctgccaaaatacagcaagttgcaaacattgcacagaaattctgcaagcaagcaattattcttaaacaagtggcacatttttataattctattgatcaacaaatgattcaaagtcagaggccaatgatgttacaatctgccttagcatttgaacagataattaagaattcaaaagcaggaagtggagggaaatcacagataacttgggataatcctaaagaattagaaggctatatccaaaaactccaaaatgctgctgaacggcttgccactgaaaatagaaaactgagaaaatggcacactacattttgtgaaaaggtggttgttcttatgaatattgatctgcttcggcagcaacagcgctggaaagatggattacaagaattgagaactggcttagcaactgtagaagcacagtgtcctctcgcatggcagagcaagtgggaaggcccagaagatcccttacaatacctgagaggtcttgttgcccgtgcccttgcaatacagaactgggtagataaagctgaaaaacaggctcttctctctgaaacacttgacctatcagaacttttccatccagacacatttcttaatgctcttcgccaggaaactgcaagggcagtgggtcgttctgtggatagccttaaatttgtagcctcatggaaaggtcgactgcaagaagcaaagctacaaattaagatcagtggcttgttactagaaggatgtagttttgatggaaatcaactttctgaaaatcagcttgattctcccagcgtgtcatcagtgctcccttgttttatgggctggattccacaggatgcatgtggtccatattctccggatgagtgcatctctttgcctgtttacacaagtgctgaaagggatcgtgtggttaccaatattgatgttccatgtgggggcaaccaagaccagtggattcagtgtggagcagctctattcctaaaaaatcagtagaatctaatgacaacaaaagccatcttcacaaaagggaacattgattctttaagctttaaatcaaacatgtggtcagtctacatttgaaatgttagttcaaaatattaacatatagttatgttgttgatgtcactgaaattttaatgtgtaaaagcagcactgtgcatc

SEQ ID NO: 292149 - DNA, 3305 bp, Artificial Sequence
  derived and/or modified sequence
ggttaaaaacacatttgaaagactcacgtttagaagttatcaatcagcaggatagtaactttatcacagctcttgaattagcagtacgttttgggaaaacccttattatacaagagatggatggtgtagaacctgttctttatccattattgagacgagatctggttgctcaaggaccacgttatgtggtacaaataggtgacaaaattattgactacaatgaagaattccgcctctttttgtcaacaagaaacccaaatccttttattccaccggatgcagcttccattgttactgaggttaactttactacaacaagaagtggattacgagggcagcttttagctttaaccattcagcatgagaaacctgatttagaagaacagaaaacaaaactattacaacaggaagaagataagaaaatacagctagccaagctcgaagaatctcttctagagacacttgccacatctcaaggcaatattttggaaaataaggatttgattgagtctttgaatcagacaaaagcaagcagtgcacttattcaagagtcacttaaagaatcttacaaactccaaatttcccttgatcaagaacgggatgcctatctccccctggctgagagtgccagcaagatgtacttcattatttctgatttgtccaaaattaataacatgtaccgttttagtttggctgcttttctccgacttttccaacgagctctacaaaacaaacaggattctgaaaatacagaacagagaatccagtcacttatcagctcattacaacatatggtatatgaatatatatgtcgttgtctatttaaggctgatcagttgatgttcgctttgcattttgttcgaggcatgcatcctgaactttttcaagaaaatgaatgggatacgtttacaggtgtggttgttggagacatgttacggaaagctgactctcaacaaaaaatacgtgatcagcttccgtcttggatagatcaggaacgaagctgggccgtggcaacattaaagattgctctccccagtctttatcagaccctctgctttgaagatgcagctctgtggcgtacttattataataattcaatgtgtgagcaagagtttccatctatccttgcaaagaaagtttccttatttcagcagattcttgtagtacaggcgctaagaccggacagattgcaaagtgccatggctctttttgcatgtaaaactctgggactgaaagaggtgtccccactgcctctaaatctcaaacgtttatacaaagagacactggaaattgaacccatcttgataattatttctccgggtgctgatccttctcaggaacttcaagaactagctaatgctgaaagaagcggagagtgttatcaccaggttgccatgggtcaaggtcaagctgatttagcaattcaaatgctaaaagaatgtgcccgcaatggagactggctctgtttgaagaacttacatcttgtggtatcttggctgccagttctggaaaaggaattgaatactcttcaacctaaagatacctttcgtctttggctcactgcagaagttcatcccaactttactcctattttactacagtcaagtctgaagataacatatgagtcacctccaggtttaaagaagaatttaatgcgtacttatgagtcttggactcctgagcaaattagcaaaaaagataatacacatcgagctcatgctctcttcagtcttgcatggtttcatgctgcatgtcaagaaagaagaaactatattcctcagggttggacaaagttttatgaattttctttatcagatcttcgggctgggtacaacattattgacagactttttgatggtgccaaagatgtacaatgggaatttgtacatggtttacttgaaaatgctatttatggaggacgtatagacaactattttgaccttagagttcttcagtcatacctgaagcagttttttaattcttcagttattgatgtattcaaccaaaggaacaagaaaagcatttttccatattccgtatctctaccacaatcctgcagcattttggactatcgtgctgtcattgagaaaattccagaggacgacaaacctagtttctttggtctgcctgccaatatcgctcgctcatctcagcgcatgatcagttctcaggttatttcacagttgaggattttgggcagatccataacagctggttccaaatttgatagagaaatctggtctaatgaactttctcctgtcctcaatctctggaagaaactaaaccagaattcaaacctaatacatcagaaagtgcctcctcctaacgatcgacaaggatctccaatactgtcattcatcattcttgaacaatttaatgctattcgtttagtacaaagtgtccaccagtctcttgctgctctcagcaaagtcatcagaggaactactttactgagttcagaagtacaaaaattggcaagtgctttattaaaccaaaagtgtcctctcgcatggcagagcaagtgggaaggcccagaagatcccttacaatacctgagaggtcttgttgcccgtgcccttgcaatacagaactgggtagataaagctgaaaaacaggctcttctctctgaaacacttgacctatcagaacttttccatccagacacatttcttaatgctcttcgccaggaaactgcaagggcagtgggtcgttctgtggatagccttaaatttgtagcctcatggaaaggtcgactgcaagaagcaaagctacaaattaagatcagtggcttgttactagaaggatgtagttttgatggaaatcaactttctgaaaatcagcttgattctcccagcgtgtcatcagtgctcccttgttttatgggctggattccacaggacttattatgaaagtaatgatgttatcactatattgttgaaaaatcaggatgcatgtggtccatattctccggatgagtgcatctctttgcctgtttacacaagtgctgaaagggatcgtgtggttaccaatattgatgttccatgtgggggcaaccaagaccagtggattcagtgtggagcagctctattcctaaaaaatcagtagaatctaatgacaacaaaagccatcttcacaaaagggaacattgattctttaagctttaaatcaaacatgtggtcagtctacatttgaaatgttagttcaaaatattaacatatagttatgttgttgatgtcactgaaattttaatgtgtaaaagcagcactgtgcatcttttaaagtaataaattaatggagttattgtt

SEQ ID NO: 292150 - protein, 92 aa, Artificial Sequence
  derived and/or modified sequence
MPKGRQKVPHLDAPLGLPTCLWLELAGLFLLVPWVMGLAGTGGPDGQGTGGPSWAVHLESLEGDGEEETLEQQADALAQAAGLVNAGRIGEL

SEQ ID NO: 292151 - protein, 237 aa, Artificial Sequence
  derived and/or modified sequence
MPFYAEECASMLAVTFSGGDKMLRSIVTTDWDLQKGTGCTEGHTGTSAAAPLAAGMIALMLQVRPCLTWRDVQHIIVFTATRYEDRRAEWVTNEAGFSHSHQHGFGLLNAWRLVNAAKIWTSVPYLASYVSPVLKENKAIPQSPRSLEVLWNVSRMDLEMSGLKTLEHVAVTVSITHPRRGSLELKLFCPSGMMSLIGAPRSMDSDPNGFNDWTFSTVRCWGERARGTYRLVIRDVG

SEQ ID NO: 292152 - protein, 591 aa, Artificial Sequence
  derived and/or modified sequence
MPKGRQKVPHLDAPLGLPTCLWLELAGLFLLVPWVMGLAGTGGPDGQGTGGPSWAVHLESLEGDGEEETLEQQADALAQAAGLVNAGRIGELQGHYLFVQPAGHRPALEVEAIRQQVEAVLAGHEAVRWHSEQRLLRRAKRSVHFNDPKYPQQWHLNNRRSPGRDINVTGVWERNVTGRGVTVVVVDDGVEHTIQDIAPNYSPEGSYDLNSNDPDPMPHPDVENGNHHGTRCAGEIAAVPNNSFCAVGVAYGSRIAGIRVLDGPLTDSMEAVAFNKHYQINDIYSCSWGPDDDGKTVDGPHQLGKAALQHGVIAGRQGFGSIFVVASGNGGQHNDNCNYDGYANSIYTVTIGAVDEEGRMPFYAEECASMLAVTFSGGDKMLRSIVTTDWDLQKGTGCTEGHTGTSAAAPLAAGMIALMLQVRPCLTWRDVQHIIVFTATRYEDRRAEWVTNEAGFSHSHQHGFGLLNAWRLVNAAKIWTSVPYLASYVSPVLKENKAIPQSPRSLEVLWNVSRMDLEMSGLKTLEHVAVTVSITHPRRGSLELKLFCPSGMMSLIGAPRSMDSWLCVECSRHQGQTKAVRECHEWKIPAR

SEQ ID NO: 292153 - DNA, 714 bp, Artificial Sequence
  derived and/or modified sequence
atgcccttctacgccgaggagtgcgccagcatgctggccgtgaccttcagcggcggcgacaagatgctgagaagcatcgtgaccaccgactgggacctgcagaagggcaccggctgcaccgagggccacaccggcaccagcgccgccgcccccctggccgccggcatgatcgccctgatgctgcaggtgagaccctgcctgacctggagagacgtgcagcacatcatcgtgttcaccgccaccagatacgaggacagaagagccgagtgggtgaccaacgaggccggcttcagccacagccaccagcacggcttcggcctgctgaacgcctggagactggtgaacgccgccaagatctggaccagcgtgccctacctggccagctacgtgagccccgtgctgaaggagaacaaggccatcccccagagccccagaagcctggaggtgctgtggaacgtgagcagaatggacctggagatgagcggcctgaagaccctggagcacgtggccgtgaccgtgagcatcacccaccccagaagaggcagcctggagctgaagctgttctgccccagcggcatgatgagcctgatcggcgcccccagaagcatggacagcgaccccaacggcttcaacgactggaccttcagcaccgtgagatgctggggcgagagagccagaggcacctacagactggtgatcagagacgtgggctag

SEQ ID NO: 292154 - DNA, 714 bp, Artificial Sequence
  derived and/or modified sequence
atgcccttctacgccgaagagtgtgcttcaatgctggccgtcacgttcagcggcggcgataaaatgttaaggtctatcgtgacgacagattgggatctccagaagggaaccgggtgtacagaaggacacacagggacatctgctgctgcaccgctggctgcgggcatgatcgcactaatgctgcaggtgcggccttgtctaacatggcgagatgtccaacacatcatcgttttcactgccacccgctacgaggacaggcgcgccgagtgggtgacaaatgaggctggcttttcgcactcgcatcaacatggatttggcctgcttaacgcgtggcgtctggtcaatgccgccaagatatggacctccgttccctacctcgcttcatacgtaagccccgtcttgaaagaaaataaagccatcccacagtcccctagaagcttggaggtgctctggaatgtcagccgcatggatctcgaaatgtcagggttaaagacattggagcatgtcgccgtcactgtgagcatcactcatccgcgacgcggtagtctggaattgaagctcttttgtccatcaggaatgatgagtctgattggggccccccggagcatggactcggatcctaatggtttcaatgattggaccttcagcactgtgcggtgttggggcgaacgggcccgtggcacctatcgcttagtgattagagatgtaggctag

SEQ ID NO: 292155 - DNA, 714 bp, Artificial Sequence
  derived and/or modified sequence
atgcccttctatgcagaagaatgtgcctccatgctggccgtgaccttctctggaggagacaagatgctgcggagcatcgtgaccacagactgggacctgcagaagggcaccggctgcacagagggccacacaggcaccagcgctgctgcccccctggccgccggcatgattgccctgatgctgcaggtgcggccctgcctgacctggagagatgtgcagcacatcatcgtgttcaccgccaccaggtatgaggaccggcgggcagagtgggtgaccaatgaagctggcttcagccacagccaccagcacggcttcggcctgctgaatgcctggaggctggtgaatgctgccaagatctggacctctgtgccctacctggccagctatgtgtcccctgtgctgaaggagaacaaggccatcccccagagccccaggagcctggaggtgctgtggaatgtgtccaggatggacctggagatgagcggcctgaagaccctggagcacgtggccgtgacagtgtccatcacccacccccggcggggcagcctggagctgaagctgttctgccccagcggcatgatgagcctgattggagcccccaggtccatggacagcgaccccaacggcttcaatgactggaccttcagcacagtgcgctgctggggcgagcgggcccggggcacctaccgcctggtgatcagagatgtgggctag

SEQ ID NO: 292156 - DNA, 714 bp, Artificial Sequence
  derived and/or modified sequence
atgcccttctacgccgaggagtgcgccagcatgctggccgtgaccttttccggaggggacaaaatgctaagaagcatcgtgacaacagactgggacctgcagaaggggactggatgtacggaggggcacactggcacaagcgcagccgctccgcttgcagcggggatgatagccctaatgctgcaggtacggccctgtctcacctggcgcgatgtgcagcacatcatcgtattcaccgccacacggtacgaagatcgtagggctgaatgggtgacaaacgaagccgggtttagtcatagccaccagcatggcttcggtctgctgaacgcttggcggctggtgaatgctgccaagatctggactagtgtgccctatctagcaagttatgtctccccagtactaaaggaaaacaaggccatcccgcagtctccccgctctctggaggttctgtggaatgttagccgcatggatcttgagatgtctggactaaaaacattggagcacgtggcagtcactgtctctataacccacccgcgccgaggatcactcgaactaaagctgttctgcccaagcggtatgatgtccctcatcggcgcccccaggtctatggacagtgatcctaacggcttcaacgactggactttctctacagtccggtgctggggcgaacgggctcgtggaacttatagacttgttatcagagacgtgggatag

SEQ ID NO: 292157 - DNA, 714 bp, Artificial Sequence
  derived and/or modified sequence
atgcctttctatgcggaggagtgtgcgtccatgctggccgtgactttcagcggaggagacaagatgctgcgctcaatcgtgacaactgactgggatctacagaagggtaccggctgcaccgaagggcacaccggaacaagcgccgcagcgccactggctgctggtatgatagcactgatgttgcaggtacgcccatgcctaacatggcgggacgtccagcacataatcgtgtttaccgcgacccggtatgaggatcggcgagctgaatgggtcacaaacgaagctgggttcagtcacagccaccagcacgggtttggcctgctaaacgcttggcgactggtgaacgctgctaaaatttggacaagtgtgccgtacctggcgtcctacgttagccccgtgttgaaagagaataaggccattccgcagagcccgcgatccctggaggtcttatggaatgtatcaaggatggacctagagatgtctggtctaaagacactagagcatgtggcagtaactgtgagcatcacccaccctagacggggatccctcgagctgaaattgttctgtcccagtggcatgatgtctctgatcggcgctccccgtagcatggactcagacccaaacggcttcaacgactggaccttctcgaccgtaaggtgttggggcgagagagctcggggtacctatcggctggtcatcagagacgttgggtag

SEQ ID NO: 292158 - DNA, 1201 bp, Artificial Sequence
  derived and/or modified sequence
tgatcgccaagtcggaacaggaaatcggaaaggctactgcaaagtacttcttctactcaaacatcatgaacttcttcaaaacggagatcacgctcgcgaacggcgaaatccggaaaaggccgctcattgaaaccaacggagaaaccggggagatcgtgtgggacaagggaagggattttgcgactgtgaggaaggtgttgtccatgccgcaagtcaatattgtgaaaaagacggaagtgcaaaccggaggattcagcaaagaatccatcctcccaaagcgcaactcggacaaactcatcgcgcgcaagaaggattgggaccccaagaaatacggtggctttgacagccctactgtggcttactccgtcctcgtcgtggctaaagtggaaaagggtaaatccaaaaagctcaaatcggtgaaggagctcctgggaatcacgatcatggagcggtcgagcttcgaaaagaatcctattgatttcctggaggcgaagggctacaaggaagtcaagaaagacctgatcatcaagctcccgaagtacagcctcttcgagctcgaaaacggcagaaagaggatgctggcatcagcgggagaattgcagaagggaaacgaactggcactgccgtccaagtacgtgaattttctctatctggctagccactacgaaaagctgaagggatcgcccgaggacaacgagcaaaaacaactgttcgtggagcagcacaagcactacctggatgagatcatcgagcagatctccgaattctcgaaacgcgtgatccttgccgatgccaatctggataaagtgttgtcggcttacaacaagcatcgggataaaccgatccgcgaacaggcagaaaacatcattcatctgttcactttgaccaatctgggagcgcctgccgcgtttaagtacttcgacaccactattgatagaaagcgctacacctcgaccaaggaagtgctggacgctaccctgatccaccagtccatcaccggactctacgaaactcgcattgacctgtcccagcttggaggagattcacgggccgatccaaagaaaaagcgcaaggtctgataataggctggagcctcggtggccatgcttcttgccccttgggcctccccccagcccctcctccccttcctgcacccgtacccccgtggtctttgaataaagtctgagtgggcggctctaga

SEQ ID NO: 292159 - RNA, 1201 nt, Artificial Sequence
  derived and/or modified sequence
ugaucgccaagucggaacaggaaaucggaaaggcuacugcaaaguacuucuucuacucaaacaucaugaacuucuucaaaacggagaucacgcucgcgaacggcgaaauccggaaaaggccgcucauugaaaccaacggagaaaccggggagaucgugugggacaagggaagggauuuugcgacugugaggaagguguuguccaugccgcaagucaauauugugaaaaagacggaagugcaaaccggaggauucagcaaagaauccauccucccaaagcgcaacucggacaaacucaucgcgcgcaagaaggauugggaccccaagaaauacgguggcuuugacagcccuacuguggcuuacuccguccucgucguggcuaaaguggaaaaggguaaauccaaaaagcucaaaucggugaaggagcuccugggaaucacgaucauggagcggucgagcuucgaaaagaauccuauugauuuccuggaggcgaagggcuacaaggaagucaagaaagaccugaucaucaagcucccgaaguacagccucuucgagcucgaaaacggcagaaagaggaugcuggcaucagcgggagaauugcagaagggaaacgaacuggcacugccguccaaguacgugaauuuucucuaucuggcuagccacuacgaaaagcugaagggaucgcccgaggacaacgagcaaaaacaacuguucguggagcagcacaagcacuaccuggaugagaucaucgagcagaucuccgaauucucgaaacgcgugauccuugccgaugccaaucuggauaaaguguugucggcuuacaacaagcaucgggauaaaccgauccgcgaacaggcagaaaacaucauucaucuguucacuuugaccaaucugggagcgccugccgcguuuaaguacuucgacaccacuauugauagaaagcgcuacaccucgaccaaggaagugcuggacgcuacccugauccaccaguccaucaccggacucuacgaaacucgcauugaccugucccagcuuggaggagauucacgggccgauccaaagaaaaagcgcaaggucugauaauaggcuggagccucgguggccaugcuucuugccccuugggccuccccccagccccuccuccccuuccugcacccguacccccguggucuuugaauaaagucugagugggcggcucuaga

SEQ ID NO: 292160 - protein, 1940 aa, Artificial Sequence
  derived and/or modified sequence
MASGLGSPSPCSAGSEEEDMDALLNNSLPPPHPENEEDPEEDLSETETPKLKKKKKPKKPRDPKIPKSKRQKKERMLLCRQLGDSSGEGPEFVEEEEEVALRSDSEGSDYTPGKKKKKKLGPKKEKKSKSKRKEEEEEEDDDDDSKEPKSSAQLLEDWGMEDIDHVFSEEDYRTLTNYKAFSQFVRPLIAAKNPKIAVSKMMMVLGAKWREFSTNNPFKGSSGASVAAAAAAAVAVVESMVTATEVAPPPPPVEVPIRKAKTKEGKGPNARRKPKGSPRVPDAKKPKPKKVAPLKIKLGGFGSKRKRSSSEDDDLDVESDFDDASINSYSVSDGSTSRSSRSRKKLRTTKKKKKGEEEVTAVDGYETDHQDYCEVCQQGGEIILCDTCPRAYHMVCLDPDMEKAPEGKWSCPHCEKEGIQWEAKEDNSEGEEILEEVGGDLEEEDDHHMEFCRVCKDGGELLCCDTCPSSYHIHCLNPPLPEIPNGEWLCPRCTCPALKGKVQKILIWKWGQPPSPTPVPRPPDADPNTPSPKPLEGRPERQFFVKWQGMSYWHCSWVSELQLELHCQVMFRNYQRKNDMDEPPSGDFGGDEEKSRKRKNKDPKFAEMEERFYRYGIKPEWMMIHRILNHSVDKKGHVHYLIKWRDLPYDQASWESEDVEIQDYDLFKQSYWNHRELMRGEEGRPGKKLKKVKLRKLERPPETPTVDPTVKYERQPEYLDATGGTLHPYQMEGLNWLRFSWAQGTDTILADEMGLGKTVQTAVFLYSLYKEGHSKGPFLVSAPLSTIINWEREFEMWAPDMYVVTYVGDKDSRAIIRENEFSFEDNAIRGGKKASRMKKEASVKFHVLLTSYELITIDMAILGSIDWACLIVDEAHRLKNNQSKFFRVLNGYSLQHKLLLTGTPLQNNLEELFHLLNFLTPERFHNLEGFLEEFADIAKEDQIKKLHDMLGPHMLRRLKADVFKNMPSKTELIVRVELSPMQKKYYKYILTRNFEALNARGGGNQVSLLNVVMDLKKCCNHPYLFPVAAMEAPKMPNGMYDGSALIRASGKLLLLQKMLKNLKEGGHRVLIFSQMTKMLDLLEDFLEHEGYKYERIDGGITGNMRQEAIDRFNAPGAQQFCFLLSTRAGGLGINLATADTVIIYDSDWNPHNDIQAFSRAHRIGQNKKVMIYRFVTRASVEERITQVAKKKMMLTHLVVRPGLGSKTGSMSKQELDDILKFGTEELFKDEATDGGGDNKEGEDSSVIHYDDKAIERLLDRNQDETEDTELQGMNEYLSSFKVAQYVVREEEMGEEEEVEREIIKQEESVDPDYWEKLLRHHYEQQQEDLARNLGKGKRIRKQVNYNDGSQEDRGVCGRPRPPPMGRSTRAVGPAHLPSLPPDWQDDQSDNQSDYSVASEEGDEDFDERSEAPRRPSRKGLRNDKDKPLPPLLARVGGNIEVLGFNARQRKAFLNAIMRYGMPPQDAFTTQWLVRDLRGKSEKEFKAYVSLFMRHLCEPGADGAETFADGVPREGLSRQHVLTRIGVMSLIRKKVQEFEHVNGRWSMPELAEVEENKKMSQPGSPSPKTPTPSTPGDTQPNTPAPVPPAEDGIKIEENSLKEEESIEGEKEVKSTAPETAIECTQAPAPASEDEKVVVEPPEGEEKVEKAEVKERTEEPMETEPKGAADVEKVEEKSAIDLTPIVVEDKEEKKEEEEKKEVMLQNGETPKDLNDEKQKKNIKQRFMFNIADGGFTELHSLWQNEERAATVTKKTYEIWHRRHDYWLLAGIINHGYARWQDIQNDPRYAILNEPFKGEMNRGNFLEIKNKFLARRFKLLEQALVIEEQLRRAAYLNMSEDPSHPSMALNTRFAEVECLAESHQHLSKESMAGNKPANAVLHKVLKQLEELLSDMKADVTRLPATIARIPPVAVRLQMSERNILSRLANRAPEPTPQQVAQQQ

SEQ ID NO: 292161 - protein, 1937 aa, Artificial Sequence
  derived and/or modified sequence
MASGLGSPSPCSAGSEEEDMDALLNNSLPPPHPEDPEEDLSETETPKLKKKKKPKKPRDPKIPKSKRQKKERMLLCRQLGDSSGEGPEFVEEEEEVALRSDSEGSDYTPGKKKKKKLGPKKEKKSKSKRKEEEEEEDDDDDSKEPKSSAQLLEDWGMEDIDHVFSEEDYRTLTNYKAFSQFVRPLIAAKNPKIAVSKMMMVLGAKWREFSTNNPFKGSSGASVAAAAAAAVAVVESMVTATEVAPPPPPVEVPIRKAKTKEGKGPNARRKPKGSPRVPDAKKPKPKKVAPLKIKLGGFGSKRKRSSSEDDDLDVESDFDDASINSYSVSDGSTSRSSRSRKKLRTTKKKKKGEEEVTAVDGYETDHQDYCEVCQQGGEIILCDTCPRAYHMVCLDPDMEKAPEGKWSCPHCEKEGIQWEAKEDNSEGEEILEEVGGDLEEEDDHHMEFCRVCKDGGELLCCDTCPSSYHIHCLNPPLPEIPNGEWLCPRCTCPALKGKVQKILIWKWGQPPSPTPVPRPPDADPNTPSPKPLEGRPERQFFVKWQGMSYWHCSWVSELQLELHCQVMFRNYQRKNDMDEPPSGDFGGDEEKSRKRKNKDPKFAEMEERFYRYGIKPEWMMIHRILNHSVDKKGHVHYLIKWRDLPYDQASWESEDVEIQDYDLFKQSYWNHRELMRGEEGRPGKKLKKVKLRKLERPPETPTVDPTVKYERQPEYLDATGGTLHPYQMEGLNWLRFSWAQGTDTILADEMGLGKTVQTAVFLYSLYKEGHSKGPFLVSAPLSTIINWEREFEMWAPDMYVVTYVGDKDSRAIIRENEFSFEDNAIRGGKKASRMKKEASVKFHVLLTSYELITIDMAILGSIDWACLIVDEAHRLKNNQSKFFRVLNGYSLQHKLLLTGTPLQNNLEELFHLLNFLTPERFHNLEGFLEEFADIAKEDQIKKLHDMLGPHMLRRLKADVFKNMPSKTELIVRVELSPMQKKYYKYILTRNFEALNARGGGNQVSLLNVVMDLKKCCNHPYLFPVAAMEAPKMPNGMYDGSALIRASGKLLLLQKMLKNLKEGGHRVLIFSQMTKMLDLLEDFLEHEGYKYERIDGGITGNMRQEAIDRFNAPGAQQFCFLLSTRAGGLGINLATADTVIIYDSDWNPHNDIQAFSRAHRIGQNKKVMIYRFVTRASVEERITQVAKKKMMLTHLVVRPGLGSKTGSMSKQELDDILKFGTEELFKDEATDGGGDNKEGEDSSVIHYDDKAIERLLDRNQDETEDTELQGMNEYLSSFKVAQYVVREEEMGEEEEVEREIIKQEESVDPDYWEKLLRHHYEQQQEDLARNLGKGKRIRKQVNYNDGSQEDRGVCGRPRPPPMGRSTRAVGPAHLPSLPPDWQDDQSDNQSDYSVASEEGDEDFDERSEAPRRPSRKGLRNDKDKPLPPLLARVGGNIEVLGFNARQRKAFLNAIMRYGMPPQDAFTTQWLVRDLRGKSEKEFKAYVSLFMRHLCEPGADGAETFADGVPREGLSRQHVLTRIGVMSLIRKKVQEFEHVNGRWSMPELAEVEENKKMSQPGSPSPKTPTPSTPGDTQPNTPAPVPPAEDGIKIEENSLKEEESIEGEKEVKSTAPETAIECTQAPAPASEDEKVVVEPPEGEEKVEKAEVKERTEEPMETEPKGAADVEKVEEKSAIDLTPIVVEDKEEKKEEEEKKEVMLQNGETPKDLNDEKQKKNIKQRFMFNIADGGFTELHSLWQNEERAATVTKKTYEIWHRRHDYWLLAGIINHGYARWQDIQNDPRYAILNEPFKGEMNRGNFLEIKNKFLARRFKLLEQALVIEEQLRRAAYLNMSEDPSHPSMALNTRFAEVECLAESHQHLSKESMAGNKPANAVLHKVLKQLEELLSDMKADVTRLPATIARIPPVAVRLQMSERNILSRLANRAPEPTPQQVAQQQ

SEQ ID NO: 292162 - DNA, 5823 bp, Artificial Sequence
  derived and/or modified sequence
atggccagcggcctgggcagccccagcccctgcagcgccggcagcgaggaggaggacatggacgccctgctgaacaacagcctgccccccccccaccccgagaacgaggaggaccccgaggaggacctgagcgagaccgagacccccaagctgaagaagaagaagaagcccaagaagcccagagaccccaagatccccaagagcaagagacagaagaaggagagaatgctgctgtgcagacagctgggcgacagcagcggcgagggccccgagttcgtggaggaggaggaggaggtggccctgagaagcgacagcgagggcagcgactacacccccggcaagaagaagaagaagaagctgggccccaagaaggagaagaagagcaagagcaagagaaaggaggaggaggaggaggaggacgacgacgacgacagcaaggagcccaagagcagcgcccagctgctggaggactggggcatggaggacatcgaccacgtgttcagcgaggaggactacagaaccctgaccaactacaaggccttcagccagttcgtgagacccctgatcgccgccaagaaccccaagatcgccgtgagcaagatgatgatggtgctgggcgccaagtggagagagttcagcaccaacaaccccttcaagggcagcagcggcgccagcgtggccgccgccgccgccgccgccgtggccgtggtggagagcatggtgaccgccaccgaggtggcccccccccccccccccgtggaggtgcccatcagaaaggccaagaccaaggagggcaagggccccaacgccagaagaaagcccaagggcagccccagagtgcccgacgccaagaagcccaagcccaagaaggtggcccccctgaagatcaagctgggcggcttcggcagcaagagaaagagaagcagcagcgaggacgacgacctggacgtggagagcgacttcgacgacgccagcatcaacagctacagcgtgagcgacggcagcaccagcagaagcagcagaagcagaaagaagctgagaaccaccaagaagaagaagaagggcgaggaggaggtgaccgccgtggacggctacgagaccgaccaccaggactactgcgaggtgtgccagcagggcggcgagatcatcctgtgcgacacctgccccagagcctaccacatggtgtgcctggaccccgacatggagaaggcccccgagggcaagtggagctgcccccactgcgagaaggagggcatccagtgggaggccaaggaggacaacagcgagggcgaggagatcctggaggaggtgggcggcgacctggaggaggaggacgaccaccacatggagttctgcagagtgtgcaaggacggcggcgagctgctgtgctgcgacacctgccccagcagctaccacatccactgcctgaacccccccctgcccgagatccccaacggcgagtggctgtgccccagatgcacctgccccgccctgaagggcaaggtgcagaagatcctgatctggaagtggggccagccccccagccccacccccgtgcccagaccccccgacgccgaccccaacacccccagccccaagcccctggagggcagacccgagagacagttcttcgtgaagtggcagggcatgagctactggcactgcagctgggtgagcgagctgcagctggagctgcactgccaggtgatgttcagaaactaccagagaaagaacgacatggacgagccccccagcggcgacttcggcggcgacgaggagaagagcagaaagagaaagaacaaggaccccaagttcgccgagatggaggagagattctacagatacggcatcaagcccgagtggatgatgatccacagaatcctgaaccacagcgtggacaagaagggccacgtgcactacctgatcaagtggagagacctgccctacgaccaggccagctgggagagcgaggacgtggagatccaggactacgacctgttcaagcagagctactggaaccacagagagctgatgagaggcgaggagggcagacccggcaagaagctgaagaaggtgaagctgagaaagctggagagaccccccgagacccccaccgtggaccccaccgtgaagtacgagagacagcccgagtacctggacgccaccggcggcaccctgcacccctaccagatggagggcctgaactggctgagattcagctgggcccagggcaccgacaccatcctggccgacgagatgggcctgggcaagaccgtgcagaccgccgtgttcctgtacagcctgtacaaggagggccacagcaagggccccttcctggtgagcgcccccctgagcaccatcatcaactgggagagagagttcgagatgtgggcccccgacatgtacgtggtgacctacgtgggcgacaaggacagcagagccatcatcagagagaacgagttcagcttcgaggacaacgccatcagaggcggcaagaaggccagcagaatgaagaaggaggccagcgtgaagttccacgtgctgctgaccagctacgagctgatcaccatcgacatggccatcctgggcagcatcgactgggcctgcctgatcgtggacgaggcccacagactgaagaacaaccagagcaagttcttcagagtgctgaacggctacagcctgcagcacaagctgctgctgaccggcacccccctgcagaacaacctggaggagctgttccacctgctgaacttcctgacccccgagagattccacaacctggagggcttcctggaggagttcgccgacatcgccaaggaggaccagatcaagaagctgcacgacatgctgggcccccacatgctgagaagactgaaggccgacgtgttcaagaacatgcccagcaagaccgagctgatcgtgagagtggagctgagccccatgcagaagaagtactacaagtacatcctgaccagaaacttcgaggccctgaacgccagaggcggcggcaaccaggtgagcctgctgaacgtggtgatggacctgaagaagtgctgcaaccacccctacctgttccccgtggccgccatggaggcccccaagatgcccaacggcatgtacgacggcagcgccctgatcagagccagcggcaagctgctgctgctgcagaagatgctgaagaacctgaaggagggcggccacagagtgctgatcttcagccagatgaccaagatgctggacctgctggaggacttcctggagcacgagggctacaagtacgagagaatcgacggcggcatcaccggcaacatgagacaggaggccatcgacagattcaacgcccccggcgcccagcagttctgcttcctgctgagcaccagagccggcggcctgggcatcaacctggccaccgccgacaccgtgatcatctacgacagcgactggaacccccacaacgacatccaggccttcagcagagcccacagaatcggccagaacaagaaggtgatgatctacagattcgtgaccagagccagcgtggaggagagaatcacccaggtggccaagaagaagatgatgctgacccacctggtggtgagacccggcctgggcagcaagaccggcagcatgagcaagcaggagctggacgacatcctgaagttcggcaccgaggagctgttcaaggacgaggccaccgacggcggcggcgacaacaaggagggcgaggacagcagcgtgatccactacgacgacaaggccatcgagagactgctggacagaaaccaggacgagaccgaggacaccgagctgcagggcatgaacgagtacctgagcagcttcaaggtggcccagtacgtggtgagagaggaggagatgggcgaggaggaggaggtggagagagagatcatcaagcaggaggagagcgtggaccccgactactgggagaagctgctgagacaccactacgagcagcagcaggaggacctggccagaaacctgggcaagggcaagagaatcagaaagcaggtgaactacaacgacggcagccaggaggacagaggcgtgtgcggcagacccagacccccccccatgggcagaagcaccagagccgtgggccccgcccacctgcccagcctgccccccgactggcaggacgaccagagcgacaaccagagcgactacagcgtggccagcgaggagggcgacgaggacttcgacgagagaagcgaggcccccagaagacccagcagaaagggcctgagaaacgacaaggacaagcccctgccccccctgctggccagagtgggcggcaacatcgaggtgctgggcttcaacgccagacagagaaaggccttcctgaacgccatcatgagatacggcatgcccccccaggacgccttcaccacccagtggctggtgagagacctgagaggcaagagcgagaaggagttcaaggcctacgtgagcctgttcatgagacacctgtgcgagcccggcgccgacggcgccgagaccttcgccgacggcgtgcccagagagggcctgagcagacagcacgtgctgaccagaatcggcgtgatgagcctgatcagaaagaaggtgcaggagttcgagcacgtgaacggcagatggagcatgcccgagctggccgaggtggaggagaacaagaagatgagccagcccggcagccccagccccaagacccccacccccagcacccccggcgacacccagcccaacacccccgcccccgtgccccccgccgaggacggcatcaagatcgaggagaacagcctgaaggaggaggagagcatcgagggcgagaaggaggtgaagagcaccgcccccgagaccgccatcgagtgcacccaggcccccgcccccgccagcgaggacgagaaggtggtggtggagccccccgagggcgaggagaaggtggagaaggccgaggtgaaggagagaaccgaggagcccatggagaccgagcccaagggcgccgccgacgtggagaaggtggaggagaagagcgccatcgacctgacccccatcgtggtggaggacaaggaggagaagaaggaggaggaggagaagaaggaggtgatgctgcagaacggcgagacccccaaggacctgaacgacgagaagcagaagaagaacatcaagcagagattcatgttcaacatcgccgacggcggcttcaccgagctgcacagcctgtggcagaacgaggagagagccgccaccgtgaccaagaagacctacgagatctggcacagaagacacgactactggctgctggccggcatcatcaaccacggctacgccagatggcaggacatccagaacgaccccagatacgccatcctgaacgagcccttcaagggcgagatgaacagaggcaacttcctggagatcaagaacaagttcctggccagaagattcaagctgctggagcaggccctggtgatcgaggagcagctgagaagagccgcctacctgaacatgagcgaggaccccagccaccccagcatggccctgaacaccagattcgccgaggtggagtgcctggccgagagccaccagcacctgagcaaggagagcatggccggcaacaagcccgccaacgccgtgctgcacaaggtgctgaagcagctggaggagctgctgagcgacatgaaggccgacgtgaccagactgcccgccaccatcgccagaatcccccccgtggccgtgagactgcagatgagcgagagaaacatcctgagcagactggccaacagagcccccgagcccaccccccagcaggtggcccagcagcagtag

SEQ ID NO: 292163 - DNA, 5814 bp, Artificial Sequence
  derived and/or modified sequence
atggccagcggcctgggcagccccagcccctgcagcgccggcagcgaggaggaggacatggacgccctgctgaacaacagcctgccccccccccaccccgaggaccccgaggaggacctgagcgagaccgagacccccaagctgaagaagaagaagaagcccaagaagcccagagaccccaagatccccaagagcaagagacagaagaaggagagaatgctgctgtgcagacagctgggcgacagcagcggcgagggccccgagttcgtggaggaggaggaggaggtggccctgagaagcgacagcgagggcagcgactacacccccggcaagaagaagaagaagaagctgggccccaagaaggagaagaagagcaagagcaagagaaaggaggaggaggaggaggaggacgacgacgacgacagcaaggagcccaagagcagcgcccagctgctggaggactggggcatggaggacatcgaccacgtgttcagcgaggaggactacagaaccctgaccaactacaaggccttcagccagttcgtgagacccctgatcgccgccaagaaccccaagatcgccgtgagcaagatgatgatggtgctgggcgccaagtggagagagttcagcaccaacaaccccttcaagggcagcagcggcgccagcgtggccgccgccgccgccgccgccgtggccgtggtggagagcatggtgaccgccaccgaggtggcccccccccccccccccgtggaggtgcccatcagaaaggccaagaccaaggagggcaagggccccaacgccagaagaaagcccaagggcagccccagagtgcccgacgccaagaagcccaagcccaagaaggtggcccccctgaagatcaagctgggcggcttcggcagcaagagaaagagaagcagcagcgaggacgacgacctggacgtggagagcgacttcgacgacgccagcatcaacagctacagcgtgagcgacggcagcaccagcagaagcagcagaagcagaaagaagctgagaaccaccaagaagaagaagaagggcgaggaggaggtgaccgccgtggacggctacgagaccgaccaccaggactactgcgaggtgtgccagcagggcggcgagatcatcctgtgcgacacctgccccagagcctaccacatggtgtgcctggaccccgacatggagaaggcccccgagggcaagtggagctgcccccactgcgagaaggagggcatccagtgggaggccaaggaggacaacagcgagggcgaggagatcctggaggaggtgggcggcgacctggaggaggaggacgaccaccacatggagttctgcagagtgtgcaaggacggcggcgagctgctgtgctgcgacacctgccccagcagctaccacatccactgcctgaacccccccctgcccgagatccccaacggcgagtggctgtgccccagatgcacctgccccgccctgaagggcaaggtgcagaagatcctgatctggaagtggggccagccccccagccccacccccgtgcccagaccccccgacgccgaccccaacacccccagccccaagcccctggagggcagacccgagagacagttcttcgtgaagtggcagggcatgagctactggcactgcagctgggtgagcgagctgcagctggagctgcactgccaggtgatgttcagaaactaccagagaaagaacgacatggacgagccccccagcggcgacttcggcggcgacgaggagaagagcagaaagagaaagaacaaggaccccaagttcgccgagatggaggagagattctacagatacggcatcaagcccgagtggatgatgatccacagaatcctgaaccacagcgtggacaagaagggccacgtgcactacctgatcaagtggagagacctgccctacgaccaggccagctgggagagcgaggacgtggagatccaggactacgacctgttcaagcagagctactggaaccacagagagctgatgagaggcgaggagggcagacccggcaagaagctgaagaaggtgaagctgagaaagctggagagaccccccgagacccccaccgtggaccccaccgtgaagtacgagagacagcccgagtacctggacgccaccggcggcaccctgcacccctaccagatggagggcctgaactggctgagattcagctgggcccagggcaccgacaccatcctggccgacgagatgggcctgggcaagaccgtgcagaccgccgtgttcctgtacagcctgtacaaggagggccacagcaagggccccttcctggtgagcgcccccctgagcaccatcatcaactgggagagagagttcgagatgtgggcccccgacatgtacgtggtgacctacgtgggcgacaaggacagcagagccatcatcagagagaacgagttcagcttcgaggacaacgccatcagaggcggcaagaaggccagcagaatgaagaaggaggccagcgtgaagttccacgtgctgctgaccagctacgagctgatcaccatcgacatggccatcctgggcagcatcgactgggcctgcctgatcgtggacgaggcccacagactgaagaacaaccagagcaagttcttcagagtgctgaacggctacagcctgcagcacaagctgctgctgaccggcacccccctgcagaacaacctggaggagctgttccacctgctgaacttcctgacccccgagagattccacaacctggagggcttcctggaggagttcgccgacatcgccaaggaggaccagatcaagaagctgcacgacatgctgggcccccacatgctgagaagactgaaggccgacgtgttcaagaacatgcccagcaagaccgagctgatcgtgagagtggagctgagccccatgcagaagaagtactacaagtacatcctgaccagaaacttcgaggccctgaacgccagaggcggcggcaaccaggtgagcctgctgaacgtggtgatggacctgaagaagtgctgcaaccacccctacctgttccccgtggccgccatggaggcccccaagatgcccaacggcatgtacgacggcagcgccctgatcagagccagcggcaagctgctgctgctgcagaagatgctgaagaacctgaaggagggcggccacagagtgctgatcttcagccagatgaccaagatgctggacctgctggaggacttcctggagcacgagggctacaagtacgagagaatcgacggcggcatcaccggcaacatgagacaggaggccatcgacagattcaacgcccccggcgcccagcagttctgcttcctgctgagcaccagagccggcggcctgggcatcaacctggccaccgccgacaccgtgatcatctacgacagcgactggaacccccacaacgacatccaggccttcagcagagcccacagaatcggccagaacaagaaggtgatgatctacagattcgtgaccagagccagcgtggaggagagaatcacccaggtggccaagaagaagatgatgctgacccacctggtggtgagacccggcctgggcagcaagaccggcagcatgagcaagcaggagctggacgacatcctgaagttcggcaccgaggagctgttcaaggacgaggccaccgacggcggcggcgacaacaaggagggcgaggacagcagcgtgatccactacgacgacaaggccatcgagagactgctggacagaaaccaggacgagaccgaggacaccgagctgcagggcatgaacgagtacctgagcagcttcaaggtggcccagtacgtggtgagagaggaggagatgggcgaggaggaggaggtggagagagagatcatcaagcaggaggagagcgtggaccccgactactgggagaagctgctgagacaccactacgagcagcagcaggaggacctggccagaaacctgggcaagggcaagagaatcagaaagcaggtgaactacaacgacggcagccaggaggacagaggcgtgtgcggcagacccagacccccccccatgggcagaagcaccagagccgtgggccccgcccacctgcccagcctgccccccgactggcaggacgaccagagcgacaaccagagcgactacagcgtggccagcgaggagggcgacgaggacttcgacgagagaagcgaggcccccagaagacccagcagaaagggcctgagaaacgacaaggacaagcccctgccccccctgctggccagagtgggcggcaacatcgaggtgctgggcttcaacgccagacagagaaaggccttcctgaacgccatcatgagatacggcatgcccccccaggacgccttcaccacccagtggctggtgagagacctgagaggcaagagcgagaaggagttcaaggcctacgtgagcctgttcatgagacacctgtgcgagcccggcgccgacggcgccgagaccttcgccgacggcgtgcccagagagggcctgagcagacagcacgtgctgaccagaatcggcgtgatgagcctgatcagaaagaaggtgcaggagttcgagcacgtgaacggcagatggagcatgcccgagctggccgaggtggaggagaacaagaagatgagccagcccggcagccccagccccaagacccccacccccagcacccccggcgacacccagcccaacacccccgcccccgtgccccccgccgaggacggcatcaagatcgaggagaacagcctgaaggaggaggagagcatcgagggcgagaaggaggtgaagagcaccgcccccgagaccgccatcgagtgcacccaggcccccgcccccgccagcgaggacgagaaggtggtggtggagccccccgagggcgaggagaaggtggagaaggccgaggtgaaggagagaaccgaggagcccatggagaccgagcccaagggcgccgccgacgtggagaaggtggaggagaagagcgccatcgacctgacccccatcgtggtggaggacaaggaggagaagaaggaggaggaggagaagaaggaggtgatgctgcagaacggcgagacccccaaggacctgaacgacgagaagcagaagaagaacatcaagcagagattcatgttcaacatcgccgacggcggcttcaccgagctgcacagcctgtggcagaacgaggagagagccgccaccgtgaccaagaagacctacgagatctggcacagaagacacgactactggctgctggccggcatcatcaaccacggctacgccagatggcaggacatccagaacgaccccagatacgccatcctgaacgagcccttcaagggcgagatgaacagaggcaacttcctggagatcaagaacaagttcctggccagaagattcaagctgctggagcaggccctggtgatcgaggagcagctgagaagagccgcctacctgaacatgagcgaggaccccagccaccccagcatggccctgaacaccagattcgccgaggtggagtgcctggccgagagccaccagcacctgagcaaggagagcatggccggcaacaagcccgccaacgccgtgctgcacaaggtgctgaagcagctggaggagctgctgagcgacatgaaggccgacgtgaccagactgcccgccaccatcgccagaatcccccccgtggccgtgagactgcagatgagcgagagaaacatcctgagcagactggccaacagagcccccgagcccaccccccagcaggtggcccagcagcagtag

SEQ ID NO: 292164 - DNA, 1065 bp, Artificial Sequence
  derived and/or modified sequence
atggccagcggcctgggcagccccagcccctgcagcgccggcagcgaggaggaggacatggacgccctgctgaacaacagcctgccccccccccaccccgagaacgaggaggaccccgaggaggacctgagcgagaccgagacccccaagctgaagaagaagaagaagcccaagaagcccagagaccccaagatccccaagagcaagagacagaagaaggagagaatgctgctgtgcagacagctgggcgacagcagcggcgagggccccgagttcgtggaggaggaggaggaggtggccctgagaagcgacagcgagggcagcgactacacccccggcaagaagaagaagaagaagctgggccccaagaaggagaagaagagcaagagcaagagaaaggaggaggaggaggaggaggacgacgacgacgacagcaaggagcccaagagcagcgcccagctgctggaggactggggcatggaggacatcgaccacgtgttcagcgaggaggactacagaaccctgaccaactacaaggccttcagccagttcgtgagacccctgatcgccgccaagaaccccaagatcgccgtgagcaagatgatgatggtgctgggcgccaagtggagagagttcagcaccaacaaccccttcaagggcagcagcggcgccagcgtggccgccgccgccgccgccgccgtggccgtggtggagagcatggtgaccgccaccgaggtggcccccccccccccccccgtggaggtgcccatcagaaaggccaagaccaaggagggcaagggccccaacgccagaagaaagcccaagggcagccccagagtgcccgacgccaagaagcccaagcccaagaaggtggcccccctgaagatcaagctgggcggcttcggcagcaagagaaagagaagcagcagcgaggacgacgacctggacgtggagagcgacttcgacgacgccagcatcaacagctacagcgtgagcgacggcagcaccagcagaagcagcagaagcagaaagaagctgagaaccaccaagaagaagaagaagtag

SEQ ID NO: 292165 - DNA, 6580 bp, Artificial Sequence
  derived and/or modified sequence
attttccccccttcggccgcggcgaggaggagccggagcgggagtgacaccgagccggacccagcgcgacctgcggcggctccgggtgactcgggccagtgtagaggtcctcaggccgccggcaggagcagctgggccaattccctggccgggagcggaaggggatggcgtcgggcctgggctccccgtccccctgctcggcgggcagtgaggaggaggatatggatgcacttttgaacaacagcctgcccccaccccacccagaaaatgaagaggacccagaagaggatttgtcagaaacagagactccaaagctcaagaagaagaaaaagcctaagaaacctcgggaccctaaaatccctaagagcaagcgccaaaaaaaggagcgtatgctcttatgccggcagctgggggacagctctggggaggggccagagtttgtggaggaggaggaagaggtggctctgcgctcagacagtgagggcagcgactatactcctggcaagaagaagaagaagaagcttggacctaagaaagagaagaagagcaaatccaagcggaaggaggaggaggaggaggaggatgatgatgatgattcaaaggagcctaaatcatctgctcagctcctggaagactggggcatggaagacattgaccacgtgttctcagaggaggattatcgaaccctcaccaactacaaggccttcagccagtttgtcagacccctcattgctgccaaaaatcccaagattgctgtctccaagatgatgatggttttgggtgcaaaatggcgggagttcagtaccaataaccccttcaaaggcagttctggggcatcagtggcagctgcggcagcagcagcggtagctgtggtggagagcatggtgacagccactgaggttgcaccaccacctccccctgtggaggtgcctatccgcaaggccaagaccaaggagggcaaaggtcccaatgctcggaggaagcccaagggcagccctcgtgtacctgatgccaagaagcctaaacccaagaaagtagctcccctgaaaatcaagctgggaggttttggttccaagcgtaagagatcctcgagtgaggatgatgacttagatgtggaatctgacttcgatgatgccagtatcaatagctattctgtttctgatggttccaccagccgtagtagccgcagccgcaagaaactccgaaccactaaaaagaaaaagaaaggcgaggaggaggtgactgctgtggatggttatgagacagaccaccaggactattgcgaggtgtgccagcaaggcggtgagatcatcctgtgtgatacctgtccccgtgcttaccacatggtctgcctggatcccgacatggagaaggctcccgagggcaagtggagctgcccacactgcgagaaggaaggcatccagtgggaagctaaagaggacaattcggagggtgaggagatcctggaagaggttgggggagacctcgaagaggaggatgaccaccatatggaattctgtcgggtctgcaaggatggtggggaactgctctgctgtgatacctgtccttcttcctaccacatccactgcctgaatcccccacttccagagatccccaacggtgaatggctctgtccccgttgtacgtgtccagctctgaagggcaaagtgcagaagatcctaatctggaagtggggtcagccaccatctcccacaccagtgcctcggcctccagatgctgatcccaacacgccctccccaaagcccttggaggggcggccagagcggcagttctttgtgaaatggcaaggcatgtcttactggcactgctcctgggtttctgaactgcagctggagctgcactgtcaggtgatgttccgaaactatcagcggaagaatgatatggatgagccaccttctggggactttggtggtgatgaagagaaaagccgaaagcgaaagaacaaggaccctaaatttgcagagatggaggaacgcttctatcgctatgggataaaacccgagtggatgatgatccaccgaatcctcaaccacagtgtggacaagaagggccacgtccactacttgatcaagtggcgggacttaccttacgatcaggcttcttgggagagtgaggatgtggagatccaggattacgacctgttcaagcagagctattggaatcacagggagttaatgaggggtgaggaaggccgaccaggcaagaagctcaagaaggtgaagcttcggaagttggagaggcctccagaaacgccaacagttgatccaacagtgaagtatgagcgacagccagagtacctggatgctacaggtggaaccctgcacccctatcaaatggagggcctgaattggttgcgcttctcctgggctcagggcactgacaccatcttggctgatgagatgggccttgggaaaactgtacagacagcagtcttcctgtattccctttacaaggagggtcattccaaaggccccttcctagtgagcgcccctctttctaccatcatcaactgggagcgggagtttgaaatgtgggctccagacatgtatgtcgtaacctatgtgggtgacaaggacagccgtgccatcatccgagagaatgagttctcctttgaagacaatgccattcgtggtggcaagaaggcctcccgcatgaagaaagaggcatctgtgaaattccatgtgctgctgacatcctatgaattgatcaccattgacatggctattttgggctctattgattgggcctgcctcatcgtggatgaagcccatcggctgaagaacaatcagtctaagttcttccgggtattgaatggttactcactccagcacaagctgttgctgactgggacaccattacaaaacaatctggaagagttgtttcatctgctcaactttctcacccccgagaggttccacaatttggaaggttttttggaggagtttgctgacattgccaaggaggaccagataaaaaaactgcatgacatgctggggccgcacatgttgcggcggctcaaagccgatgtgttcaagaacatgccctccaagacagaactaattgtgcgtgtggagctgagccctatgcagaagaaatactacaagtacatcctcactcgaaattttgaagcactcaatgcccgaggtggtggcaaccaggtgtctctgctgaatgtggtgatggatcttaagaagtgctgcaaccatccatacctcttccctgtggctgcaatggaagctcctaagatgcctaatggcatgtatgatggcagtgccctaatcagagcatctgggaaattattgctgctgcagaaaatgctcaagaaccttaaggagggtgggcatcgtgtactcatcttttcccagatgaccaagatgctagacctgctagaggatttcttggaacatgaaggttataaatacgaacgcatcgatggtggaatcactgggaacatgcggcaagaggccattgaccgcttcaatgcaccgggtgctcagcagttctgcttcttgctttccactcgagctgggggccttggaatcaatctggccactgctgacacagttattatctatgactctgactggaacccccataatgacattcaggcctttagcagagctcaccggattgggcaaaataaaaaggtaatgatctaccggtttgtgacccgtgcgtcagtggaggagcgcatcacgcaggtggcaaagaagaaaatgatgctgacgcatctagtggtgcggcctgggctgggctccaagactggatctatgtccaaacaggagcttgatgatatcctcaaatttggcactgaggaactattcaaggatgaagccactgatggaggaggagacaacaaagagggagaagatagcagtgttatccactacgatgataaggccattgaacggctgctagaccgtaaccaggatgagactgaagacacagaattgcagggcatgaatgaatatttgagctcattcaaagtggcccagtatgtggtacgggaagaagaaatgggggaggaagaggaggtagaacgggaaatcattaaacaggaagaaagtgtggatcctgactactgggagaaattgctgcggcaccattatgagcagcagcaagaagatctagcccgaaatctgggcaaaggaaaaagaatccgtaaacaggtcaactacaatgatggctcccaggaggaccgaggtgtgtgtggccggccccgccccccacccatgggccgttccactagagcagtgggccccgctcatctgccctctctccctccagattggcaggacgaccagtccgacaaccagtccgattactcagtggcttcagaggaaggtgatgaagactttgatgaacgttcagaagctccccgtaggcccagtcgtaagggcctgcggaatgataaagataagccattgcctcctctgttggcccgtgttggtgggaatattgaagtacttggttttaatgctcgtcagcgaaaagcctttcttaatgcaattatgcgatatggtatgccacctcaggatgcttttactacccagtggcttgtaagagacctgcgaggcaaatcagagaaagagttcaaggcatatgtctctcttttcatgcggcatttatgtgagccgggggcagatggggctgagacctttgctgatggtgtcccccgagaaggcctgtctcgccagcatgtccttactagaattggtgttatgtctttgattcgcaagaaggttcaggagtttgaacatgttaatgggcgctggagcatgcctgaactggctgaggtggaggaaaacaagaagatgtcccagccagggtcaccctccccaaaaactcctacaccctccactccaggggacacgcagcccaacactcctgcacctgtcccacctgctgaagatgggataaaaatagaggaaaatagcctcaaagaagaagagagcatagaaggagaaaaggaggttaaatctacagcccctgagactgccattgagtgtacacaggcccctgcccctgcctcagaggatgaaaaggtcgttgttgaaccccctgagggagaggagaaagtggaaaaggcagaggtgaaggagagaacagaggaacctatggagacagagcccaaaggtgctgctgatgtagagaaggtggaggaaaagtcagcaatagatctgacccctattgtggtagaagacaaagaagagaagaaagaagaagaagagaaaaaagaggtgatgcttcagaatggagagacccccaaggacctgaatgatgagaaacagaagaaaaatattaaacaacgtttcatgtttaacattgcagatggtggttttactgagttgcactccctttggcagaatgaagagcgggcagccacagttaccaagaagacttatgagatctggcatcgacggcatgactactggctgctagccggcattataaaccatggctatgcccggtggcaagacatccagaatgacccacgctatgccatcctcaatgagcctttcaagggtgaaatgaaccgtggcaatttcttagagatcaagaataaatttctagctcgaaggtttaagctcttagaacaagctctggtgattgaggaacagctgcgccgggctgcttacttgaacatgtcagaagacccttctcacccttccatggccctcaacacccgctttgctgaggtggagtgtttggcggaaagtcatcagcacctgtccaaggagtcaatggcaggaaacaagccagccaatgcagtcctgcacaaagttctgaaacagctggaagaactgctgagtgacatgaaagctgatgtgactcgactcccagctaccattgcccgaattcccccagttgctgtgaggttacagatgtcagagcgtaacattctcagccgcctggcaaaccgggcacccgaacctaccccacagcaggtagcccagcagcagtgaagatgcagactgataccacctccaccgctgagcagtgaccttcctcactttctcttgtcccagcttctcccctgggggcctgagagaccctcaccttccttctgcccatcttccatgttgtaaaggaacagccccagtgcactgggggaggggagggagtgaggggcagtggtgcccttcctgcagaagagacatgcagcagtagcgctggcgccatctgcaggagctggcgggctggccttctggaccctggcttctccccactgtaacgcctgttacacacaaactgttgtgggttcctgccaggcttgaagaaaatgatctgaattttttcctccttttggttttattttgttggtttattttgtgttttcttttctcctttttggggggtattcagagtgggctgggcccctgggcgagacacagctacctctgttggcatctttttaataccaggaacccagcggctctagccactgagcggctaaatgaaataaagtggaaaaaaaaaaaaaggaaaaaaccaaaagcataaaaaaccacagcaaatttcttgatgaaaattgaaaataaaagtttccttgtatttt

SEQ ID NO: 292166 - DNA, 6554 bp, Artificial Sequence
  derived and/or modified sequence
cgcggcgaggaggagccggagcgggagtgacaccgagccggacccagcgcgacctgcggcggctccgggtgactcgggccagtgtagaggtcctcaggccgccggcaggagcagctgggccaattccctggccgggagcggaaggggatggcgtcgggcctgggctccccgtccccctgctcggcgggcagtgaggaggaggatatggatgcacttttgaacaacagcctgcccccaccccacccagaggacccagaagaggatttgtcagaaacagagactccaaagctcaagaagaagaaaaagcctaagaaacctcgggaccctaaaatccctaagagcaagcgccaaaaaaaggagcgtatgctcttatgccggcagctgggggacagctctggggaggggccagagtttgtggaggaggaggaagaggtggctctgcgctcagacagtgagggcagcgactatactcctggcaagaagaagaagaagaagcttggacctaagaaagagaagaagagcaaatccaagcggaaggaggaggaggaggaggaggatgatgatgatgattcaaaggagcctaaatcatctgctcagctcctggaagactggggcatggaagacattgaccacgtgttctcagaggaggattatcgaaccctcaccaactacaaggccttcagccagtttgtcagacccctcattgctgccaaaaatcccaagattgctgtctccaagatgatgatggttttgggtgcaaaatggcgggagttcagtaccaataaccccttcaaaggcagttctggggcatcagtggcagctgcggcagcagcagcggtagctgtggtggagagcatggtgacagccactgaggttgcaccaccacctccccctgtggaggtgcctatccgcaaggccaagaccaaggagggcaaaggtcccaatgctcggaggaagcccaagggcagccctcgtgtacctgatgccaagaagcctaaacccaagaaagtagctcccctgaaaatcaagctgggaggttttggttccaagcgtaagagatcctcgagtgaggatgatgacttagatgtggaatctgacttcgatgatgccagtatcaatagctattctgtttctgatggttccaccagccgtagtagccgcagccgcaagaaactccgaaccactaaaaagaaaaagaaaggcgaggaggaggtgactgctgtggatggttatgagacagaccaccaggactattgcgaggtgtgccagcaaggcggtgagatcatcctgtgtgatacctgtccccgtgcttaccacatggtctgcctggatcccgacatggagaaggctcccgagggcaagtggagctgcccacactgcgagaaggaaggcatccagtgggaagctaaagaggacaattcggagggtgaggagatcctggaagaggttgggggagacctcgaagaggaggatgaccaccatatggaattctgtcgggtctgcaaggatggtggggaactgctctgctgtgatacctgtccttcttcctaccacatccactgcctgaatcccccacttccagagatccccaacggtgaatggctctgtccccgttgtacgtgtccagctctgaagggcaaagtgcagaagatcctaatctggaagtggggtcagccaccatctcccacaccagtgcctcggcctccagatgctgatcccaacacgccctccccaaagcccttggaggggcggccagagcggcagttctttgtgaaatggcaaggcatgtcttactggcactgctcctgggtttctgaactgcagctggagctgcactgtcaggtgatgttccgaaactatcagcggaagaatgatatggatgagccaccttctggggactttggtggtgatgaagagaaaagccgaaagcgaaagaacaaggaccctaaatttgcagagatggaggaacgcttctatcgctatgggataaaacccgagtggatgatgatccaccgaatcctcaaccacagtgtggacaagaagggccacgtccactacttgatcaagtggcgggacttaccttacgatcaggcttcttgggagagtgaggatgtggagatccaggattacgacctgttcaagcagagctattggaatcacagggagttaatgaggggtgaggaaggccgaccaggcaagaagctcaagaaggtgaagcttcggaagttggagaggcctccagaaacgccaacagttgatccaacagtgaagtatgagcgacagccagagtacctggatgctacaggtggaaccctgcacccctatcaaatggagggcctgaattggttgcgcttctcctgggctcagggcactgacaccatcttggctgatgagatgggccttgggaaaactgtacagacagcagtcttcctgtattccctttacaaggagggtcattccaaaggccccttcctagtgagcgcccctctttctaccatcatcaactgggagcgggagtttgaaatgtgggctccagacatgtatgtcgtaacctatgtgggtgacaaggacagccgtgccatcatccgagagaatgagttctcctttgaagacaatgccattcgtggtggcaagaaggcctcccgcatgaagaaagaggcatctgtgaaattccatgtgctgctgacatcctatgaattgatcaccattgacatggctattttgggctctattgattgggcctgcctcatcgtggatgaagcccatcggctgaagaacaatcagtctaagttcttccgggtattgaatggttactcactccagcacaagctgttgctgactgggacaccattacaaaacaatctggaagagttgtttcatctgctcaactttctcacccccgagaggttccacaatttggaaggttttttggaggagtttgctgacattgccaaggaggaccagataaaaaaactgcatgacatgctggggccgcacatgttgcggcggctcaaagccgatgtgttcaagaacatgccctccaagacagaactaattgtgcgtgtggagctgagccctatgcagaagaaatactacaagtacatcctcactcgaaattttgaagcactcaatgcccgaggtggtggcaaccaggtgtctctgctgaatgtggtgatggatcttaagaagtgctgcaaccatccatacctcttccctgtggctgcaatggaagctcctaagatgcctaatggcatgtatgatggcagtgccctaatcagagcatctgggaaattattgctgctgcagaaaatgctcaagaaccttaaggagggtgggcatcgtgtactcatcttttcccagatgaccaagatgctagacctgctagaggatttcttggaacatgaaggttataaatacgaacgcatcgatggtggaatcactgggaacatgcggcaagaggccattgaccgcttcaatgcaccgggtgctcagcagttctgcttcttgctttccactcgagctgggggccttggaatcaatctggccactgctgacacagttattatctatgactctgactggaacccccataatgacattcaggcctttagcagagctcaccggattgggcaaaataaaaaggtaatgatctaccggtttgtgacccgtgcgtcagtggaggagcgcatcacgcaggtggcaaagaagaaaatgatgctgacgcatctagtggtgcggcctgggctgggctccaagactggatctatgtccaaacaggagcttgatgatatcctcaaatttggcactgaggaactattcaaggatgaagccactgatggaggaggagacaacaaagagggagaagatagcagtgttatccactacgatgataaggccattgaacggctgctagaccgtaaccaggatgagactgaagacacagaattgcagggcatgaatgaatatttgagctcattcaaagtggcccagtatgtggtacgggaagaagaaatgggggaggaagaggaggtagaacgggaaatcattaaacaggaagaaagtgtggatcctgactactgggagaaattgctgcggcaccattatgagcagcagcaagaagatctagcccgaaatctgggcaaaggaaaaagaatccgtaaacaggtcaactacaatgatggctcccaggaggaccgaggtgtgtgtggccggccccgccccccacccatgggccgttccactagagcagtgggccccgctcatctgccctctctccctccagattggcaggacgaccagtccgacaaccagtccgattactcagtggcttcagaggaaggtgatgaagactttgatgaacgttcagaagctccccgtaggcccagtcgtaagggcctgcggaatgataaagataagccattgcctcctctgttggcccgtgttggtgggaatattgaagtacttggttttaatgctcgtcagcgaaaagcctttcttaatgcaattatgcgatatggtatgccacctcaggatgcttttactacccagtggcttgtaagagacctgcgaggcaaatcagagaaagagttcaaggcatatgtctctcttttcatgcggcatttatgtgagccgggggcagatggggctgagacctttgctgatggtgtcccccgagaaggcctgtctcgccagcatgtccttactagaattggtgttatgtctttgattcgcaagaaggttcaggagtttgaacatgttaatgggcgctggagcatgcctgaactggctgaggtggaggaaaacaagaagatgtcccagccagggtcaccctccccaaaaactcctacaccctccactccaggggacacgcagcccaacactcctgcacctgtcccacctgctgaagatgggataaaaatagaggaaaatagcctcaaagaagaagagagcatagaaggagaaaaggaggttaaatctacagcccctgagactgccattgagtgtacacaggcccctgcccctgcctcagaggatgaaaaggtcgttgttgaaccccctgagggagaggagaaagtggaaaaggcagaggtgaaggagagaacagaggaacctatggagacagagcccaaaggtgctgctgatgtagagaaggtggaggaaaagtcagcaatagatctgacccctattgtggtagaagacaaagaagagaagaaagaagaagaagagaaaaaagaggtgatgcttcagaatggagagacccccaaggacctgaatgatgagaaacagaagaaaaatattaaacaacgtttcatgtttaacattgcagatggtggttttactgagttgcactccctttggcagaatgaagagcgggcagccacagttaccaagaagacttatgagatctggcatcgacggcatgactactggctgctagccggcattataaaccatggctatgcccggtggcaagacatccagaatgacccacgctatgccatcctcaatgagcctttcaagggtgaaatgaaccgtggcaatttcttagagatcaagaataaatttctagctcgaaggtttaagctcttagaacaagctctggtgattgaggaacagctgcgccgggctgcttacttgaacatgtcagaagacccttctcacccttccatggccctcaacacccgctttgctgaggtggagtgtttggcggaaagtcatcagcacctgtccaaggagtcaatggcaggaaacaagccagccaatgcagtcctgcacaaagttctgaaacagctggaagaactgctgagtgacatgaaagctgatgtgactcgactcccagctaccattgcccgaattcccccagttgctgtgaggttacagatgtcagagcgtaacattctcagccgcctggcaaaccgggcacccgaacctaccccacagcaggtagcccagcagcagtgaagatgcagactgataccacctccaccgctgagcagtgaccttcctcactttctcttgtcccagcttctcccctgggggcctgagagaccctcaccttccttctgcccatcttccatgttgtaaaggaacagccccagtgcactgggggaggggagggagtgaggggcagtggtgcccttcctgcagaagagacatgcagcagtagcgctggcgccatctgcaggagctggcgggctggccttctggaccctggcttctccccactgtaacgcctgttacacacaaactgttgtgggttcctgccaggcttgaagaaaatgatctgaattttttcctccttttggttttattttgttggtttattttgtgttttcttttctcctttttggggggtattcagagtgggctgggcccctgggcgagacacagctacctctgttggcatctttttaataccaggaacccagcggctctagccactgagcggctaaatgaaataaagtggaaaaaaaaaaaaaggaaaaaaccaaaagcataaaaaaccacagcaaatttcttgatgaaaattgaaaataaaagtttccttgtatttt

SEQ ID NO: 292167 - DNA, 5823 bp, Artificial Sequence
  derived and/or modified sequence
atggcgtcagggctgggatcaccttctccctgttcagcaggtagtgaagaagaggacatggatgcactgctgaacaactcattacctcctcctcacccagagaatgaggaggaccccgaagaggatctgtctgagactgagactcccaagctcaagaagaagaagaagcccaagaagccgagggaccccaagatcccaaagtccaaacgacagaaaaaagagcgtatgctgctgtgccgacagctaggagatagttcaggggagggaccagagttcgtggaggaggaggaggaagtcgcacttcgaagcgactccgaggggtccgattacacccccggaaaaaaaaaaaaaaagaaacttggtcctaagaaagaaaagaaatcaaagagcaaacgcaaagaagaagaagaagaggaagatgacgacgacgattccaaggagccgaaatcttcagctcaactgctggaggactggggcatggaggacatcgaccatgtttttagcgaggaagattaccgcacacttaccaattacaaagccttcagccagttcgtgcgaccgctaatagccgccaagaacccgaagatcgccgtctccaaaatgatgatggttctcggggccaagtggcgggagtttagcacaaacaacccgtttaaaggcagcagcggcgcatcagtggccgccgccgcggccgccgctgtggccgtggtggagtcaatggttaccgcgacagaggtcgccccacctcctccacctgtcgaggtcccaatccgtaaagccaagactaaggagggcaagggacctaacgcccgtcggaaaccaaaaggatctccaagggtccctgatgctaagaagccaaaaccaaagaaagttgcccctcttaagatcaagctcggggggttcggctcgaagcgaaaaagaagttccagcgaagacgacgatctggatgtcgaaagcgacttcgatgacgcaagtataaacagctacagtgtcagcgatggtagcacgagccgaagcagcagatccagaaaaaagctgagaacaacaaagaagaaaaagaaaggagaggaagaagtgacagccgtggatggctacgaaacagatcatcaagattactgcgaggtatgccagcagggcggtgaaatcattttatgcgacacctgcccacgcgcttatcatatggtctgtctggaccccgatatggagaaggctccggaggggaaatggtcgtgccctcattgcgagaaagagggcatccagtgggaggcaaaggaggacaactctgaaggtgaagaaatcctggaagaggtgggaggagacttggaagaggaagatgaccatcatatggaattctgccgcgtatgcaaggacggtggtgagctgctgtgttgcgacacttgccccagtagttatcacatccactgtcttaatcctccactgccagagattcccaacggggagtggctctgccctcgttgcacttgccctgcactaaagggcaaggtgcagaagatcttgatttggaagtggggacaaccaccatctcctacacccgttccacgaccgcctgatgcagatcctaacacaccctccccgaagccgctcgaaggacgacctgagagacagttctttgttaagtggcagggaatgtcatactggcactgcagttgggtttccgagttacagctggagttacactgccaggttatgtttcgaaattatcagagaaagaacgatatggacgaaccccccagcggtgattttggtggggatgaggaaaagtctagaaagagaaaaaacaaggatccgaaattcgccgaaatggaagaacgcttctatcggtacggcatcaagcccgagtggatgatgattcatagaattctgaatcactctgtggacaagaaggggcacgtgcattatctcatcaaatggcgggatttaccctacgatcaagctagttgggagtccgaggacgtggaaatccaggactacgacctgtttaaacagtcttactggaatcacagggaactaatgaggggcgaagaaggaagaccgggaaagaaactgaaaaaggttaagctacggaagcttgaaaggccccccgagacaccaacggtagatccaaccgtgaagtatgagagacaaccagaatacctggacgctaccggtggaactctgcatccctaccagatggagggtctgaactggcttcgctttagttgggcacaggggacggatacaattcttgcggacgagatgggtctcgggaaaaccgtgcagacagctgtcttcttgtacagtctttataaagagggacactccaagggccccttcctcgtctccgcccctctctcaaccattatcaattgggagagggaatttgagatgtgggcacctgacatgtatgtggtgacatacgtgggtgacaaagactctcgggccatcatccgcgaaaacgaattcagtttcgaagacaacgcgatccgaggcggaaagaaggcctcccggatgaaaaaggaagcgtcagtgaagttccacgttctactcacgagctatgagctcattactatcgatatggccattctcggatcaattgattgggcttgcctcattgtcgatgaagcacacaggctgaaaaacaatcagagcaagttcttccgggttctgaacggctactcgcttcagcataaattactgttgacaggtacccctctgcagaataatctcgaggaactcttccatcttttaaactttctgacacctgaaaggtttcacaatctcgaaggattcttggaagagtttgcggacatcgctaaggaggaccagattaagaagctgcacgatatgctcggtcctcatatgttgcgaagattaaaagccgacgtttttaagaacatgcctagcaagaccgaactgatcgtcagggtagagcttagtcccatgcagaagaaatactataaatatatcctcactcgaaactttgaggctctgaacgcccgtggaggtggcaatcaggtgtccttgttgaacgtggtgatggatctgaaaaaatgttgcaaccatccatacctgttccctgtggcagccatggaggcacccaaaatgccaaatggaatgtatgacgggagtgccctaattcgggcttccggtaagttgctactgctgcagaaaatgctgaagaacttgaaagaaggcggccaccgcgttcttattttttcacagatgactaaaatgctcgacctgttggaggactttctggagcacgaaggctataagtacgagaggattgacggaggtatcacgggcaatatgcggcaggaagcaatcgataggttcaatgcccctggggctcagcagttttgcttcttgctgtctacacgggccgggggcctgggaatcaacctggccacagccgatacagtaatcatctatgactctgattggaatccacacaacgacatccaagccttctctcgcgcacatcgtattggacagaataagaaggtaatgatctatcggtttgttactcgagcttccgtggaagaaagaattacccaggttgccaagaagaagatgatgctgacccacctagtggttagacctggcctggggtctaagaccgggtcaatgtctaaacaggagctggacgatatcctcaaattcggaacagaggaattgtttaaagatgaggccacagacggcggcggtgacaacaaggagggcgaagatagctctgtgatccattatgacgataaagctatcgagcgcctgctcgatcgaaaccaggacgagacggaggacaccgaactgcagggtatgaacgagtacctgtcgtccttcaaggtggcacagtatgttgttagggaagaagaaatgggtgaggaagaggaagtggaaagagagattataaagcaggaggagagcgtggaccccgattactgggagaaactgttgcggcaccactacgaacaacagcaggaggatctggcacgaaatcttggaaagggaaagcggataaggaagcaggtgaactacaatgatggctcgcaagaagatcgcggggtctgcggtcggcctagacctcctccaatggggagaagtacgcgggccgtcggacccgcccatctcccatccctgccacccgactggcaggatgaccagagtgataaccaaagcgactattctgtggcaagtgaagaaggagatgaggacttcgatgagagaagcgaggccccgcgtcggccatccagaaaagggctacggaatgataaggataagccactgccacccttgctggctagggttggcgggaatatcgaggtgctcggattcaatgcccggcaacgtaaggcattccttaacgccattatgaggtacggtatgccaccacaggatgcatttaccacacaatggttggtaagagacctgcgcgggaaatcagagaaagagtttaaggcttacgtctctttatttatgcgccacctgtgtgagcctggggctgatggggccgaaacctttgccgatggggtgcctagagaaggcctgagccgccaacacgtgctgacgaggatcggggtgatgtcactcatacgcaagaaagtgcaggagttcgagcacgtgaatgggcgctggagcatgccagagctcgccgaggtcgaagaaaataagaagatgagccaaccagggagtccctcccccaaaacacccactccctctaccccgggggacacacagcccaacaccccagccccagtgccacctgcagaagacggaataaagattgaggagaattcactgaaagaagaggagtctatcgagggggagaaggaagtgaaatccaccgctcccgaaacagcgatcgaatgcacccaggctcctgcgcctgcctccgaggatgaaaaagtggtggtggagcctccagaaggcgaagagaaggttgagaaggcagaggttaaggaaagaactgaggaaccaatggagactgaaccaaagggagccgctgatgtggaaaaagtcgaggaaaagtctgccattgacctcactccaatcgttgtggaggacaaggaagaaaaaaaagaggaggaagagaaaaaagaggtaatgctccagaatggggagacaccaaaagatcttaacgatgagaaacagaaaaagaatataaaacagcggtttatgtttaacatagccgatggtggattcactgagctgcatagcctctggcagaacgaggagcgagcagcgaccgtaaccaaaaagacatacgaaatttggcacaggagacatgactactggttgctggccggtattatcaatcatgggtatgcccggtggcaggacattcagaatgacccacgctacgccatcttgaacgaaccctttaagggggagatgaatcgtggcaacttccttgagatcaagaacaagtttcttgcaagacggtttaagctcctggagcaggcactcgttatagaggaacagctcaggcgagccgcctacttaaatatgtcagaagacccttcacacccctccatggccttgaatacacgcttcgccgaagtggagtgtctggccgaaagccatcagcatctttcaaaagagagtatggcgggtaacaaaccagcaaacgctgtgttgcataaggtcctgaaacagttggaagaacttttgtcagacatgaaagctgacgtgaccagattgcccgccacgattgccaggattccacctgtcgcagttcggcttcagatgagcgaaaggaacatcctgagccgcttggctaacagggcacccgaacccactccacagcaggtggctcaacagcagtag

SEQ ID NO: 292168 - DNA, 5814 bp, Artificial Sequence
  derived and/or modified sequence
atggcttcaggccttggatccccgtcaccatgctcagccggatctgaagaggaagacatggacgccctgctaaacaattctctgcctcctccgcacccagaagaccctgaagaggacttgagcgagacagagacacctaagctgaagaaaaagaagaagccaaaaaaaccccgtgaccctaaaattccaaagtccaaaaggcaaaagaaggagcggatgttgctctgcaggcagctgggagattcctccggagaagggcccgagtttgtggaggaggaagaggaggttgccctccgatccgattctgaagggagcgactacactccaggcaagaagaaaaagaaaaagctgggaccaaagaaggaaaaaaaaagcaaatcgaagcgaaaggaagaggaggaagaggaggatgacgacgatgacagtaaagaacctaaaagctcagctcagctcctggaggactggggaatggaggatattgatcacgtcttctccgaggaggattaccggaccctcactaattataaagcattttcccagtttgttcgaccacttatcgccgccaagaaccctaaaatcgctgtcagtaaaatgatgatggtactaggggcaaagtggcgcgagttcagcactaataatcctttcaaaggttccagcggtgcgagtgtcgcagctgctgccgcagcagctgtggccgtggttgagagcatggtcacagccaccgaggttgcccccccacccccccccgtggaagtcccaatacgaaaggcaaagactaaggagggaaaaggcccaaacgcccggaggaaaccaaagggttccccccgcgtgccagacgccaagaaacctaagccaaagaaggtcgcacctctaaagataaaactgggaggtttcgggagcaagcggaagagaagctctagtgaagatgacgatcttgacgtggaaagtgacttcgatgacgccagcatcaattcttattcagtatcagacggaagtacatccaggtcctcccgctcccggaagaagcttaggactacaaagaaaaagaagaaaggcgaagaggaagtcacagccgtcgatggctacgaaaccgaccaccaggattactgtgaggtgtgccagcagggcggagagataatactgtgcgatacctgtcctcgggcttaccatatggtctgtctcgaccctgacatggagaaggcgcccgagggtaaatggtcttgtcctcactgtgagaaggagggcattcagtgggaggctaaggaagacaattccgagggagaggagatcctggaagaagtaggcggggacttggaggaggaagacgatcatcatatggagttctgtcgcgtctgcaaagatggtggtgagctgctgtgctgcgacacttgtccaagctcctatcacattcattgcctcaacccaccacttcctgagatccccaatggcgaatggctttgcccgagatgtacctgccctgcccttaaggggaaagtgcagaaaattctgatctggaagtggggtcaaccacctagtcccacgcctgtaccacgacccccggacgcagacccgaataccccatcaccgaagcctctagagggtcgtcccgaaagacagttcttcgtgaagtggcaggggatgtcttattggcactgtagctgggtctcggaactccaactcgaactgcactgccaggtcatgttccggaactatcagagaaagaatgacatggatgagccgccatcaggcgactttggaggcgatgaggaaaaaagccgcaaaaggaagaataaagatccaaagttcgccgagatggaggaaagattctatagatatgggataaagccggagtggatgatgattcatcggattttgaaccacagcgttgacaagaagggccatgtgcattacctcataaagtggcgggacctgccctacgatcaggcatcttgggagtcagaggatgtggagattcaagattacgacctgttcaaacaatcctactggaaccaccgagagctaatgaggggcgaagaggggagacccgggaaaaagctgaaaaaagtgaaattgcgtaagttggagagaccccccgaaacacctacagtcgacccaactgtgaagtacgaaaggcaaccggaatacctggatgcaaccggcggtaccctgcacccctatcagatggaaggcttgaattggctacgcttctcttgggcacagggaaccgacactatccttgcggatgagatgggcctcggtaagacggtgcagactgccgttttcttgtatagcttatataaagagggacattccaaggggcctttccttgtgtctgcacctctatctacgataatcaactgggaaagggagtttgagatgtgggccccagacatgtacgtcgtgacatatgttggtgataaggatagcagggccatcatccgtgaaaacgagttttcctttgaggataatgcaatccgaggggggaagaaggccagccgtatgaagaaggaggctagtgtcaagtttcatgtgcttttgactagttacgaactgattaccatcgacatggccattctcggctcaatcgattgggcatgtctgatcgttgatgaggcacacaggctgaagaataatcagtctaagtttttcagagtcctaaatggttactccctgcagcacaagctcttgctcaccggcacacccctgcagaataatctggaggagctgttccacctgctgaattttctgactcctgaaagattccataacttggaggggtttctggaggagttcgctgacattgccaaagaagaccagattaagaagctgcacgacatgctgggacctcatatgctgcgccggttaaaagcagatgtgttcaagaacatgccctccaaaacggagctgattgttcgagttgagctcagcccgatgcagaaaaagtactacaagtatatacttacccgaaatttcgaagctctgaatgctcgtggaggtggaaatcaggtttctttattgaacgtcgtgatggacttgaagaagtgttgtaaccatccatatctgttccccgtcgcagctatggaggcccccaaaatgccaaacggcatgtacgacggcagcgccctaatacgagctagtggtaaactccttctgctccagaagatgctgaaaaatttgaaggaaggcgggcatcgggtactcatctttagccagatgacaaaaatgctcgatcttcttgaggacttcttggaacacgagggctacaaatacgaaaggattgacggcgggatcacggggaacatgcgtcaggaggcaatcgatcggtttaacgcgccaggggcccaacagttttgctttctactgtccaccagggccggcggcttgggcatcaatttggcaactgcggatacagttattatctacgacagcgattggaatccccacaacgacattcaggccttctcccgggcacataggattgggcagaataagaaggtgatgatatatcgatttgtgacccgcgcctctgtggaagaaagaattactcaagtggccaagaagaagatgatgcttacccacctcgtggtgagacccggactaggctcaaaaacagggagtatgagcaaacaggagctggatgacatccttaaattcggtacggaagaactcttcaaggatgaggccaccgacggcggcggagacaataaagagggtgaggactcttccgtcatacactatgatgacaaggcaattgaaagactcttggatcgcaaccaggacgaaaccgaggacacagaactgcagggcatgaatgagtacctctcttcatttaaggtcgcccagtatgtggtgagagaggaggagatgggagaggaggaagaggtggaacgggagattatcaaacaagaggaatccgtggatccggattactgggagaaactcctccggcatcactacgagcagcagcaagaagatctggctcgcaacttgggaaaaggaaagaggattcgaaagcaggtaaattacaatgatgggtctcaagaagatcgtggtgtgtgtggacggcctcggccaccccccatggggcgcagcaccagggccgtgggtcccgcgcaccttcctagtctgccaccagattggcaggatgatcagtcggataaccaaagcgattattccgtggcttcagaggagggagatgaggatttcgacgagcgcagtgaggccccacgccgcccctcaaggaaggggctgaggaacgacaaagataagcctcttccccctctcctcgcgagggtaggcggaaatatcgaggtgctgggctttaatgccagacaaagaaaagcgtttctgaacgccatcatgagatatggcatgccccctcaggacgccttcacaacccagtggctggtacgtgacctgcgggggaagagtgagaaagaattcaaggcctacgtgtccctgtttatgcgacacctgtgtgagcccggcgccgacggggcggagacctttgccgacggcgtccctcgcgaaggtttgagcaggcagcacgtgctgacccgtatcggcgtcatgagcctgattcgcaaaaaagtccaggagttcgagcatgtgaatgggcggtggagcatgccagaactggccgaggtcgaagaaaacaagaagatgtctcagcctggaagtcctagccctaaaacacctacgccatcgaccccgggagatacccagcccaacactcccgctcccgtgccacccgccgaagacggtattaaaatagaggaaaattcactgaaggaagaggaatccatagagggagaaaaagaggtcaaaagtaccgcccccgagaccgcaattgaatgtacacaggccccagccccggcaagtgaggatgagaaagtggtcgtagagccccccgaaggggaagaaaaggtcgagaaagcggaagttaaagagcgcacggaggagcctatggaaactgagcccaagggagccgccgatgtggaaaaagtcgaagagaagtctgctatcgacctcacccccattgtagtagaggacaaagaggagaagaaagaagaggaggagaaaaaagaagtgatgctgcagaacggagaaacaccgaaagaccttaatgacgaaaaacagaaaaaaaatataaaacagcggtttatgttcaacatcgccgacggcggatttaccgaactgcacagtctctggcaaaatgaagagcgagcggccactgtcaccaagaaaacttatgaaatttggcaccgtcgccacgactactggttactggccggtattattaatcacggatacgcaaggtggcaagacattcagaacgaccccaggtacgcgattcttaacgagccctttaaaggagagatgaacagaggaaatttcttagagatcaagaacaaattcctcgcaagaaggtttaagctgttggagcaagcactggtgatagaggagcagctgagaagggccgcataccttaatatgagtgaggaccccagccatccctctatggcactgaacactaggtttgcggaggtggaatgtctcgctgaaagccaccagcatctcagcaaggagtccatggccggcaataagccggctaacgccgtgctccataaagtcttaaagcagttagaggagctcctgagtgacatgaaggccgacgtgacccgactccctgccacaatcgcaagaatcccacctgtggcggtaagactgcagatgagcgaaaggaatattctgagcagactcgctaaccgggctccagagcctaccccacagcaagtggctcagcaacagtag

SEQ ID NO: 292169 - DNA, 1065 bp, Artificial Sequence
  derived and/or modified sequence
atggcaagcggcctgggatctcccagcccatgctctgccgggtctgaggaggaagatatggatgcactattgaataattccctaccgcccccccatccagagaatgaggaagaccccgaggaggatctctctgaaacggagacaccgaagttgaagaaaaagaagaagccaaagaagccccgcgaccctaaaatcccgaagagtaagagacagaagaaagagaggatgctactctgtcgacagctgggcgacagttctggcgaaggccccgaatttgttgaggaggaggaagaggttgcgttgagatcagacagtgagggatcagactacacccccgggaagaaaaaaaagaagaagctgggccctaaaaaggaaaaaaaatccaaatctaagcgaaaggaagaggaggaagaagaggacgacgatgacgactcgaaggagcccaaatccagcgcacagctgctggaggattggggtatggaggatatcgaccacgtgttcagtgaggaagactaccgcactttaacaaactataaggcattttcccagttcgtaagacccctcatcgccgcaaaaaacccaaaaatcgcagtatccaagatgatgatggtcctgggggcaaaatggagagaattcagcactaataatccatttaaagggtcaagtggcgcaagtgttgcagccgcggctgccgcagccgtggctgtagtggagtctatggtgactgccacagaggtcgcgccaccacccccacctgtggaggtgcctatccgaaaggctaagaccaaagaagggaaaggcccaaatgcccggaggaaacccaaagggtcaccccgggtgccagacgctaaaaagcccaaaccaaagaaggtggctccccttaaaatcaagctcggaggattcggttccaaaaggaagagaagctcgtctgaggacgacgatctggatgtcgaatccgactttgacgacgcttcaattaattcgtacagcgtttcagacggctccacctcgagatcttccaggtcgcgcaaaaaactaagaacaacaaaaaagaagaagaagtag

SEQ ID NO: 292170 - DNA, 1065 bp, Artificial Sequence
  derived and/or modified sequence
atggctagcgggttgggatctccttcaccttgttctgccggctctgaggaagaagacatggacgccttactgaataactctctcccccccccacaccctgaaaatgaggaggaccctgaagaggacctgtctgagacagagacgcctaagctgaaaaaaaagaaaaaacctaaaaaacctcgggaccccaaaatacccaaatctaaaaggcagaagaaggagcgtatgctgctgtgtcgtcagctgggagattcatcaggcgaaggccctgagtttgtagaagaagaagaagaagtggctctgagaagcgattccgaggggtcagattacaccccaggtaagaaaaaaaaaaaaaagctggggcccaagaaggaaaaaaagtccaagtcgaagcgcaaggaggaggaggaagaagaggatgatgacgacgactctaaggaaccaaaatccagcgcccagctactcgaagactggggtatggaggatattgatcatgtgttctccgaagaagattaccgaaccctgaccaactacaaagccttctcccagttcgtcagacctctgatcgctgccaagaatcctaaaattgctgtgagtaaaatgatgatggttctgggcgctaaatggcgagaattttcaaccaataacccattcaaaggttcatctggggccagcgtggctgccgcagcggcggctgcggtagcagttgtggagtccatggttaccgctactgaggtcgccccgccgccccctcctgtagaagttcccattcgcaaagccaagacaaaggagggaaagggcccaaacgcccgaaggaaaccaaagggaagccccagggtgcctgacgccaagaagcccaaaccaaagaaggttgcaccgctgaaaattaaacttggcggcttcggatcgaaaagaaagagatccagctcagaggacgacgatctggatgtagagagtgacttcgacgacgcttcaattaactcatattcagtctccgacgggtccacatcccgttcatcccggtcccggaagaagctgagaaccaccaaaaaaaaaaaaaaatag

SEQ ID NO: 292171 - DNA, 5823 bp, Artificial Sequence
  derived and/or modified sequence
atggccagcggcctgggcagccccagcccctgcagcgctggcagcgaggaggaggacatggatgccctgctgaacaacagcctgcccccaccccacccagaaaatgaagaagatcctgaggaggacctgtctgaaacagagacccccaagctgaagaagaagaagaagcccaagaagccccgggaccccaagatccccaagagcaagaggcagaagaaggagaggatgctgctgtgccggcagctgggggacagcagcggggagggccctgagtttgtggaggaggaggaggaggtggccctgcggagtgacagcgagggcagtgactacacccctgggaagaagaagaagaagaagctgggccccaagaaggagaagaagagcaagagcaagaggaaggaggaggaggaggaggaggatgatgatgatgacagcaaggagcccaagagcagcgcccagctgctggaggactggggcatggaggacatcgaccacgtgttcagcgaggaggactaccgcaccctgaccaactacaaggccttcagccagtttgtgcggcccctgattgctgccaagaaccccaagattgctgtgtccaagatgatgatggtgctgggcgccaagtggagggagttcagcaccaacaaccccttcaagggcagcagcggggcctctgtggccgctgctgctgctgctgctgtggccgtggtggagagcatggtgacagccacagaggtggcccctcctcctcctcctgtggaggtgcccatcaggaaggccaagaccaaggagggcaagggccccaatgcccggaggaagcccaagggcagcccccgggtgcctgatgccaagaagcccaagcccaagaaggtggcccccctgaagatcaagctgggcggcttcggcagcaagaggaagaggagcagcagtgaagatgatgacctggatgtggagagtgactttgatgatgccagcatcaacagctacagcgtgtctgatggcagcaccagccgcagcagccgcagcaggaagaagctgcggaccaccaagaagaagaagaagggggaggaggaggtgacagctgtggatggctatgaaacagaccaccaggactactgtgaggtgtgccagcagggcggggagatcatcctgtgtgacacctgcccccgggcctaccacatggtgtgcctggaccctgacatggagaaggcccctgagggcaagtggagctgcccccactgtgagaaggagggcatccagtgggaggccaaggaggacaacagcgagggggaggagatcctggaggaggtgggcggggacctggaggaggaggatgaccaccacatggagttctgccgggtgtgcaaggatggaggagagctgctgtgctgtgacacctgccccagcagctaccacatccactgcctgaacccccccctgcctgagatccccaatggagagtggctgtgcccccgctgcacctgcccagccctgaagggcaaggtgcagaagatcctgatctggaagtggggccagccccccagccccacccctgtgccccggcccccagatgctgaccccaacacccccagccccaagcccctggagggccggcctgagcggcagttctttgtgaagtggcagggcatgagctactggcactgctcctgggtgtctgagctgcagctggagctgcactgccaggtgatgttcaggaactaccagaggaagaatgacatggatgagcccccatctggggactttggaggagatgaggagaagagcaggaagaggaagaacaaggaccccaagtttgctgagatggaggagcgcttctaccgctatggcatcaagccagagtggatgatgatccaccgcatcctgaaccacagcgtggacaagaagggccacgtgcactacctgatcaagtggagggacctgccctatgaccaggcctcctgggagagtgaagatgtggagatccaggactatgacctcttcaagcagagctactggaaccaccgggagctgatgagaggagaggagggccggcctgggaagaagctgaagaaggtgaagctgaggaagctggagcggcccccagagacccccaccgtggaccccaccgtgaagtatgaaaggcagcctgagtacctggatgccaccggcggcaccctgcacccctaccagatggagggcctgaactggctgcgcttctcctgggcccagggcacagacaccatcctggctgatgagatgggcctgggcaagacagtgcagacagctgtgttcctgtacagcctgtacaaggagggccacagcaagggccccttcctggtgtctgcccccctgagcaccatcatcaactgggagcgggagtttgagatgtgggccccagacatgtatgtggtgacctacgtgggggacaaggacagccgggccatcatccgggagaatgagttctcctttgaggacaatgccatccggggcggcaagaaggccagcaggatgaagaaggaggcctctgtgaagttccacgtgctgctgaccagctatgagctgatcaccatcgacatggccatcctgggcagcattgactgggcctgcctgattgtggatgaggcccaccggctgaagaacaaccagagcaagttcttccgggtgctgaatggctacagcctgcagcacaagctgctgctgaccggcacccccctgcagaacaacctggaggagctgttccacctgctgaacttcctgaccccagagcgcttccacaacctggagggcttcctggaggagtttgctgacatcgccaaggaggaccagatcaagaagctgcatgacatgctgggcccccacatgctgcggcggctgaaggcagatgtgttcaagaacatgcccagcaagacagagctgattgtgcgggtggagctgagccccatgcagaagaagtactacaagtacatcctgaccaggaactttgaggccctgaatgcccggggcggcggcaaccaggtgtccctgctgaatgtggtgatggacctgaagaagtgctgcaaccacccctacctgtttcctgtggccgccatggaggcccccaagatgcccaacggcatgtatgatggcagcgccctgatccgggccagcggcaagctgctgctgctgcagaagatgctgaagaacctgaaggagggcggccaccgggtgctgatcttcagccagatgaccaagatgctggacctgctggaggacttcctggagcacgagggctacaagtatgaaagaattgatggcggcatcactggaaacatgaggcaggaggccatcgaccgcttcaatgcccctggggcccagcagttctgcttcctgctgagcacccgggccggcggcctgggcatcaacctggccacagctgacaccgtcatcatctatgacagcgactggaacccccacaatgacatccaggccttcagccgggcccacagaattggccagaacaagaaggtgatgatctacagatttgtgacccgggcctctgtggaggagcgcatcacccaggtggccaagaagaagatgatgctgacccacctggtggtgcggcccggcctgggcagcaagacaggctccatgagcaagcaggagctggatgacatcctgaagtttggaacagaggagctgttcaaggatgaggccacagatggcggcggggacaacaaggagggggaggacagcagcgtcatccactatgatgacaaggccatcgagcggctgctggacaggaaccaggatgaaacagaggacacagagctgcagggcatgaatgagtacctgagcagcttcaaggtggcccagtatgtggtgcgggaggaggagatgggagaggaggaggaggtggagcgggagatcatcaagcaggaggagagcgtggaccctgactactgggagaagctgctgcggcaccactatgagcagcagcaggaggacctggccaggaacctgggcaagggcaagaggatcaggaagcaggtgaactacaatgatggcagccaggaggaccggggcgtgtgtggccggccccggcccccacccatgggccgcagcaccagggctgtgggccctgcccacctgcccagcctgcccccagactggcaggatgaccagagcgacaaccagagcgactacagcgtggccagcgaggagggagatgaagattttgatgagaggtctgaggccccccggcggcccagcaggaagggcctgagaaatgacaaggacaagcccctgccccccctgctggcccgggtgggcggcaacatcgaggtgctgggcttcaatgcccggcagaggaaggccttcctgaatgccatcatgagatatggcatgccaccccaggatgccttcaccacccagtggctggtgcgggacctgcggggcaagtctgagaaggagttcaaggcctacgtgtccctcttcatgaggcacctgtgtgagcccggggctgatggagctgagacctttgctgatggagtgccccgggagggcctgagccggcagcacgtgctgacccgcatcggcgtgatgagcctcatcaggaagaaggtgcaggagtttgaacatgtgaatggccgctggagcatgcctgagctggccgaggtggaggagaacaagaagatgagccagcccggcagccccagccccaagacccccacccccagcacccctggggacacccagcccaacaccccagcccctgtgcccccagcagaagatggcatcaagattgaggagaacagcctgaaggaggaggagagcattgaaggagagaaggaggtgaagagcacagcccctgagacagccattgaatgtacccaggccccagccccagcctctgaagatgagaaggtggtggtggagcccccagagggggaggagaaggtggagaaggccgaggtgaaggagaggacagaggagcccatggagacagagcccaagggagctgctgatgtggagaaggtggaggagaagagcgccatcgacctgacccccatcgtggtggaggacaaggaggagaagaaggaggaggaggagaagaaggaggtgatgctgcagaatggagagacccccaaggacctgaatgatgagaagcagaagaagaacatcaagcagcgcttcatgttcaacattgctgatggcggcttcacagagctgcacagcctgtggcagaatgaggagcgggccgccaccgtgaccaagaagacctatgagatctggcacagaagacatgactactggctgctggccggcatcatcaaccacggctacgcccgctggcaggacatccagaatgaccccaggtatgccatcctgaatgagcccttcaagggggagatgaacagaggcaacttcctggagatcaagaacaagttcctggcccggcgcttcaagctgctggagcaggccctggtgattgaggagcagctgcggcgggccgcctacctgaacatgtctgaggaccccagccaccccagcatggccctgaacaccaggtttgctgaggtggagtgcctggccgagagccaccagcacctgagcaaggagagcatggccggcaacaagccagccaatgctgtgctgcacaaggtgctgaagcagctggaggagctgctgagtgacatgaaggcagatgtgacccggctgcctgccaccatcgcccgcatcccccctgtggccgtgcggctgcagatgtctgagaggaacatcctgagccggctggccaacagagcccctgagcccaccccccagcaggtggcccagcagcagtag

SEQ ID NO: 292172 - DNA, 5814 bp, Artificial Sequence
  derived and/or modified sequence
atggccagcggcctgggcagccccagcccctgcagcgctggcagcgaggaggaggacatggatgccctgctgaacaacagcctgcccccaccccaccctgaggaccctgaggaggacctgtctgaaacagagacccccaagctgaagaagaagaagaagcccaagaagccccgggaccccaagatccccaagagcaagaggcagaagaaggagaggatgctgctgtgccggcagctgggggacagcagtggagagggccctgagtttgtggaggaggaggaggaggtggccctgcggagtgacagcgagggcagtgactacaccccaggcaagaagaagaagaagaagctgggccccaagaaggagaagaagagcaagagcaagaggaaggaggaggaggaggaggaggatgatgatgatgacagcaaggagcccaagagcagcgcccagctgctggaggactggggcatggaggacatcgaccacgtgttttctgaggaggactaccgcaccctgaccaactacaaggccttcagccagtttgtgcggcccctgattgctgccaagaaccccaagattgctgtgtccaagatgatgatggtgctgggcgccaagtggagggagttcagcaccaacaaccccttcaagggcagcagcggggcctctgtggccgctgctgctgctgctgctgtggccgtggtggagagcatggtgacagccacagaggtggcccctcctcctcctcctgtggaggtgcccatcaggaaggccaagaccaaggagggcaagggccccaatgcccggaggaagcccaagggcagcccccgggtgcctgatgccaagaagcccaagcccaagaaggtggcccccctgaagatcaagctgggcggcttcggcagcaagaggaagaggagcagcagtgaagatgatgacctggatgtggagagtgactttgatgatgccagcatcaacagctacagcgtgtctgatggcagcaccagccgcagcagccgcagcaggaagaagctgcggaccaccaagaagaagaagaagggggaggaggaggtgacagctgtggatggctatgaaacagaccaccaggactactgtgaggtgtgccagcagggcggggagatcatcctgtgtgacacctgcccccgggcctaccacatggtgtgcctggaccctgacatggagaaggcccctgagggcaagtggagctgcccccactgtgagaaggagggcatccagtgggaggccaaggaggacaacagcgagggggaggagatcctggaggaggtgggcggggacctggaggaggaggatgaccaccacatggagttctgccgggtgtgcaaggatggaggagagctgctgtgctgtgacacctgccccagcagctaccacatccactgcctgaacccccccctgcctgagatccccaacggggagtggctgtgcccccgctgcacctgcccagccctgaagggcaaggtgcagaagatcctgatctggaagtggggccagccccccagccccacccctgtgccccggcccccagatgctgaccccaacacccccagccccaagcccctggagggccggcctgagcggcagttctttgtgaagtggcagggcatgagctactggcactgctcctgggtgtctgagctgcagctggagctgcactgccaggtgatgttcaggaactaccagaggaagaatgacatggatgagccccccagcggggactttggaggagatgaggagaagagcaggaagaggaagaacaaggaccccaagtttgctgagatggaggagcgcttctaccgctatggcatcaagccagagtggatgatgatccaccgcatcctgaaccacagcgtggacaagaagggccacgtgcactacctgatcaagtggagggacctgccctatgaccaggcctcctgggagagtgaagatgtggagatccaggactatgacctcttcaagcagagctactggaaccaccgggagctgatgagaggagaggagggccggcctgggaagaagctgaagaaggtgaagctgaggaagctggagaggcctcctgagacccccaccgtggaccccaccgtgaagtatgagcggcagcctgagtacctggatgccactggaggcaccctgcacccctaccagatggagggcctgaactggctgcgcttctcctgggcccagggcacagacaccatcctggctgatgagatgggcctgggcaagacagtgcagacagctgtgttcctgtacagcctgtacaaggagggccacagcaagggccccttcctggtgtctgcccccctgagcaccatcatcaactgggagcgggagtttgagatgtgggccccagacatgtatgtggtgacctacgtgggggacaaggacagccgggccatcatcagagaaaatgagttctcctttgaagataatgccatccggggcggcaagaaggccagcaggatgaagaaggaggcctctgtgaagttccacgtgctgctgaccagctatgagctgatcaccatcgacatggccatcctgggcagcattgactgggcctgcctgattgtggatgaggcccaccggctgaagaacaaccagagcaagttcttccgggtgctgaatggctacagcctgcagcacaagctgctgctgaccggcacccccctgcagaacaacctggaggagctgttccacctgctgaacttcctgaccccagagcgcttccacaacctggagggcttcctggaggagtttgctgacatcgccaaggaggaccagatcaagaagctgcatgacatgctgggcccccacatgctgcggcggctgaaggcagatgtgttcaagaacatgcccagcaagacagagctgattgtgcgggtggagctgagccccatgcagaagaagtactacaagtacatcctgaccaggaactttgaggccctgaatgcccggggcggcggcaaccaggtgtccctgctgaatgtggtgatggacctgaagaagtgctgcaaccacccctacctgtttcctgtggccgccatggaggcccccaagatgcccaacggcatgtatgatggcagcgccctgatccgggccagcggcaagctgctgctgctgcagaagatgctgaagaacctgaaggagggcggccaccgggtgctgatcttcagccagatgaccaagatgctggacctgctggaggacttcctggagcacgagggctacaagtatgaaagaattgatggcggcatcaccggcaacatgaggcaggaggccatcgaccgcttcaatgcccctggggcccagcagttctgcttcctgctgagcaccagggctgggggcctgggcatcaacctggccacagctgacaccgtcatcatctatgacagcgactggaacccccacaatgacatccaggccttcagccgggcccaccgcatcggccagaacaagaaggtgatgatctacagatttgtgacccgggcctctgtggaggagcgcatcacccaggtggccaagaagaagatgatgctgacccacctggtggtgcggcccggcctgggcagcaagacaggctccatgagcaagcaggagctggatgacatcctgaagtttggaacagaggagctgttcaaggatgaggccacagatggcggcggggacaacaaggagggggaggacagcagcgtcatccactatgatgacaaggccatcgagcggctgctggacaggaaccaggatgaaacagaggacacagagctgcagggcatgaatgagtacctgagcagcttcaaggtggcccagtatgtggtgcgggaggaggagatgggagaggaggaggaggtggagcgggagatcatcaagcaggaggagagcgtggaccctgactactgggagaagctgctgcggcaccactatgagcagcagcaggaggacctggccaggaacctgggcaagggcaagaggatcaggaagcaggtgaactacaatgatggcagccaggaggacagaggagtgtgtggccggccccggcccccacccatgggccgcagcaccagggctgtgggccctgcccacctgcccagcctgcccccagactggcaggatgaccagagcgacaaccagagcgactacagcgtggccagcgaggagggagatgaggactttgatgagaggtctgaggccccccggcggcccagcaggaagggcctgagaaatgacaaggacaagcccctgccccccctgctggcccgggtgggcggcaacatcgaggtgctgggcttcaatgcccggcagaggaaggccttcctgaatgccatcatgagatatggcatgccaccccaggatgccttcaccacccagtggctggtgcgggacctgcggggcaagtctgagaaggagttcaaggcctacgtgtccctcttcatgaggcacctgtgtgagcctggagcagatggagctgagacctttgctgatggagtgccccgggagggcctgagccggcagcacgtgctgaccagaattggagtgatgagcctcatcaggaagaaggtgcaggagtttgagcacgtgaatggccgctggagcatgcctgagctggccgaggtggaggagaacaagaagatgagccagcccggcagccccagccccaagacccccacccccagcacccctggggacacccagcccaacaccccagcccctgtgcccccagcagaagatggcatcaagattgaggagaacagcctgaaggaggaggagagcattgaaggagagaaggaggtgaagagcacagcccctgagacagccatcgagtgcacccaggccccagccccagcctctgaagatgagaaggtggtggtggagcccccagagggggaggagaaggtggagaaggccgaggtgaaggagaggacagaggagcccatggagacagagcccaagggagctgctgatgtggagaaggtggaggagaagagcgccatcgacctgacccccatcgtggtggaggacaaggaggagaagaaggaggaggaggagaagaaggaggtgatgctgcagaatggagagacccccaaggacctgaatgatgagaagcagaagaagaacatcaagcagcgcttcatgttcaacattgctgatggcggcttcacagagctgcacagcctgtggcagaatgaggagagagctgccaccgtgaccaagaagacctatgagatctggcacagaagacatgactactggctgctggccggcatcatcaaccacggctacgcccgctggcaggacatccagaatgaccccaggtatgccatcctgaatgagcccttcaagggggagatgaacagaggcaacttcctggagatcaagaacaagttcctggcccggcgcttcaagctgctggagcaggccctggtgattgaggagcagctgcggcgggccgcctacctgaacatgtctgaggaccccagccaccccagcatggccctgaacaccaggtttgctgaggtggagtgcctggccgagagccaccagcacctgagcaaggagagcatggccggcaacaagccagccaatgctgtgctgcacaaggtgctgaagcagctggaggagctgctgagtgacatgaaggcagatgtgacccggctgcctgccaccatcgcccgcatcccccctgtggccgtgcggctgcagatgtctgaaagaaacatcctgagccggctggccaacagagcccctgagcccaccccccagcaggtggcccagcagcagtag

SEQ ID NO: 292173 - DNA, 1065 bp, Artificial Sequence
  derived and/or modified sequence
atggccagcggcctgggcagccccagcccctgcagcgctggcagcgaggaggaggacatggatgccctgctgaacaacagcctgcccccaccccacccagaaaatgaagaagatcctgaggaggacctgtctgaaacagagacccccaagctgaagaagaagaagaagcccaagaagccccgggaccccaagatccccaagagcaagaggcagaagaaggagaggatgctgctgtgccggcagctgggggacagcagcggggagggccctgagtttgtggaggaggaggaggaggtggccctgcggagtgacagcgagggcagtgactacacccctgggaagaagaagaagaagaagctgggccccaagaaggagaagaagagcaagagcaagaggaaggaggaggaggaggaggaggatgatgatgatgacagcaaggagcccaagagcagcgcccagctgctggaggactggggcatggaggacatcgaccacgtgttcagcgaggaggactaccgcaccctgaccaactacaaggccttcagccagtttgtgcggcccctgattgctgccaagaaccccaagattgctgtgtccaagatgatgatggtgctgggcgccaagtggagggagttcagcaccaacaaccccttcaagggcagcagcggggcctctgtggccgctgctgctgctgctgctgtggccgtggtggagagcatggtgacagccacagaggtggcccctcctcctcctcctgtggaggtgcccatcaggaaggccaagaccaaggagggcaagggccccaatgcccggaggaagcccaagggcagcccccgggtgcctgatgccaagaagcccaagcccaagaaggtggcccccctgaagatcaagctgggcggcttcggcagcaagaggaagaggagcagcagtgaagatgatgacctggatgtggagagtgactttgatgatgccagcatcaacagctacagcgtgtctgatggcagcaccagccgcagcagccgcagcaggaagaagctgcggaccaccaagaagaagaagaagtag

SEQ ID NO: 292174 - DNA, 5823 bp, Artificial Sequence
  derived and/or modified sequence
atggccagcggcctgggcagccccagcccctgcagcgccggcagcgaagaagaggacatggatgcactgctgaacaattcattgcccccaccccacccagaaaacgaagaagacccggaggaggacctatcagagaccgagacacccaagcttaagaagaagaaaaagcctaagaagccccgggaccctaaaatccctaaatccaaacgccagaaaaaagagcgaatgctgctgtgccggcagctcggcgacagtagtggcgaaggaccagaatttgtggaggaagaggaggaggtggccctcagatcagatagtgaaggcagtgactacaccccaggaaaaaaaaaaaagaagaagctcggccctaagaaggaaaagaagtcgaaatcaaagcgtaaggaagaagaagaggaggaagacgacgacgatgattcaaaggagcctaaaagcagtgctcagctgctggaggattggggcatggaggatattgatcatgtcttctctgaggaagattatagaactctcacaaattataaggcattctcacagtttgtaaggccgctaatagccgcaaaaaatccaaagatcgcagtgagcaaaatgatgatggttctcggcgccaaatggcgcgagttcagtactaacaatcctttcaagggctcctccggcgcatccgtcgccgctgccgccgccgcggccgtcgccgttgtggaaagtatggtaaccgcaacggaggtggccccacccccaccccctgtggaagtgccgattcggaaagccaagaccaaggaaggcaagggtccgaatgcgaggagaaagccaaagggcagtcctcgcgtaccagacgcgaagaaacctaagcctaaaaaggtagcaccccttaaaatcaaattaggcggcttcggcagcaaaagaaaacgttcctctagcgaggatgatgacctggacgtggagtcggactttgatgacgcatctatcaattcgtattcggtgagtgacgggtcgacttctaggtcttcacgcagccgcaaaaaattgaggacaactaaaaagaaaaaaaaaggggaggaggaagtgacagccgtggatggttacgaaaccgaccatcaggattattgtgaagtgtgccagcagggaggagaaatcattttatgcgacacatgcccaagggcatatcatatggtctgtctggatcccgacatggaaaaggcccctgaaggcaaatggtcatgtccccactgcgaaaaagaaggcattcagtgggaagcaaaggaagataatagtgaaggagaagaaatcctggaggaagtcggcggcgatctggaagaggaagatgatcaccacatggagttttgtagagtttgcaaagatggcggcgagctgttgtgctgtgacacatgtccaagttcttatcatatccattgtcttaatccgccgctgcctgagatccctaacggagaatggctgtgtccccgttgcacctgccccgcactgaagggcaaggtgcagaagatactgatatggaagtggggacagccaccctcacccacaccagtaccaaggccgcccgacgccgacccaaatactcccagccctaagcccctcgagggcagaccagaacggcagtttttcgtgaagtggcagggaatgtcttactggcactgttcctgggtgtctgagctacagctcgagctccactgccaggtgatgttccgaaattaccagaggaagaacgacatggacgaacctccttccggggattttggaggggacgaagaaaaatcccgcaaaaggaagaataaagaccccaaattcgctgagatggaggagcggttctaccgctacggcattaagccggaatggatgatgattcataggatattgaaccattctgttgacaaaaaaggccacgtgcactatttaatcaagtggagggatcttccatatgaccaggcctcttgggagtccgaagacgtggagattcaggattacgacttgtttaagcaaagctattggaaccaccgcgagctcatgcggggggaggagggtcgccccggtaagaagctaaagaaggtcaagttaagaaaattagagcggccccctgaaacccccaccgtggatcccacagtgaagtacgagagacagcccgagtacttagatgccacaggcggaacactgcatccttatcagatggaggggctgaactggctgcgattttcctgggctcagggaactgatactatactggctgatgaaatgggcctggggaagaccgtgcaaaccgcggtgtttctttactccttgtataaggagggccattccaagggccccttccttgttagtgcacccctgtctaccatcattaactgggagcgcgagttcgaaatgtgggcgcctgacatgtatgtggtcacatacgtgggcgacaaagacagtagagctatcatccgcgaaaatgaattttcttttgaagataacgctattagaggaggtaagaaagcgagccggatgaagaaagaagcctctgtgaaatttcatgttctactcacatcctatgagctcattaccatagatatggcaattctcggatccattgattgggcgtgcctcatcgtggacgaagcccatagacttaaaaataaccagagcaagttctttcgagtcctgaacggttactcgttacaacacaagctcctcctgaccgggactccactccagaacaatttggaagaactcttccatttgctgaacttcttgacacctgaacggtttcataatctggagggtttcctggaggaatttgccgatatcgcaaaggaagaccagattaagaagttgcatgacatgttgggaccacacatgctgaggaggctgaaagcggacgtgttcaaaaatatgccctcaaagacagagctgattgttcgcgtcgaactgtctcccatgcagaagaaatattataagtatattttaactcgaaacttcgaggcccttaatgcccgcggcggcggcaaccaagtgtccctgttgaacgtggtcatggatctcaaaaagtgctgcaaccacccctacttgtttccagtagccgctatggaggcccccaagatgccaaatggaatgtacgacggttcagccctgattcgtgcttcaggaaagctcctgctcctgcagaagatgttgaaaaaccttaaggagggaggacacagagtcctgatctttagccagatgacaaaaatgcttgatctcctggaggactttctcgagcacgaagggtacaagtacgagagaatagacgggggtatcaccggtaatatgaggcaggaggctatagatcggttcaacgcgcctggagctcagcagttttgtttccttctgagcactcgagccggtggtctgggtataaacctagccaccgccgataccgtcatcatctacgacagcgactggaatcctcacaacgacatccaggccttctcaagagctcacagaataggccagaacaaaaaagtcatgatctaccgattcgtgactcgcgcttctgtcgaagagcgaattacacaggtagccaaaaagaagatgatgctgacccacctagtggtccgccccggcctcggatcaaagacaggatccatgagtaagcaagagctagatgacatcctgaaatttggtacggaagagctgttcaaggacgaagccactgatggcggcggagataataaagagggagaagactcgtccgttattcactacgatgataaggccattgaaagactacttgacaggaatcaggatgaaactgaagacaccgaactgcaaggaatgaacgagtacctttcaagcttcaaggttgcccagtacgtggtccgcgaagaagaaatgggggaggaagaggaggtggaacgcgagatcattaaacaggaggagtccgtcgatcctgattattgggaaaagctgctgcgccaccattacgaacaacaacaggaagacttggcccgaaatctgggcaagggaaagcgtattaggaagcaggtgaattataatgatggctcccaggaggaccgcggcgtgtgcggccggcctcgccctcctcccatgggaagaagtacaagggcagttgggccagctcacctgccaagcctgcctcctgactggcaggacgaccagtctgataaccaaagcgattattctgtcgcaagcgaagagggtgacgaggacttcgatgaacgtagtgaggccccacgaagacctagccgtaagggactacgaaacgacaaggacaaaccactgcccccactcctagcgagagtgggagggaacatcgaggtacttggctttaacgcaagacagcgtaaagccttcttaaatgctatcatgagatacggcatgccgccacaggatgcctttactacacaatggctcgtgcgcgatcttagaggaaaaagcgaaaaggaatttaaggcatacgtgtctctgttcatgaggcatctgtgcgagcctggtgcagacggcgccgagaccttcgcagatggggttcccagagaaggcctgtctagacagcacgtgctgacccgcattggcgtcatgtccctgattaggaaaaaagtgcaagagttcgagcacgtgaatggacgttggagcatgcctgaactggctgaggtggaagagaacaaaaaaatgtcccaacctggtagtccatcacccaagacacccacaccatccactccaggcgacacccagcccaacaccccagcaccggtgccgcccgccgaagatggcatcaagattgaggagaattcactcaaagaagaggagagcattgagggcgaaaaggaggtgaaatctaccgccccagagactgcgatcgaatgcacccaagctcctgcccctgcctctgaagatgaaaaggtggtcgtggagcctcccgaaggggaggagaaagtggaaaaggcggaagtcaaggaacggacggaggagccaatggaaaccgaaccaaagggcgctgccgacgtggaaaaggtggaagagaagagtgcaatagacctgacaccgatcgttgtggaagacaaagaggagaaaaaggaggaggaagagaaaaaggaagttatgcttcagaatggggagactcccaaagacctcaatgatgagaagcagaaaaaaaatattaaacaaaggttcatgttcaatattgcagacgggggttttaccgagcttcactcactttggcagaacgaggagagggccgcaacagtgaccaagaagacttacgagatctggcacaggaggcatgactattggctcctcgcggggattatcaatcatgggtacgcccgctggcaggacattcagaatgatccacggtatgccattctgaacgaaccatttaaaggggagatgaaccgtggaaattttctcgaaatcaagaacaaatttcttgccaggcggttcaagttgctagagcaggccctagttattgaggagcagctgcgccgtgccgcctacttaaatatgtctgaagatccatctcacccgagtatggcgctcaacacgaggtttgctgaggtggaatgcctggccgaatctcaccagcatctgtcaaaagagagcatggccggaaataaaccggccaacgctgttcttcataaggtgctgaagcagctggaagaactgcttagtgatatgaaggctgatgttacgcggctgcctgccacgattgctcgaatccctcctgttgcagtgcgcctccagatgagcgaacgaaatatcctgtctaggcttgccaacagggcccccgaacccactcctcagcaggtagcacaacagcagtag

SEQ ID NO: 292175 - DNA, 5814 bp, Artificial Sequence
  derived and/or modified sequence
atggccagcggcctgggcagccccagcccctgcagcgccggcagcgaggaggaagatatggatgctctgttgaacaattctttgcctcctccccaccctgaagaccccgaggaggacctgtccgaaactgaaactcccaagctgaaaaagaagaagaagccaaaaaagcctcgggaccctaagatcccaaagagcaagagacaaaagaaagagaggatgctactctgcagacagctgggcgacagtagtggcgaaggtcccgaattcgtggaggaggaagaagaagtggccctgcgatctgactccgaagggagcgactacactcccgggaaaaaaaaaaagaaaaaactggggccaaagaaggagaagaaatctaagtcgaaacggaaggaagaagaagaggaagaagatgacgacgacgacagtaaggagcccaagtctagcgcacaactgctcgaggattgggggatggaagacatcgaccatgtcttctccgaggaggactaccggaccctgaccaactataaggcatttagtcagttcgtgagaccacttatcgctgctaagaatcctaagatagcggtaagcaagatgatgatggtgctcggcgccaaatggagggaattcagtaccaacaatccctttaagggttcaagcggggccagcgtagccgctgccgcggcggctgctgttgcggtggtggaatcgatggtgaccgctacagaggtggccccaccccctccacccgtggaggtgcccattcggaaagcaaaaactaaggagggaaaaggtcctaacgcccggcggaaacccaaaggctcccctcgggtgcctgacgcgaaaaagcccaagccgaagaaagttgcgcccctgaagatcaagctggggggcttcggcagtaagagaaaaagatcatcctcagaggacgatgatctcgatgttgagagtgactttgacgacgcctcaatcaattcatacagcgtttcagatgggagcacctcccgcagctcccgctcgaggaaaaagttgagaacaactaaaaaaaagaaaaaaggcgaggaagaggtgaccgctgtggatgggtacgagacggatcaccaggactattgcgaggtctgccagcagggtggagaaattatcctgtgcgacacctgtccacgtgcgtatcacatggtatgccttgatcccgacatggaaaaggcaccggagggaaagtggtcatgtccgcattgcgaaaaggagggtatacaatgggaggcgaaagaggacaatagtgagggagaggaaattctagaggaagttggcggcgatctggaggaggaagacgaccaccacatggagttttgtcgcgtgtgtaaggacggcggtgagctcctatgctgcgatacgtgcccatcgagttatcacatacactgcctgaaccccccattgcctgagataccaaacggggaatggttatgcccacggtgcacgtgccccgctctgaaaggcaaagttcagaagatcctgatttggaaatggggccagcccccctcaccgacgcctgtgcccaggccaccagatgcagacccaaatactccaagtcccaaaccactggaaggaaggcctgaacgacagtttttcgtcaagtggcaggggatgtcgtactggcactgcagctgggtgtccgaactccagctggaactgcactgccaggtgatgttcagaaattaccagcgcaaaaacgacatggatgagcccccaagcggagacttcgggggagacgaggaaaagagccggaagcggaagaataaagatccaaagttcgccgagatggaggaacgcttttatagatacggaatcaaacccgaatggatgatgattcatcggatcctaaaccattccgttgacaagaagggccacgtccactatctgattaaatggagggatctgccttacgaccaggcatcttgggaatccgaggatgtggagattcaggactatgatctcttcaaacagtcttactggaatcatagagaacttatgcgtggagaagaggggcgacctggcaaaaagctgaaaaaggtgaagctccgaaagctcgagagaccccctgaaaccccaaccgtcgaccctaccgtgaagtacgagcggcagcccgaatacctggatgctacgggcggcaccttgcatccctaccaaatggagggtttgaactggctgcggttttcatgggctcaaggtaccgacacgatcttggccgatgagatgggcctgggtaagactgtccagaccgcggttttcctgtatagcttatacaaggaaggacattctaaaggcccattcctagtaagcgcccctctgtctacgattatcaattgggaaagggagtttgaaatgtgggcacccgatatgtatgtggtcacttatgtaggagacaaagattcccgagccattataagagaaaacgagtttagctttgaggacaatgccattcgcgggggcaagaaggcgagtcgcatgaagaaagaggcttccgtcaagtttcacgttttgctaacctcatatgagctgattaccatcgacatggcaatcctgggatctattgattgggcgtgtctgatcgtggatgaagcgcacaggctgaagaacaaccaaagcaaattcttccgcgtgctaaatgggtacagtttgcagcataagttactactgaccggaactcctttgcagaacaaccttgaggagctgtttcatttactgaattttctgactcccgaacgcttccataacctcgaagggttcctagaggagttcgcagatatcgccaaggaggaccaaatcaaaaagctccatgacatgctaggaccccacatgctgagacgactcaaagcagacgtatttaagaacatgcctagtaaaactgagcttatcgtcagggtcgaactgagtccaatgcagaagaagtactacaagtacattctaacgcgaaactttgaggctctgaacgctcgcgggggcggaaatcaggtatcgcttttgaacgtggtgatggacctcaaaaaatgctgtaaccatccctacctatttcctgttgctgctatggaagcgcctaagatgccaaatggcatgtatgatggttccgcactgattcgcgctagcggcaagctgctgctcctgcagaagatgctaaagaatctgaaggaaggtggtcatagggtgctcattttttcacagatgaccaaaatgctggaccttttggaggacttcttggaacacgagggctataaatatgagaggatcgacggagggatcaccggaaatatgaggcaggaggccatagataggttcaatgctccgggggctcagcagttttgttttttattgtcaactcgtgctggggggctgggcattaacctggccactgcggacactgtaattatatatgacagtgattggaatccacacaacgatattcaagcattctccagggctcacaggattggccaaaataagaaggtcatgatctacagattcgtgacacgtgcttcagtggaggagagaattactcaagtcgctaagaaaaaaatgatgctgactcatttggtcgtgaggcctggtcttggatctaagaccggctccatgtctaagcaagaactggacgatatcctgaagttcggcaccgaggaactgtttaaggacgaagcaactgacggtgggggggacaataaggagggggaagactcatccgttatacactatgatgacaaagctattgagagattgctggatcggaatcaagatgagaccgaagatactgagctccagggaatgaacgagtatctctcgtcattcaaggtagcgcagtatgtggtccgggaggaggaaatgggggaggaagaggaggtcgagagagaaattatcaagcaggaagagtcagtggatccagactactgggaaaagctactgcgacaccactacgagcagcagcaggaggatcttgcacgaaacctgggtaaaggcaaaaggatacgcaaacaggtaaactacaacgatggctcgcaagaagatcgaggagtgtgtggccggccacgtcctcctcctatgggcagatcaactcgcgccgtcgggccagcgcatttaccttctctgcctccagattggcaggacgaccaatccgacaatcagagcgactactctgtcgcatctgaagaaggcgacgaggactttgacgagcgttccgaggcaccccggcgcccttcccgaaaaggactacggaacgataaggataaacccctgcccccactgctggcacgcgtgggaggcaatattgaagtattgggattcaacgcacggcagcgaaaagccttcctgaatgctattatgcggtatggaatgccgcctcaagatgcttttactacacagtggcttgtgcgggatttgcggggaaaaagtgagaaagagtttaaagcttacgtgagtctctttatgagacatctgtgcgagcccggagcggacggagctgagaccttcgccgacggcgtgccacgggagggactttcccgccaacatgtcctcactcgaattggcgtaatgagtctaattcgaaagaaggtccaggaatttgagcacgtgaacggcaggtggtccatgccggaactggctgaagtagaagagaacaagaagatgtcccagccggggtccccctccccaaagactccaacgccctcaactcctggagatacacagcccaacacccccgccccagtccctcctgcagaagacgggataaagatcgaggagaatagcctgaaagaggaggagtctatcgaaggcgagaaagaagtgaagtcaacagctcccgagaccgcaattgaatgtacacaagctcccgccccagcctctgaggatgagaaagttgtggtggagcctcccgaaggcgaggagaaagtcgagaaagccgaagtgaaagagaggacagaggaaccaatggagaccgagcccaaaggcgcagctgatgtggagaaggtagaagagaagagcgcaatagatcttacccccatagtcgtcgaggacaaagaggaaaaaaaggaagaggaggaaaaaaaggaggtgatgttgcagaatggcgaaactccaaaggatctgaacgacgaaaaacaaaaaaaaaacataaagcagcggttcatgtttaatattgcagatgggggcttcacagagctccatagtctatggcaaaacgaggagagagcagctaccgtcactaagaaaacctacgagatttggcaccgacgccatgactattggttactcgccggtatcattaatcacggctacgccagatggcaagatatccagaatgatcctcggtatgcgatcctaaacgagccttttaaaggtgagatgaatcgcgggaacttcctagaaattaagaacaagttcctggcccggcggtttaaattacttgaacaggctcttgttatcgaggaacaattaagaagggctgcctacctgaacatgtcggaggacccgagccaccctagcatggcactgaacactcgcttcgcagaggttgaatgcctagctgagtcccatcagcatttgagcaaggaatctatggccggaaataaacccgctaatgctgtgctgcacaaagtcctcaagcagctggaggagttgctgtccgatatgaaggcagacgtcactaggttgccagctaccattgctagaatccccccagttgcggtgagactgcagatgtctgaacgcaatattctctccaggctggccaaccgggcccccgagcccaccccacagcaggttgcgcagcagcagtag

SEQ ID NO: 292176 - DNA, 1065 bp, Artificial Sequence
  derived and/or modified sequence
atggccagcggcctgggcagccccagcccctgcagcgccggcagcgaggaggaggatatggacgcgctgctgaataattctctgcctcccccacatcctgagaacgaggaggaccctgaggaggatttatctgaaacggagactcccaagctcaaaaagaagaagaagccaaaaaagccgcgtgatcccaaaatccccaagtcaaagcggcaaaaaaaggagcggatgttgttgtgtcggcagctgggggacagctctggagagggccccgagtttgttgaagaagaggaggaggtggctctccgctccgatagtgagggatcagactatacacctggaaagaaaaagaagaaaaaactaggcccaaaaaaagagaaaaagtcgaagagtaagcgcaaggaggaggaggaagaagaagacgacgatgacgattctaaggagccaaagagctccgcccaactgctggaggactggggtatggaagacatcgaccatgtgttttcagaagaggattaccggacacttacaaattacaaggccttctctcaatttgtaaggcctctgattgccgcgaagaacccaaagattgccgtttccaagatgatgatggtgctgggcgctaagtggagagaattttctactaataatccattcaagggcagtagtggcgccagcgtggcagccgccgcagctgcagcggttgctgtggttgagtctatggtgactgccacggaggtggctccacccccacctccagtggaagtacccatcaggaaagcaaaaaccaaggagggaaaaggccccaatgcccgaaggaaacctaagggctcccctcgcgtccccgacgccaaaaagccgaaaccgaaaaaggtggctcccttaaaaatcaagctgggaggcttcggctccaagcgaaagcggtcaagctcggaagatgacgacctggacgtcgagtctgattttgatgatgcctcaataaatagctattctgtgtccgatggatcaacttctagatcctctcgaagtcgtaagaaactgcgcacaaccaagaagaaaaagaagtag

SEQ ID NO: 292177 - DNA, 1065 bp, Artificial Sequence
  derived and/or modified sequence
atggccagcggcctgggcagccccagcccctgcagcgccggcagcgaggaggaagatatggacgccctgctaaataattcactgcctcctccccatccagaaaacgaagaggaccccgaggaagatttgtcagagacagagacccccaaattaaagaaaaagaaaaaacccaaaaagcctcgagacccgaaaattcccaagtctaaacgccaaaaaaaagaacgcatgctgctttgcaggcagctgggcgacagcagcggggagggccccgaattcgtcgaggaggaagaagaagtcgccctcaggagtgattcagaggggtctgattacactccagggaaaaaaaaaaagaagaagctgggacctaaaaaggagaaaaagtccaagtccaaacggaaggaagaggaggaggaagaggatgatgatgacgacagtaaagagccaaagagttccgctcagctgctggaagactgggggatggaagacattgaccacgtgttctcagaggaggattatagaaccttaaccaattataaagctttcagccagtttgttcgaccgttgattgctgccaagaaccctaagattgcagtctccaaaatgatgatggttctgggcgccaagtggcgggagttttctaccaataaccctttcaagggcagctccggagcctccgtcgccgcagccgccgctgccgcagttgctgtggtcgagagtatggtgaccgctacagaagtggccccacccccccctccagtggaggtgcccataaggaaggccaagacgaaggagggtaaaggccctaacgcccgccggaaacccaaaggcagcccgcgggtgccagacgccaagaagccaaagccgaaaaaggtcgcaccacttaaaatcaagctgggcggcttcggcagcaagaggaagagatcttcgtctgaggatgacgacctggacgttgagtctgacttcgacgatgccagcattaattcttatagtgtgtccgacggctcaacatctcggtcttccaggtctcgcaaaaaactcaggacaactaagaaaaagaaaaagtag

SEQ ID NO: 292178 - DNA, 5822 bp, Artificial Sequence
  derived and/or modified sequence
atggccagtgggttaggatcacctagcccatgttccgcaggatccgaggaggaagatatggatgctctgctgaataactccctgcctccaccacatccggaaaacgaagaggatcccgaagaagacctctccgagacagagacccccaagctaaagaagaagaaaaaacccaaaaagcctagggacccgaaaattccgaagtctaagcggcagaagaaagagcgaatgctcctctgcaggcagctcggggattcatctggcgaaggtccggaattcgtcgaggaagaggaggaggtggccctacgtagtgattctgagggctctgattacacacccggaaaaaaaaagaagaaaaagttaggccctaagaaggaaaagaagtccaaaagcaagcgtaaggaagaggaggaggaagaggatgatgatgacgattcaaaagaaccaaagtcttctgctcagctactggaagactgggggatggaagatatcgaccacgtcttctctgaggaagactatcggaccttaacgaactataaggctttttctcagtttgtgcgcccactcattgcagccaagaaccctaagattgccgtttcaaaaatgatgatggtccttggtgccaagtggcgggagtttagtactaacaacccatttaaagggtcttctggggctagcgttgccgctgccgcagccgcagcggtggccgttgttgaatctatggtcacggccacagaagttgcaccccctccccctcccgtggaagtgccaataaggaaggccaagacaaaagagggaaagggaccaaatgcccgaagaaagccaaaaggaagtcctagggtcccagatgccaagaagccaaaacccaagaaggtcgcccctctgaaaataaaactcggcggatttggttccaagagaaagagaagttcctctgaagacgacgacctggacgtggaatccgacttcgatgatgcatcaatcaactcatattcagtctctgacgggagcacatccagatcaagtaggtcacgcaagaaactgaggacaaccaagaaaaagaaaaagggggaggaagaagtgaccgcggttgatggctacgagactgaccatcaggactattgcgaagtctgtcaacaaggaggtgaaattatattgtgtgacacgtgccctagagcataccatatggtttgcttggatcctgacatggagaaggcgcctgaagggaaatggtcttgcccacattgtgagaaggagggcatccagtgggaggctaaagaagacaactccgagggggaagaaatactagaggaggtgggcggagatcttgaggaggaggacgaccatcatatggaattttgtcgcgtttgcaaggatggtggcgaattgctgtgttgtgacacatgcccttcgtcataccacattcactgtctcaacccccctttaccagagattccaaatggagagtggctgtgccctaggtgcacttgcccagctctgaagggtaaggtgcagaagatccttatctggaagtggggccagccccctagccccaccccagtgccacgcccacccgacgccgatcccaatacaccatcgccgaagccccttgaaggccgaccagagagacaattttttgtaaagtggcaaggtatgtcttactggcactgcagctgggtttctgagctccagctagagttgcactgtcaggtcatgtttcgaaattatcagcgtaaaaacgatatggacgagcccccatccggagactttggtggcgatgaggagaagagcagaaagcgcaagaataaagacccaaagtttgctgaaatggaggagagattctaccgctatgggattaaaccggagtggatgatgattcacaggattctgaaccacagcgtggacaagaaaggacacgtgcactatcttatcaaatggcgcgatctgccttacgaccaagccagctgggaaagcgaggacgtcgagatccaggattatgacctgttcaagcaatcatattggaatcatcgagagttaatgcgcggtgaagaagggcgaccaggaaagaaactgaaaaaggtgaaactgcggaagttagaacgccctccagaaactccaacggtggatccgacagtgaagtatgaaaggcagcccgaatacctggacgctacaggcggaacactgcacccataccagatggagggacttaattggttgcgtttctcatgggctcagggcacagacacgattctggccgacgaaatggggttggggaagaccgtgcagacagccgtgtttctgtatagtctctacaaagagggccacagcaaaggccctttcctggtaagcgccccactcagtacaatcatcaactgggaaagagaattcgagatgtgggctcccgacatgtacgttgtgacctacgtaggcgataaggacagtcgcgcaatcatcagggagaacgaattttccttcgaagataacgcaattcggggtggcaagaaggccagcagaatgaagaaggaagcctccgttaaatttcatgttctactaacttcttacgaactgatcacaattgacatggctatcctcggaagcatcgattgggcctgtctaattgtggatgaggcccataggctgaaaaacaaccagtccaagtttttcagagtgcttaacggatattcactgcagcacaaactccttctgacaggcacccctcttcaaaataatctggaggagctgtttcatcttcttaacttcctaacacccgagagatttcataacctggaaggctttctggaagaatttgcagatatcgccaaggaggaccaaatcaagaagttgcacgacatgttaggtccccatatgctgcgtcgactcaaagccgatgtctttaaaaacatgccatcgaagaccgagctgattgtgagggtggagttaagcccgatgcagaaaaagtattataagtacattctgacgagaaatttcgaagcactgaatgctaggggtggaggaaaccaagtgtctctgctgaatgttgttatggacctaaaaaagtgctgcaaccacccctacctgttccccgtagctgccatggaggcccctaaaatgcctaacggcatgtacgatggaagcgctctcatccgcgctagtggaaaactgttgctcctgcagaaaatgttgaagaacttgaaggaaggtggacatcgcgttctgattttctcccagatgacgaagatgctggatctgcttgaggactttctcgaacatgagggttacaaatacgaacgtatcgatggaggtattactggtaacatgaggcaggaggctatcgacagatttaatgcacctggggcacagcaattctgcttcctgcttagcacccgcgcagggggactgggtatcaacctcgctacggctgacacagtgattatctatgacagtgattggaatcctcacaacgacatccaggcattcagtcgggcacatcggataggccagaataagaaggtgatgatctatagattcgtgacacgagcttcggttgaagagcggatcactcaggtggctaagaagaagatgatgctgacccacttggtggtcaggccagggcttgggtccaaaacaggcagtatgtccaagcaggaactggacgacatcctaaagtttgggactgaggaactgttcaaagatgaagctactgacgggggtggcgacaacaaggagggcgaagattcatccgtgatccactacgatgataaagcaatagagcgcctcttagacagaaatcaggacgagaccgaagatacggagctacaggggatgaatgaatatttaagctcattcaaagttgctcagtatgtagtgcgtgaggaagaaatgggagaagaagaggaggttgagagggagattatcaaacaagaggaaagtgttgatccagactactgggagaaactcctgagacatcactatgagcaacagcaggaagatcttgcacgtaatttgggcaagggtaaacgcattcgcaagcaagtgaattataacgatggctcacaggaggatagaggcgtttgtggtcgaccaagaccacctcctatgggaagatccactcgcgcagtgggcccagctcacttgccctccctgccccctgattggcaagatgatcagagcgacaatcagagcgattattcagtagcctctgaggaaggtgacgaagatttcgacgaaagaagtgaagctccccgacgaccgagccgcaaagggctgcgcaacgataaggacaaaccactgcctcctctactggctagagtcggagggaacatagaggtccttggttttaatgccaggcagcggaaggcttttcttaatgccattatgcgttatggtatgccgccacaggatgcttttacaacccaatggttagttcgcgacctaagaggaaaaagtgaaaaagaatttaaggcctatgtctctctctttatgcggcacctttgtgaaccgggagcagacggcgctgagaccttcgcggacggagttccgcgtgaaggcctgagcaggcagcatgtgcttactaggattggcgttatgtccctgatccgcaaaaaagtccaggagtttgagcacgtcaacggcagatggtcgatgcccgagctggctgaagtggaggagaacaagaagatgtcccagcccggtagccccagtccaaaaacccctaccccctcgactcccggtgatactcagcctaacaccccagccccagtcccaccagcagaggacgggataaagatagaggagaactccctgaaagaggaagagtcaatcgagggtgagaaagaagtgaaaagtactgctcctgaaacagctatcgagtgtacacaagcacccgctccagcctccgaggacgagaaagtggtggtggaacctccggagggggaggaaaaagtggagaaagccgaggtcaaagagagaaccgaggaaccaatggagaccgaaccaaaaggggcagccgatgttgaaaaggtcgaagagaaatccgcaatcgatctgacacctattgttgtggaggacaaagaagagaaaaaggaggaggaagagaagaaggaagtcatgcttcagaacggagaaactccaaaagatcttaatgatgaaaaacaaaaaaagaacattaaacaacggttcatgtttaacatagccgacggaggcttcacagaacttcacagtctgtggcagaacgaggaacgagcagcaacagtgacaaagaaaacttacgagatctggcatagaaggcatgactactggctgctggcaggtattatcaatcacggctacgccagatggcaggatattcaaaacgaccctcggtacgctatcctcaatgagcctttcaagggagaaatgaaccggggtaacttcttagaaatcaaaaacaagttcctcgcgaggcggtttaagcttctcgaacaggccctggtgatcgaggaacaactgcggagagccgcttatctgaatatgtctgaagatccgagccacccctcaatggctctcaacactcgctttgcagaagtcgagtgcttggcagaatctcaccagcatttgagtaaagaatctatggccggaaacaaaccagccaatgctgtcttgcataaggtgttgaagcaattggaagaactattatccgacatgaaggcagacgtgacacgcttgcctgcaaccatcgctaggatccccccagtcgccgtgcgactccaaatgtccgaaaggaatatcttgtcccgactggctaatcgagcccctgagcctacgccgcagcaggtcgcgcagcagcaata

SEQ ID NO: 292179 - DNA, 5813 bp, Artificial Sequence
  derived and/or modified sequence
atggcgtcgggactgggaagcccttcaccctgctccgctggatccgaggaagaagatatggacgctctgctcaacaatagcctgccccctcctcatcctgaggaccccgaagaagatctttccgagaccgagacgccgaaactcaagaagaaaaaaaagcccaagaagcccagggatccaaaaattccgaaatctaagcgccagaaaaaagaacgcatgctgctctgccggcagcttggggactcatctggggaaggacccgagttcgttgaggaagaggaagaagtggctctcagatctgactccgagggctctgattatactcccggtaagaagaagaagaagaagctgggccctaagaaagaaaaaaaatcaaaaagcaaacgaaaagaggaggaagaagaagaggacgacgacgatgattcaaaggagccaaaaagtagtgcacagctgttagaagactggggaatggaagacatcgaccacgttttctccgaggaggactacaggactctgacaaattataaggctttctctcaatttgtcaggcccttgatcgcagctaagaacccaaagattgctgtgagcaagatgatgatggttttaggcgctaagtggcgcgaattctcaaccaataacccttttaaggggtcatccggggcatccgtggctgctgcagctgctgctgctgtggcggtggtggagtccatggtcaccgcaacagaggtagcccctccccctcctccggtggaggtcccgatccgaaaagcaaagactaaagagggtaaaggcccaaacgctcggagaaagcccaagggatctcctcgcgtacccgacgcgaaaaagcctaaacccaagaaagtcgccccattaaaaatcaagctcggcggattcgggtctaagaggaagcgctccagcagtgaagatgatgatttagacgtagagagcgactttgacgatgccagcatcaactcgtactctgtgtccgacggcagcacctcgaggtcatctcgctctcgtaagaagttgcgcacaacgaagaaaaagaaaaagggggaagaagaggtcaccgctgtggatgggtacgagacggaccaccaggattattgcgaggtgtgccaacagggtggtgagattatcctgtgcgacacctgtccccgtgcctaccacatggtgtgtctcgatcctgacatggaaaaagccccagagggcaaatggtcatgtccacactgtgagaaggagggaatccaatgggaagcaaaggaagacaacagcgagggcgaagagatcctggaggaggttggtggggatctggaggaggaagacgatcaccatatggaattctgcagggtgtgtaaagatggaggagagctcctttgttgtgacacctgtcctagctcttaccatatacactgtctgaaccccccactacccgaaatacctaatggcgagtggctgtgcccgaggtgtacttgtcccgcactgaaaggaaaagtccagaaaatcctgatctggaaatggggccagcctccctctccaaccccagtacctcgccctcctgacgctgacccaaatacccctagccctaagcccctcgagggcaggcctgaaagacagttctttgtgaagtggcagggtatgagttattggcattgcagctgggtcagcgagttgcagctggagctgcattgtcaagttatgtttagaaactaccagcgcaaaaatgacatggatgagcctccgtccggagatttcggcggagatgaggagaaatcgcgcaaacggaagaacaaagaccctaaattcgccgaaatggaagaacgcttctaccggtatggtatcaagccagagtggatgatgatacaccggatcctgaaccactcagttgataaaaaaggccatgtacactacctgattaaatggagagatctgccctacgatcaggcctcatgggagtctgaggatgttgagattcaggattacgatctattcaagcagtcttattggaaccacagggaactcatgagaggcgaggagggacggcctggaaaaaaacttaagaaagtcaagctgcggaaattagagcggccacctgagacccccaccgttgatcccacagtgaaatacgaaagacagcccgaatatctcgacgctacagggggtactctccacccatatcagatggagggactgaactggctgcggttctcctgggcccaggggacagacactatactggccgatgaaatgggcttagggaagaccgtacaaaccgctgtgttcctctattctctgtacaaggaaggtcactcgaaagggcctttcctggtcagtgcccctctttccactattataaactgggaacgcgagtttgaaatgtgggcacccgacatgtacgtagtcacatacgttggagacaaagactcccgagcaattatccgggagaatgagttttcttttgaggataatgcaattagaggagggaagaaggcaagtaggatgaaaaaggaagcctcagtgaagttccacgtattgttgaccagctatgaattgatcaccatagacatggcgattctgggctcaatcgactgggcctgtctgatcgtcgacgaggcacacaggctgaagaacaatcagagtaaatttttccgggtgctcaacgggtacagtctgcaacataaactgttattgaccggcaccccgttacagaataatctggaagagctcttccaccttctgaattttcttacccccgaacgctttcacaatcttgaaggattcttagaagaatttgctgacatcgccaaagaagatcagatcaagaagttacacgatatgctaggacctcatatgctacggaggttaaaggcagacgtgttcaagaacatgccgagtaagactgaactgatcgtgcgggtcgagttgagccctatgcagaagaagtattacaagtatatactgactcggaacttcgaagcacttaacgccaggggcggtggaaatcaagtgtctctgctgaatgtggttatggatttaaagaagtgctgtaaccacccctatctgttcccagttgcggcaatggaggcccctaaaatgcctaacggaatgtatgatggaagcgcactgattcgagcctcagggaaactgttactcctgcagaagatgttaaaaaatcttaaagaggggggacatcgggtgctgatcttcagccagatgaccaagatgcttgacctactggaggattttctggagcacgaaggctacaagtacgagaggattgacggtggtatcacaggaaatatgcgccaggaggccatcgatcgattcaacgccccaggggctcagcagttctgctttctgctttccacacgcgcagggggacttgggatcaacctggctactgctgacaccgttattatttatgacagcgactggaatccacataatgacattcaggccttcagtcgggcacatcgaattggacagaataagaaagtgatgatttacaggttcgtcacccgagctagcgtggaagagaggataacacaagtggctaagaagaaaatgatgctgacccacctggtggtcaggcccggtttgggtagcaagactggcagtatgagcaaacaggaactggatgacattttgaagtttggcactgaagaactgttcaaggatgaagctactgatgggggaggcgacaataaagaaggcgaggacagctctgtcatccactatgacgacaaagccattgaacgtttgctggatcggaaccaggacgagactgaggatactgaattacaggggatgaacgagtatctgagctccttcaaagtcgcccaatacgtggtgcgagaggaggaaatgggtgaggaagaggaggttgagagggaaatcatcaagcaggaagagtccgttgacccagactactgggaaaagctgcttcggcatcactacgagcagcagcaggaggatttggctcggaatctgggaaagggcaagcgcatccgtaaacaggtaaattacaacgatggcagtcaggaagataggggcgtgtgcggcagaccgcgtccccctcctatggggaggtccacccgggctgttggtcctgcccatttgccctctctgccacccgactggcaggatgaccagtcagacaaccaaagtgattatagtgtagcgtccgaagagggcgacgaggattttgacgagcggagtgaagctcccaggcgacctagcaggaaaggcctgcgaaacgacaaggacaagccactgccacctctgctggcaagagtaggaggaaacatcgaagtgttgggatttaatgcacgtcaacgaaaagcttttctgaacgctattatgaggtacgggatgcccccacaggatgccttcactacgcagtggctggtgagagacctgcgcggaaagtccgagaaggagtttaaagcttatgtcagcctgtttatgcggcatctgtgcgagcccggtgcagacggggctgaaacttttgcagatggggtgccacgagaggggctttctaggcaacacgtgttgacaagaattggagtaatgtctctaatccgtaaaaaagtccaggagtttgagcatgtgaacggtcgttggtccatgccagaacttgcagaggtggaagagaacaaaaaaatgtcgcagcccggaagcccaagccccaaaaccccaacaccatctacgcccggagacacccagccaaacaccccggctcctgtgccaccagccgaggatggcattaaaatcgaagagaattcactcaaggaggaggaaagtatcgagggagaaaaggaagtaaaatccaccgcacccgagactgcaatcgagtgcactcaggctccagcgccagcttctgaagatgaaaaggtggtggttgaacctcccgaaggcgaagagaaggtggagaaagccgaggttaaagaaagaaccgaggaaccaatggaaaccgaacccaaaggcgcagctgatgtcgaaaaggttgaagagaagtccgccattgatctgactcctatagttgttgaggataaggaggagaaaaaagaggaagaggaaaagaaggaagtgatgctgcagaatggagaaacgcctaaagatctaaacgacgagaaacaaaagaagaatattaagcagaggtttatgttcaatattgcagatggcggatttacagaactgcactcactgtggcagaacgaggaacgggctgccaccgtcaccaaaaaaacatatgagatatggcatagacgccacgactactggttgctggctggtattatcaatcatggttacgctcgctggcaggatatacagaacgacccccgttacgccattctgaatgagccattcaaaggggagatgaaccgaggcaacttcctggagatcaaaaacaagttcctggccagacgctttaaactgctggagcaggcccttgtcatcgaggaacagttaagacgagcggcttatttgaacatgtcagaagacccgagtcacccttccatggctctgaataccagatttgcagaagtggagtgtctcgctgaatctcatcagcatctttccaaagagagcatggcaggtaacaagcccgctaacgccgtgttacacaaagtactgaaacagcttgaggaactgctctctgatatgaaggctgatgtcaccagactgccagccacaatcgctaggatccctcctgtggcagtgcgactgcagatgtccgagcggaacattctcagtcgcctggccaatcgggcacctgaaccgacaccacagcaggtcgcacagcaacaata

SEQ ID NO: 292180 - DNA, 1065 bp, Artificial Sequence
  derived and/or modified sequence
atggcctctgggttaggatctccaagtccatgcagcgcaggaagcgaagaggaggatatggatgctctgttaaataacagccttccgccaccccaccccgagaacgaggaagatcctgaggaggatctgtccgagaccgagactcccaagcttaagaaaaaaaagaagccaaaaaaacccagggatccgaaaattcctaagtctaagcgtcaaaagaaagaacgcatgttgttgtgtaggcaactgggagattcatccggggagggccctgagttcgtggaagaagaggaagaggtggcccttaggtctgactcagagggttctgactacaccccgggtaaaaaaaagaagaaaaaactggggccaaagaaagagaaaaagtcaaagtcgaagagaaaagaggaggaggaggaagaagacgatgacgatgacagcaaggagcccaaatctagcgcccagttactggaagactggggaatggaagacatcgaccacgtgttctcagaggaggactacaggacactaacaaactacaaggctttttcgcaatttgttaggccgctcattgccgcaaaaaaccccaagattgctgtttcaaagatgatgatggtactgggcgctaagtggcgcgagttcagtacgaataacccatttaagggatcaagcggcgcttcagtggccgctgccgctgcggctgccgtcgctgtggtggaaagcatggtaaccgctactgaagttgcacctcctccacccccagtggaggtacctatccgcaaggccaaaactaaagaaggaaaggggccaaatgctagacggaagccaaagggatcgccacgcgtgccggacgcgaagaaaccgaagcctaagaaggtagccccattaaaaattaaactgggaggctttggaagtaagaggaagcgttcttcaagcgaagacgatgacttggacgtcgagagcgacttcgacgatgccagcattaactcttattctgtgagcgatggaagcacgtcacgcagcagccgctctaggaaaaagcttcggaccacaaagaagaagaagaagtag

SEQ ID NO: 292181 - DNA, 1065 bp, Artificial Sequence
  derived and/or modified sequence
atggcttctggactgggatccccctctccttgctccgcaggcagcgaggaggaggacatggatgctctgttgaacaacagcttgccgcctccccaccccgaaaatgaagaagatccagaagaggacttgagcgaaaccgagacgccaaagctcaagaagaagaaaaaacccaagaagcctcgggacccgaagatccccaagtccaagaggcagaaaaaggagcgtatgctgctctgccggcagcttggggatagctcaggcgagggcccagagtttgtcgaagaagaagaggaggtggcgctcagaagtgactctgaggggtcggactataccccgggaaagaaaaaaaaaaaaaaactcgggccaaagaaggaaaagaaatctaagtctaaacggaaggaagaagaagaggaagaagatgatgatgatgactcaaaggaacccaagagctctgcccagctgcttgaagattgggggatggaagatatcgatcatgtattttccgaagaagattaccgtactctcacaaattataaagccttctcacagttcgttcggccactgatcgcggcaaaaaaccccaagatcgcagtctcaaagatgatgatggtgctgggcgctaaatggcgcgaattctccaccaacaatcctttcaagggatcatccggggcaagtgtggccgctgccgcagctgcagcagttgctgtagtcgagtcaatggttacagcaacagaagttgcgcctcccccaccccctgtcgaagtgccaatcaggaaagccaaaacgaaagaggggaagggcccaaacgcaaggagaaagcccaaagggagcccacgggtgccagacgccaaaaagcctaaaccaaaaaaagtcgcccctcttaagattaagttggggggtttcggctccaaacggaagaggtccagtagtgaggatgatgaccttgacgtggaaagcgatttcgatgacgcttcaataaattcttatagcgttagcgatgggagcacctcgaggtccagtcgcagcagaaagaaattgagaactacgaaaaaaaagaaaaaatag

SEQ ID NO: 292182 - protein, 354 aa, Artificial Sequence
  derived and/or modified sequence
MASGLGSPSPCSAGSEEEDMDALLNNSLPPPHPENEEDPEEDLSETETPKLKKKKKPKKPRDPKIPKSKRQKKERMLLCRQLGDSSGEGPEFVEEEEEVALRSDSEGSDYTPGKKKKKKLGPKKEKKSKSKRKEEEEEEDDDDDSKEPKSSAQLLEDWGMEDIDHVFSEEDYRTLTNYKAFSQFVRPLIAAKNPKIAVSKMMMVLGAKWREFSTNNPFKGSSGASVAAAAAAAVAVVESMVTATEVAPPPPPVEVPIRKAKTKEGKGPNARRKPKGSPRVPDAKKPKPKKVAPLKIKLGGFGSKRKRSSSEDDDLDVESDFDDASINSYSVSDGSTSRSSRSRKKLRTTKKKKK

SEQ ID NO: 292183 - DNA, 1317 bp, Artificial Sequence
  derived and/or modified sequence
atgggctgtccgtgggggggcggggcctgtgcggtgggatttcccggccggtgtttcaggccctttaagaggcgacgctggagccggagccattttccccccttcggccgcggcgaggaggagccggagcgggagtgacaccgagccggacccagcgcgacctgcggcggctccgggtgactcgggccagtgtagaggtcctcaggccgccggcaggagcagctgggccaattccctggccgggagcggaaggggatggcgtcgggcctgggctccccgtccccctgctcggcgggcagtgaggaggaggatatggatgcacttttgaacaacagcctgcccccaccccacccagaaaatgaagaggacccagaagaggatttgtcagaaacagagactccaaagctcaagaagaagaaaaagcctaagaaacctcgggaccctaaaatccctaagagcaagcgccaaaaaaaggagcgtatgctcttatgccggcagctgggggacagctctggggaggggccagagtttgtggaggaggaggaagaggtggctctgcgctcagacagtgagggcagcgactatactcctggcaagaagaagaagaagaagcttggacctaagaaagagaagaagagcaaatccaagcggaaggaggaggaggaggaggaggatgatgatgatgattcaaaggagcctaaatcatctgctcagctcctggaagactggggcatggaagacattgaccacgtgttctcagaggaggattatcgaaccctcaccaactacaaggccttcagccagtttgtcagacccctcattgctgccaaaaatcccaagattgctgtctccaagatgatgatggttttgggtgcaaaatggcgggagttcagtaccaataaccccttcaaaggcagttctggggcatcagtggcagctgcggcagcagcagcggtagctgtggtggagagcatggtgacagccactgaggttgcaccaccacctccccctgtggaggtgcctatccgcaaggccaagaccaaggagggcaaaggtcccaatgctcggaggaagcccaagggcagccctcgtgtacctgatgccaagaagcctaaacccaagaaagtagctcccctgaaaatcaagctgggaggttttggttccaagcgtaagagatcctcgagtgaggatgatgacttagatgtggaatctgacttcgatgatgccagtatcaatagctattctgtttctgatggttccaccagccgtagtagccgcagccgcaagaaactccgaaccactaaaaagaaaaagaaa

SEQ ID NO: 292184 - protein, 559 aa, Artificial Sequence
  derived and/or modified sequence
MNPLFGPNLFLLQQEQQGLAGPLGDSLGGDHFAGGGDLPPAPLSPAGPAAYSPPGPGPAPPAAMALRNDLGSNINVLKTLNLRFRCFLAKVHELERRNRLLEKQLQQALEEGKQGRRGLGRRDQAVQTGFVSPIRPLGLQLGARPAAVCSPSARVLGSPARSPAGPLAPSAASLSSSSTSTSTTYSSSARFMPGTIWSFSHARRLGPGLEPTLVQGPGLSWVHPDGVGVQIDTITPEIRALYNVLAKVKRERDEYKRRWEEEYTVRIQLQDRVNELQEEAQEADACQEELALKVEQLKAELVVFKGLMSNNLSELDTKIQEKAMKVDMDICRRIDITAKLCDVAQQRNCEDMIQMFQVPSMGGRKRERKAAVEEDTSLSESEGPRQPDGDEEESTALSINEEMQRMLNQLREYDFEDDCDSLTWEETEETLLLWEDFSGYAMAAAEAQGEQEDSLEKVIKDTESLFKTREKEYQETIDQIELELATAKNDMNRHLHEYMEMCSMKRGLDVQMETCRRLITQSGDRKSPAFTAVPLSDPPPPPSEAEDSDRDVSSDSSMR

SEQ ID NO: 292185 - DNA, 1680 bp, Artificial Sequence
  derived and/or modified sequence
atgaaccccctgttcggccccaacctgttcctgctgcagcaggagcagcagggcctggccggccccctgggcgacagcctgggcggcgaccacttcgccggcggcggcgacctgccccccgcccccctgagccccgccggccccgccgcctacagcccccccggccccggccccgccccccccgccgccatggccctgagaaacgacctgggcagcaacatcaacgtgctgaagaccctgaacctgagattcagatgcttcctggccaaggtgcacgagctggagagaagaaacagactgctggagaagcagctgcagcaggccctggaggagggcaagcagggcagaagaggcctgggcagaagagaccaggccgtgcagaccggcttcgtgagccccatcagacccctgggcctgcagctgggcgccagacccgccgccgtgtgcagccccagcgccagagtgctgggcagccccgccagaagccccgccggccccctggcccccagcgccgccagcctgagcagcagcagcaccagcaccagcaccacctacagcagcagcgccagattcatgcccggcaccatctggagcttcagccacgccagaagactgggccccggcctggagcccaccctggtgcagggccccggcctgagctgggtgcaccccgacggcgtgggcgtgcagatcgacaccatcacccccgagatcagagccctgtacaacgtgctggccaaggtgaagagagagagagacgagtacaagagaagatgggaggaggagtacaccgtgagaatccagctgcaggacagagtgaacgagctgcaggaggaggcccaggaggccgacgcctgccaggaggagctggccctgaaggtggagcagctgaaggccgagctggtggtgttcaagggcctgatgagcaacaacctgagcgagctggacaccaagatccaggagaaggccatgaaggtggacatggacatctgcagaagaatcgacatcaccgccaagctgtgcgacgtggcccagcagagaaactgcgaggacatgatccagatgttccaggtgcccagcatgggcggcagaaagagagagagaaaggccgccgtggaggaggacaccagcctgagcgagagcgagggccccagacagcccgacggcgacgaggaggagagcaccgccctgagcatcaacgaggagatgcagagaatgctgaaccagctgagagagtacgacttcgaggacgactgcgacagcctgacctgggaggagaccgaggagaccctgctgctgtgggaggacttcagcggctacgccatggccgccgccgaggcccagggcgagcaggaggacagcctggagaaggtgatcaaggacaccgagagcctgttcaagaccagagagaaggagtaccaggagaccatcgaccagatcgagctggagctggccaccgccaagaacgacatgaacagacacctgcacgagtacatggagatgtgcagcatgaagagaggcctggacgtgcagatggagacctgcagaagactgatcacccagagcggcgacagaaagagccccgccttcaccgccgtgcccctgagcgaccccccccccccccccagcgaggccgaggacagcgacagagacgtgagcagcgacagcagcatgagatag

SEQ ID NO: 292186 - DNA, 1680 bp, Artificial Sequence
  derived and/or modified sequence
atgaatccgctgttcggaccaaatcttttcttactccaacaggagcagcagggtctggctgggcccttaggggatagcctgggaggagatcattttgctgggggaggggacctgccgcctgccccactgtcaccagctggccctgctgcgtattctccacccggccctggaccagcgcccccagccgccatggctctgcgaaacgacttaggatctaacatcaacgtccttaagactctaaatctgcggtttcgatgtttcctggcgaaggtgcacgagttagagcggaggaacagattgctagagaagcagctgcagcaagcccttgaggaaggaaaacaggggagacgggggttaggtagaagagatcaggctgtgcagaccgggttcgtgtctcctatacgtccactcggcctgcagcttggtgctcgtccggccgctgtgtgttctcctagtgctcgggtgttaggtagcccagcaaggagccccgcaggtccactggctccttcagcggcatccctgagctcctcctcaacaagtacctctacaacttattcttcttccgcccggttcatgccaggcaccatatggtctttctctcacgccaggcgtctgggacccgggctagagccgactctggtccaggggcccggcctctcatgggtgcacccagacggcgtgggcgttcagattgacaccataactcctgagatccgcgcgctgtacaatgtgcttgccaaagtaaaacgagagcgggacgagtataagcggcggtgggaggaagaatacaccgtgcgtattcaactccaggaccgagtgaacgagctccaggaagaggcccaggaagccgatgcctgccaggaagaacttgcactgaaggtagaacagcttaaggcagagctggtggtattcaaggggctcatgagcaacaatctctccgaattagatacaaaaatccaggaaaaagcaatgaaagttgacatggacatctgccgccgaatcgacatcactgcaaaactgtgcgacgtcgctcaacagagaaactgtgaggatatgatccagatgtttcaagtgccttctatgggaggtaggaagcgggaaagaaaggccgcagttgaagaagatacttccctgagtgagtctgaagggcctcggcagcccgacggagacgaggaggaatccactgccttgagcataaacgaagaaatgcagaggatgctgaatcagctgcgggaatatgatttcgaggatgattgcgactctttaacatgggaagagactgaggagacactcctgctctgggaagatttctccggctatgccatggcggctgctgaggcccagggagagcaagaggattctctggagaaggtcattaaggatacagagtcactgttcaagacccgggagaaggagtatcaggagacgatagatcagattgagctagagctggcaaccgctaaaaacgacatgaaccgccatctccacgagtacatggagatgtgcagcatgaagagaggcctcgacgtgcaaatggagacttgccgccgtctgatcacgcaatctggcgacaggaaatcgcctgcctttaccgccgtgcccctgtcggatccgcccccacccccctcggaagccgaagatagtgacagggacgtatcatctgactcttcaatgagatag

SEQ ID NO: 292187 - DNA, 1680 bp, Artificial Sequence
  derived and/or modified sequence
atgaaccccctgtttggccccaacctcttcctgctgcagcaggagcagcagggcctggccggccccctgggggacagcctgggcggggaccactttgctgggggcggggacctgcccccagcccccctgagccctgctggccctgctgcctacagccccccaggccctggccctgcccccccagctgccatggccctgagaaatgacctgggcagcaacatcaacgtgctgaagaccctgaacctgcgcttccgctgcttcctggccaaggtgcatgagctggagaggaggaaccggctgctggagaagcagctgcagcaggccctggaggagggcaagcagggccggcggggcctgggcagaagagaccaggccgtgcagacaggctttgtgagccccatccggcccctgggcctgcagctgggcgcccggcctgctgctgtgtgcagccccagcgcccgggtgctgggcagccctgcccggagccctgctggccccctggcccccagcgctgccagcctgagcagcagcagcaccagcaccagcaccacctacagcagcagcgcccgcttcatgcctggcaccatctggagcttcagccacgcccggcggctgggccctggcctggagcccaccctggtgcagggccctggcctgtcctgggtgcacccagatggagtgggcgtgcagattgacaccatcaccccagagatccgggccctgtacaacgtgctggccaaggtgaagcgggagagagatgagtacaagaggcgctgggaggaggagtacacagtgcgcatccagctgcaggacagagtgaatgagctgcaggaggaggcccaggaggctgatgcctgccaggaggagctggccctgaaggtggagcagctgaaggccgagctggtggtgttcaagggcctgatgagcaacaacctgtctgagctggacaccaagatccaggagaaggccatgaaggtggacatggacatctgcagaagaattgacatcacagccaagctgtgtgatgtggcccagcagaggaactgtgaggacatgatccagatgttccaggtgcccagcatgggcggcaggaagcgggagaggaaggctgctgtggaggaggacaccagcctgtctgagagcgagggcccccggcagccagatggagatgaggaggagagcacagccctgagcatcaatgaggagatgcagaggatgctgaaccagctgcgggagtatgactttgaagatgactgtgacagcctgacctgggaggagacagaggagaccctgctgctgtgggaggacttcagcggctacgccatggctgctgctgaggcccagggcgagcaggaggacagcctggagaaggtgatcaaggacacagagagcctcttcaagacccgggagaaggagtaccaggagaccatcgaccagatcgagctggagctggccacagccaagaatgacatgaacagacacctgcacgagtacatggagatgtgcagcatgaagaggggcctggatgtgcagatggagacctgccggcggctcatcacccagagcggggacaggaagagccctgccttcaccgctgtgcccctgagtgaccccccacctcctccttctgaggccgaggacagcgacagagatgtgtccagtgacagctccatgaggtag

SEQ ID NO: 292188 - DNA, 2677 bp, Artificial Sequence
  derived and/or modified sequence
tgctcctgcaccggtctgcatctcccagcagaaggcgcagccatgaatccgttattcggccccaacctcttcctcctgcagcaggagcagcagggcctggccgggccactgggggactcactgggaggcgaccacttcgccgggggaggagacttgcccccggcgcctctctcgccggccggccctgctgcctactcgccgcccgggccgggcccggccccgcctgccgccatggccctccgcaatgacctgggctccaacatcaacgtgctcaagaccctgaacctccggttccgctgcttcctggccaaggtgcatgagctggagcgccggaaccggctgttggagaagcaactgcagcaagcgctggaggagggtaagcagggccggcggggcctgggtcgtcgcgaccaggcagtgcagaccggcttcgtcagccccatccggcccctggggctgcagctgggcgcccggccggccgctgtctgcagcccttcggcgcgcgtgctgggctcgcccgcgcgctccccggccggccccctcgcgccctccgcggccagcctctcgtcgtcctccacctccacctccaccacctattcctcgtcggcccgcttcatgcccggcaccatctggtcgttctcgcacgcccgccggctcgggccgggactggagcccactctggtgcaagggcctggcttgtcgtgggtgcacccggatggggtgggcgtccagatcgacaccatcacgcccgagatccgcgctctctacaacgtgctggccaaagtgaagcgggagcgggacgagtacaagcggaggtgggaagaggagtacacggtgcggatccagctgcaagaccgtgtaaatgagctccaggaggaagcccaggaggctgatgcctgccaggaggagctggcactgaaggtggaacagttgaaggctgagctggtggtcttcaaggggctcatgagtaacaacctgtcggagctggacaccaagatccaggagaaagccatgaaggtggatatggacatctgccgccgcatcgacatcaccgccaagctctgcgatgtggctcagcagcgcaactgcgaggacatgatccagatgttccaggtcccatccatgggggggcggaagcgggagcgcaaggctgccgtcgaggaggacacctccctgtcggagagtgaggggccccgccagcccgatggggatgaggaggagagcacagccctcagcatcaacgaggagatgcagcgcatgctcaaccagctgagggagtatgattttgaggacgactgtgacagcctgacttgggaggagactgaggagaccctgctgctttgggaggatttctcaggctatgccatggcagctgcagaggcccagggagagcaggaagatagcctggagaaggtgattaaagatacggagtccctgttcaaaacccgggagaaggagtatcaggagaccattgaccagatagagctggagttggccacggccaagaacgacatgaaccggcacctgcacgagtacatggagatgtgcagcatgaagcgcggcctggacgtgcagatggagacctgccgccggctcatcacccagtctggagaccgaaagtctcctgctttcactgcggtcccgcttagcgacccgccgccgccgccaagcgaggctgaggactccgatcgcgatgtctcatctgacagctccatgagatagagacctgcctcccccttgcacccgaggccctcgcagcagggagctcagcgaggcagagggtggggctgcacagaggggaacatcagctgcagctctgcaccaggccggtccctggggactggggcgctcctccctcaggctttctccctcagtcttggcttctccagggctctggggtgtctggagctaggcttggccctaccattctggggccatttccaccacagttggggctctcctgccttcacgcgtgggtgtctgctacttccccatctttaaaatgctgccagagcgattgcggcccctcaccttgtccacgtatcaggaatgtgaatgtgggacctttcctccatccctgttgtccggagccagctcactgtcttccacactggtgctaactggcccaggcactggagtggaatagaatgcagctggaggctacgcatggcctctgcagcacacgcagctggagagggcttctgtccctgtcagcggcagagggcgttggggctggccggggcaccttgtccctgctatggtccacgtgctcacgctgtccacctgccaggtggagtgtatgtggctgtggccctccctcgtggaggtgccgtgctttaaagaggccttagtgcccgggatgggcacagtgttttgaagggaggtgggagctcttgctctcctggtcactgcagaatgacagagaaggtgaagctccatgcatgtgtgcgcgggtgtatgtgcgctcagggtctctgtttaagtatcagctaaagatgtgcttcctccgtgtctgtcatacactgagaccaacaggctacagtgtccctgattcttggaaaagcctggagaagctggggagatgcggttcacaatgcctcggtataggaggctgtgttgagctgacattcaaatggattctttaataataatgaaactggcgagtatttattgtgca

SEQ ID NO: 292189 - DNA, 1680 bp, Artificial Sequence
  derived and/or modified sequence
atgaaccccctgttcggccccaacctgttcctgctgcagcaggagcagcaggggctagctggccccctcggggatagtctggggggagaccattttgctgggggaggcgatctcccgcccgccccgcttagcccagctggcccagccgcttactctccccctggtccaggcccggcacccccggcagctatggccttgaggaatgacctgggttccaatatcaacgtgctgaagaccctcaacctacgttttaggtgcttcctggctaaggtgcatgaacttgagcggaggaatagactgttggagaaacaacttcagcaggcgctggaagaaggcaaacaggggcgtaggggtctgggccgccgagaccaggctgtccaaaccggttttgtttctcctatacgcccgctggggctgcagctgggtgctagaccagccgcggtctgcagtccttctgctcgcgtcttgggatctccggcccggtccccagcagggccactggcccccagtgcagctagcctatcttcgtcatcaacttccacaagcaccacttacagtagctctgctaggttcatgcctgggaccatttggtccttttcacacgctcgccgactgggaccagggctggaacccaccctggttcagggcccagggctgtcgtgggtgcaccccgacggagtgggagtccagatcgacactatcacgccagaaatacgggccttgtacaatgtccttgccaaggtgaagagggagcgtgacgaatataaacgaaggtgggaggaggaatacacagtccgtattcagctccaggaccgcgtcaacgagctgcaagaggaagcccaggaggcagacgcctgtcaggaggaattagccctgaaggtggagcaactgaaagctgagcttgtggtattcaagggcctgatgtccaacaacctgtccgaactggacacgaaaatccaagaaaaagctatgaaagtggacatggacatatgtcgccggattgatatcacggccaagctgtgcgatgtcgcacagcagagaaactgtgaggatatgattcagatgttccaagtgccctctatgggcggaaggaagagagagaggaaggcagccgtggaagaggatacatccttatcagagagtgaagggcctcgacagccggatggagatgaggaggaatccacggctcttagcattaacgaggagatgcagcgcatgctcaaccaactgcgagagtacgatttcgaagatgattgcgatagcttaacttgggaggagacagaagagacacttttactctgggaggacttctcagggtatgctatggctgcggcggaggctcagggggagcaggaagactcattagagaaagtaataaaagatacagaatctctgtttaaaactcgtgaaaaggagtaccaggagaccatcgatcagatcgagctggagctggctacggccaagaatgacatgaatcggcaccttcacgaatacatggagatgtgctcaatgaagcgcggacttgatgtacagatggagacgtgtaggcgattaatcacacagtccggcgacagaaaatcacccgcttttacagccgtaccgctatctgatcctcctcctccaccttctgaggccgaagactcggacagggacgtgtcaagtgatagctccatgagatag

SEQ ID NO: 292190 - DNA, 1680 bp, Artificial Sequence
  derived and/or modified sequence
atgaatcccctatttgggcctaacctgtttttgctgcagcaggaacaacagggcctcgctggcccactgggagattcccttggcggagaccatttcgcaggcggtggggacctacctcccgctcccctgagccctgcgggaccagccgcatattcaccacctgggcctggaccagcaccacctgccgctatggccctgagaaatgaccttggatctaacattaacgtcttgaagacactgaacctccggttcagatgtttcctggcaaaagtgcacgagcttgagaggcgaaaccgcctcttggaaaagcaattgcagcaagccttggaagagggtaagcagggcaggcgcggtcttggacggagggatcaggccgttcagaccgggtttgtgtcgccaatccgccctctcggcttgcagctgggagcacgtccggctgcagtgtgcagtccctcagctagagtgcttggcagtccagccagatcacctgctggccctcttgcgccttccgccgcaagcctgtcttcctcctctacatcaacatcaactacttactcaagctcagctaggttcatgcccggtacaatctggagcttttcacacgccaggcggttgggcccaggcctggaacccaccttggtacaggggccaggactctcctgggttcatcctgatggtgtgggagtgcagattgacacgatcacacccgagattcgcgcactctataacgtgttggcaaaagttaagagagagagggacgaatacaagcgacggtgggaggaggaatatacagtgaggattcagctgcaagatcgcgtgaacgaactgcaagaggaggcccaagaagccgacgcttgtcaggaagagctcgcattgaaagttgagcaactcaaagcagagcttgtggtcttcaaagggctgatgtctaataacctgtctgagctggatacaaagattcaggagaaagctatgaaggtggatatggatatctgccgaaggatagatataaccgcaaagctatgtgatgtggctcagcagcggaactgcgaagacatgattcagatgttccaggtaccatctatgggtggtcggaaacgggagcgcaaggctgctgttgaggaggacacatctttaagcgagtctgaggggcctagacagccagatggcgacgaggaagaatcaactgcgctgtcaattaatgaggaaatgcaaagaatgctcaatcaattgcgcgaatatgactttgaggacgactgtgactccctgacctgggaagagaccgaggaaaccctgctgctatgggaagatttttccggctacgctatggcggctgctgaggctcagggagagcaggaggactcgctggaaaaggtcattaaggacaccgagagtctgttcaagactagagaaaaagaatatcaggaaacaatcgaccagatagagctggagcttgccaccgccaagaacgacatgaatagacacttgcatgagtatatggagatgtgttccatgaagcgcggactagatgtgcagatggagacttgtagacgtctgattacccagtcaggcgacagaaagagcccagcctttacggccgtgccactaagtgacccacccccaccacctagcgaggccgaagactcagatcgggacgtgtccagcgacagcagcatgcgctag

SEQ ID NO: 292191 - DNA, 594 bp, Artificial Sequence
  derived and/or modified sequence
atgggcggcagaaagagagagagaaaggccgccgtggaggaggacaccagcctgagcgagagcgagggccccagacagcccgacggcgacgaggaggagagcaccgccctgagcatcaacgaggagatgcagagaatgctgaaccagctgagagagtacgacttcgaggacgactgcgacagcctgacctgggaggagaccgaggagaccctgctgctgtgggaggacttcagcggctacgccatggccgccgccgaggcccagggcgagcaggaggacagcctggagaaggtgatcaaggacaccgagagcctgttcaagaccagagagaaggagtaccaggagaccatcgaccagatcgagctggagctggccaccgccaagaacgacatgaacagacacctgcacgagtacatggagatgtgcagcatgaagagaggcctggacgtgcagatggagacctgcagaagactgatcacccagagcggcgacagaaagagccccgccttcaccgccgtgcccctgagcgaccccccccccagacaggccagactgagaacccccatcgccatgagccacctgaccgccccctag

SEQ ID NO: 292192 - DNA, 771 bp, Artificial Sequence
  derived and/or modified sequence
atgagcaacaacctgagcgagctggacaccaagatccaggagaaggccatgaaggtggacatggacatctgcagaagaatcgacatcaccgccaagctgtgcgacgtggcccagcagagaaactgcgaggacatgatccagatgttccagaagaagctggtgcccagcatgggcggcagaaagagagagagaaaggccgccgtggaggaggacaccagcctgagcgagagcgagggccccagacagcccgacggcgacgaggaggagagcaccgccctgagcatcaacgaggagatgcagagaatgctgaaccagctgagagagtacgacttcgaggacgactgcgacagcctgacctgggaggagaccgaggagaccctgctgctgtgggaggacttcagcggctacgccatggccgccgccgaggcccagggcgagcagcaggaggacagcctggagaaggtgatcaaggacaccgagagcctgttcaagaccagagagaaggagtaccaggagaccatcgaccagatcgagctggagctggccaccgccaagaacgacatgaacagacacctgcacgagtacatggagatgtgcagcatgaagagaggcctggacgtgcagatggagacctgcagaagactgatcacccagagcggcgacagaaagagccccgccttcaccgccgtgcccctgagcgaccccccccccccccccagcgaggccgaggacagcgacagagacgtgagcagcgacagcagcatgagatag

SEQ ID NO: 292193 - DNA, 594 bp, Artificial Sequence
  derived and/or modified sequence
atgggaggccgtaagcgggaaaggaaggccgcagtcgaagaggacacctccctgtctgaatctgaaggaccaaggcaacctgacggggacgaggaggagagtaccgccctgtcaattaacgaagaaatgcagaggatgctgaaccagttacgggagtacgattttgaagatgattgcgactctttgacttgggaggaaactgaggagactctcctcctgtgggaggacttttccgggtatgccatggccgccgccgaggcccaaggggaacaggaagatagcttggagaaggtgattaaagatacagaatctttgttcaaaacacgagaaaaggagtatcaagagacaattgatcagattgagcttgaactcgcgacggctaagaacgacatgaatagacatcttcacgagtatatggaaatgtgttctatgaaacgaggactggatgtacagatggaaacctgccggcggctaatcacgcaatctggtgaccgtaaatcaccagctttcaccgctgtgcctctgagcgatccaccaccacggcaagctcgcctgcggacaccgatagccatgagccatcttactgctccatag

SEQ ID NO: 292194 - DNA, 771 bp, Artificial Sequence
  derived and/or modified sequence
atgtccaataacctgtctgagctggacactaaaatccaggaaaaggccatgaaagtcgacatggatatctgccggcggatcgacatcaccgcgaaattgtgtgatgtggcacagcagcgaaactgcgaagacatgatccaaatgttccagaaaaagcttgttccctcaatgggtggaaggaaaagggagaggaaggcagcagtggaagaagatacaagcctctctgagagcgaaggcccgcgccagcctgacggagatgaggaggagagtactgccctaagcatcaatgaggaaatgcaaagaatgcttaaccagctccgggagtatgactttgaggacgactgtgattctctcacatgggaggaaacagaagagactctgctgctgtgggaggactttagcggatacgccatggcagccgcagaagcccagggtgagcaacaggaggatagtctggagaaggtgatcaaggacacggagagtctattcaagaccagggaaaaggaataccaggagaccatagaccagattgaacttgagcttgccaccgctaagaatgacatgaataggcatctccatgagtatatggagatgtgcagcatgaagcggggacttgacgtccagatggagacctgtaggcgccttatcacccagagtggtgacagaaagtcccctgctttcactgctgtgccattatctgaccccccacctccgccatccgaagccgaggattcagaccgagatgtgagctcagactcatccatgcgatag

SEQ ID NO: 292195 - DNA, 594 bp, Artificial Sequence
  derived and/or modified sequence
atgggcggcaggaagcgggagaggaaggctgctgtggaggaggacaccagcctgtctgagagcgagggcccccggcagccagatggagatgaggaggagagcacagccctgagcatcaatgaggagatgcagaggatgctgaaccagctgcgggagtatgactttgaagatgactgtgacagcctgacctgggaggagacagaggagaccctgctgctgtgggaggacttcagcggctacgccatggctgctgctgaggcccagggcgagcaggaggacagcctggagaaggtgatcaaggacacagagagcctcttcaagacccgggagaaggagtaccaggagaccatcgaccagatcgagctggagctggccacagccaagaatgacatgaacagacacctgcacgagtacatggagatgtgcagcatgaagaggggcctggatgtgcagatggagacctgccggcggctcatcacccagagcggggacaggaagagccctgccttcaccgctgtgcccctgagtgaccccccaccccggcaggcccggctgcggacccccatcgccatgagccacctgacagccccctag

SEQ ID NO: 292196 - DNA, 771 bp, Artificial Sequence
  derived and/or modified sequence
atgagcaacaacctgtctgagctggacaccaagatccaggagaaggccatgaaggtggacatggacatctgcagaagaattgacatcacagccaagctgtgtgatgtggcccagcagaggaactgtgaggacatgatccagatgttccagaagaagctggtgcccagcatgggcggcaggaagcgggagaggaaggctgctgtggaggaggacaccagcctgtctgagagcgagggcccccggcagccagatggagatgaggaggagagcacagccctgagcatcaatgaggagatgcagaggatgctgaaccagctgcgggagtatgactttgaagatgactgtgacagcctgacctgggaggagacagaggagaccctgctgctgtgggaggacttcagcggctacgccatggctgctgctgaggcccagggcgagcagcaggaggacagcctggagaaggtgatcaaggacacagagagcctcttcaagacccgggagaaggagtaccaggagaccatcgaccagatcgagctggagctggccacagccaagaatgacatgaacagacacctgcacgagtacatggagatgtgcagcatgaagaggggcctggatgtgcagatggagacctgcagaagactcatcacccagagcggggacaggaagagccctgccttcaccgctgtgcccctgagtgaccccccacctccacccagcgaggctgaagattctgacagagatgtgtccagtgacagctccatgaggtag

SEQ ID NO: 292197 - DNA, 594 bp, Artificial Sequence
  derived and/or modified sequence
atgggcggccggaagcgggagcggaaggccgccgtggaggaggacacctccctgtccgaatccgagggccccaggcaaccagatggcgacgaagaagagtcaactgcactatctatcaatgaagagatgcagcggatgctgaaccaactccgtgaatacgacttcgaggatgattgcgattccttgacatgggaagagaccgaagagacccttcttctttgggaagactttagtggatatgccatggctgccgcagaggctcaaggtgagcaagaggactctctggaaaaggtgattaaagatactgagtcgctgtttaagactagggaaaaagaatatcaagaaacaattgatcagatcgagctcgagctcgccacagccaagaatgacatgaatagacacctgcacgagtatatggagatgtgctcaatgaagaggggccttgatgtccagatggagacctgcagaagactgattacccaatctggcgataggaaaagccccgcctttacggcagtccctctctctgatccccctcctcggcaggcccgcttaaggactccaatcgccatgtctcacttaacagcgccctag

SEQ ID NO: 292198 - DNA, 771 bp, Artificial Sequence
  derived and/or modified sequence
atgagcaacaacctgagcgagctggacaccaagatccaggagaaggctatgaaggtcgatatggacatttgtcggagaatagacataaccgccaagctatgtgacgtggcccagcagcgaaattgcgaggacatgatccagatgtttcagaagaaacttgtcccctctatgggcggcagaaagagggaacgcaaagccgcggtggaggaggacacatcgctctctgagagcgagggcccaaggcagcccgacggagatgaggaagaaagcaccgctctgtccattaacgaggaaatgcaacgtatgcttaaccagctgcgtgagtacgatttcgaggacgactgtgactcacttacttgggaggagaccgaggagacacttctgctgtgggaagatttcagtgggtatgctatggcagcagctgaggcacagggcgagcagcaagaagacagcctagagaaagtgataaaggataccgagtctctgttcaagacacgcgaaaaggaatatcaggaaactatagatcagattgagctagagctggcaactgccaaaaacgatatgaatcggcatctccacgaatatatggagatgtgtagtatgaagcggggtttggatgtgcaaatggaaacatgccggagactcatcactcagagtggggaccgcaaaagcccagcatttacagctgtgcccctgagcgatcccccccctcctcctagcgaagctgaagactctgaccgtgacgtatccagcgattcatctatgagatag

SEQ ID NO: 292199 - DNA, 1899 bp, Artificial Sequence
  derived and/or modified sequence
aaaaagactttttttagaaaaaaatttcctcttgagccatcatgcacatctgactgcagccccagcgagcccttccttccttgtctgactgctcttcttctcgatttcttcttgttctgccttctcggtttgcagccctgacccccgctgtgtgtctggcccttggtgactgtccgtgtttctgttcctgtcattgtaactgtgacttttctctctgtctgcccccccttcctactggttcatgcttctcccccattcccaccctctctgcccggcctcccgctcccgccctttctcctcatgcacccggcctcgtctctgtagtctctgcacttgtctcccattaaggtcccatccatgggggggcggaagcgggagcgcaaggctgccgtcgaggaggacacctccctgtcggagagtgaggggccccgccagcccgatggggatgaggaggagagcacagccctcagcatcaacgaggagatgcagcgcatgctcaaccagctgagggagtatgattttgaggacgactgtgacagcctgacttgggaggagactgaggagaccctgctgctttgggaggatttctcaggctatgccatggcagctgcagaggcccagggagagcaggaagatagcctggagaaggtgattaaagatacggagtccctgttcaaaacccgggagaaggagtatcaggagaccattgaccagatagagctggagttggccacggccaagaacgacatgaaccggcacctgcacgagtacatggagatgtgcagcatgaagcgcggcctggacgtgcagatggagacctgccgccggctcatcacccagtctggagaccgaaagtctcctgctttcactgcggtcccgcttagcgacccgccgccgcgccaagcgaggctgaggactccgatcgcgatgtctcatctgacagctccatgagatagagacctgcctcccccttgcacccgaggccctcgcagcagggagctcagcgaggcagagggtggggctgcacagaggggaacatcagctgcagctctgcaccaggccggtccctggggactggggcgctcctccctcaggctttctccctcagtcttggcttctccagggctctggggtgtctggagctaggcttggccctaccattctggggccatttccaccacagttggggctctcctgccttcacgcgtgggtgtctgctacttccccatctttaaaatgctgccagagcgattgcggcccctcaccttgtccacgtatcaggaatgtgaatgtgggacctttcctccatccctgttgtccggagccagctcactgtcttccacactggtgctaactggcccaggcactggagtggaatagaatgcagctggaggctacgcatggcctctgcagcacacgcagctggagagggcttctgtccctgtcagcggcagagggcgttggggctggccggggcaccttgtccctgctatggtccacgtgctcacgctgtccacctgccaggtggagtgtatgtggctgtggccctccctcgtggaggtgccgtgctttaaagaggccttagtgcccgggatgggcacagtgttttgaagggaggtgggagctcttgctctcctggtcactgcagaatgacagagaaggtgaagctccatgcatgtgtgcgcgggtgtatgtgcgctcagggtctctgtttaagtatcagctaaagatgtgcttcctccgtgtctgtcatacactgagaccaacaggctacagtgtccctgattcttggaaaagcctggagaagctggggagatgcggttcacaatgcctcggtataggaggctgtgttgagctgacattcaaatggattctttaataataatgaaactggcgagt

SEQ ID NO: 292200 - DNA, 594 bp, Artificial Sequence
  derived and/or modified sequence
atgggagggagaaagcgtgagagaaaggcggctgtggaagaagacacctccctatccgagtccgaaggccctagacaaccagacggcgatgaagaggaatccaccgctctgagtattaacgaagaaatgcaaagaatgcttaatcagctgcgtgagtatgattttgaggatgattgcgattcccttacctgggaagaaaccgaggaaacactgcttttgtgggaggacttctctgggtacgccatggcagcagcggaggcacagggcgagcaagaggatagtctggaaaaagtgatcaaggacacagaatccctcttcaaaacccgcgagaaggaatatcaagagactattgaccagattgaactcgagttggccactgcgaaaaacgacatgaatagacacctacatgagtacatggaaatgtgtagcatgaagagaggactggacgtgcaaatggagacatgccggcgtctaatcacacagagtggagaccgcaaaagccccgcattcaccgccgtgcccctgtcagaccctccaccaagacaagcacggctgaggactcccattgcaatgtctcatttgaccgctccatag

SEQ ID NO: 292201 - DNA, 771 bp, Artificial Sequence
  derived and/or modified sequence
atgagcaacaatctctccgaactcgatacgaagatacaggaaaaggctatgaaggtcgacatggacatctgtcggaggatcgatataactgccaaactatgtgatgttgcccaacaacgcaactgtgaggacatgattcaaatgttccagaaaaaactagtaccctctatggggggacggaaaagggaacggaaggcggctgtcgaggaggacacaagcttgtctgaatcagaaggcccaaggcagccagacggcgatgaagaagagagtactgcgttatctattaatgaggagatgcagaggatgctcaaccagctcagggaatatgacttcgaagatgactgtgatagcctgacctgggaggaaactgaggagacccttctcctgtgggaggactttagtggctatgccatggccgctgcagaggctcaaggtgaacaacaagaggattcattagagaaggttatcaaggataccgagtcactgtttaaaacaagagaaaaggaataccaggagactatcgatcaaatcgaactagagcttgccaccgctaaaaatgacatgaataggcacctgcacgaatacatggagatgtgtagcatgaagagggggctggacgtccaaatggaaacctgcagacggctcattacacagagcggggaccgcaagtcccccgcattcaccgcggtgccattaagcgatccccctcctcctccctccgaagcagaggactccgacagggacgtgtcttccgactcaagcatgcgctag

SEQ ID NO: 292202 - DNA, 2553 bp, Artificial Sequence
  derived and/or modified sequence
gggctggttccagcagcaaccgccgggcagggcccctcccgaccgcgacctcctgtccgcaccgtagggcagccggccgggccagcctccctcacaggactaccgaggaagaggtaggatttcactctgtcacccaggcgggagtgcagtggtgcgatcatagcggggactacaagtgtgcaccacatgcttgtctacgaacctgaagtattctgatgcagtggagagagtgtagaactctggagtgaagagatctgcctggaaccctgactctatcactaggagattccttggaatgaaaccaatgggagtccagggtttgggagagtctcatcagagcagatgggcgagcagcagccagaacgcttgttgcctttggctgagaacactatcctggatctgaatgtcttctttgtcactccaagagatggccctgggactgagaagtggatggcagctgtgacagcaggagaggactgcctgaggctccccgggcagaggctctggtgccaggttagcagcaggaccgacggcagacccagcagccagagagtgaaaggccaacttctcagcccccctggcctgctccatcccgtcaactctcccaggaactaccagcacccacctaagggacaccagccgccctgtgaaaggacaagccagagacccctggagctcggatgtggaaggatgtggggagctgcctggtcctgtctcccactgccgcagagggacatgagggatggagcaggactggcaacctggagaggaagtcactcctggtcctgagccctgttcaaagggccaggctcccctctaccccattgtccatgtgacagagctcaaacacacagaccccaactttccctccaactccaatgctgtcggcacctcaagtggctggaacaggattggcacgggctgcagccatacctgggactggaggttctcctgcacccagcaggcccttttgcccctactaggagcctgggaatggagcattgacacagaagcaggaggaggaaggagagagcagagccagaaaccctgcagcaacggagggcctgcagcagctggagagggccgagtcctcccaagcccctgctttccatggagcacttgccaggcagccattcacaaagtgtgtcgttggcagggatgcaccagaccagctctcctggcaccatccctggccacactcaaggaacacagttatccctgatgctcttggcctctctccctgagcagtactcaccagggcccacctgactcacgatagcccctgcccaacaggtacaagtggagctggtgctggccccgggctgcctcccacccaggtgcctggcctgtggctccaaggtggactcccaggcccagcaccaccagcagcagcaacagacccctctgcccaggccggcctcacacggggctaaagacacccacggctcctgccagcagggtccacacaggccacctcgctgcccgtcctctccctcagcccctccttaagcactcctgcaggctctcccagctgctgccagcacatcccgggtgaggcttgcccggacccacaggcaacctgggcccctgccaagccagaatccactctcagctgtgcctttctcggccctgagcaaagcagatcagtggagtcagaggcacctttggggcagacaggggaagaggagtgcattcattggggaaaggttgggagctacccagccgtaggctggcaaatcagctcctggccgggggcaccctgacttacaggctttgcctgatttctgtggtgtaaattctccccttgtgcccagtttcaagctactaatgtgtcgtggaccgtaactggggagcaacacagagtcagctggccacgatgccagtcactgctgagctgccaaaccttacgcgtcccagggggcacctgcctagaggccaggcactgcactggaccctcagacacagcttgtgcagcctgcttaggagcttgggaaatgactgtcatctgtgatcttgctggtcccaggaagcccattttacagatgaggaaactgaggcccaaaggcacgaagcgacctctctcagcctcaccaagagcactggaaggtggtgtagggctgcggccgtgcgcacagagagcacagcagcaggaaggctcctgggcctccagctcccctccctcagaagcctcccagagtgacaggaaggtcagaggccccggggagggggcggggccaggatctggcaatttcctatccctctctgttggctctgtgcatctaattactccttgagtcatctgttgctaaccaggaggggaaattaaatattaataatgtaatacttctctgtgattaccccttgttggggacagatcagagggcagatgctgccccatacagacaggggacacatgctgcggaatgtgcataatgcctcttgaaagaaccaccttataggattccacgcggtcagactcaaaactgctgctgcttcctgccttcctcctcacctcccccaacctggccactttaattaaaactccatttaatc

SEQ ID NO: 292203 - protein, 386 aa, Artificial Sequence
  derived and/or modified sequence
MNEPTENRLGCSRTPEPDIRLRKGHQLDGTRRGDNDSHQGDLEPILEASVLSSHHKKSSEEHEYSDEAPQEDEGFMGMSPLLQAHHAMEKMEEFVCKVWEGRWRVIPHDVLPDWLKDNDFLLHGHRPPMPSFRACFKSIFRIHTETGNIWTHLLGCVFFLCLGIFYMFRPNISFVAPLQEKVVFGLFFLGAILCLSFSWLFHTVYCHSEGVSRLFSKLDYSGIALLIMGSFVPWLYYSFYCNPQPCFIYLIVICVLGIAAIIVSQWDMFATPQYRGVRAGVFLGLGLSGIIPTLHYVISEGFLKAATIGQIGWLMLMASLYITGAALYAARIPERFFPGKCDIWFHSHQLFHIFVVAGAFVHFHGVSNLQEFRFMIGGGCSEEDAL

SEQ ID NO: 292204 - DNA, 1161 bp, Artificial Sequence
  derived and/or modified sequence
atgaacgagcctaccgaaaaccggctcggttgcagcagaacacccgagccggacattcggctgcgaaaagggcatcagttagatgggacacgacgcggcgacaacgattcccaccagggtgacctggagccaatcctcgaggcatctgtgttatccagccaccacaagaagtcttctgaggaacatgaatactccgatgaggccccccaggaagatgagggctttatgggcatgtctccgctcttgcaggcccatcatgctatggaaaagatggaagaatttgtgtgtaaagtttgggagggtcgctggagggtcatcccacacgatgtgctgcccgattggctaaaggacaatgactttctgctgcacggtcaccgacctcctatgccaagcttccgcgcctgcttcaagagtatttttagaatccacactgagaccgggaatatttggacccacctgttgggttgtgtatttttcttgtgtctgggcatcttttacatgtttcggccaaacatcagctttgtggcgcctctacaggaaaaagtcgtttttggcctgtttttcctcggcgctattctctgcctttcattttcctggctgttccacaccgtgtactgtcacagtgagggcgtgtctcgtctcttctctaagttggattacagcggcatcgctctgttgatcatgggctcctttgtcccatggctttactattccttctactgtaacccccagccatgttttatttacctgatcgttatttgtgtactgggcatcgccgctatcatcgtgagccagtgggatatgtttgcaactccccagtacaggggtgtgcgtgctggagttttcctggggctcggcctaagtgggattatcccaaccctgcactacgtcatctccgaagggtttctgaaagctgcaaccattgggcagatcggctggcttatgcttatggcctcattgtacattaccggcgctgcgctctatgctgctaggatccccgaacggttctttccgggtaaatgtgacatttggtttcactcacatcagctgttccacatatttgtggtggccggggcattcgtccacttccacggcgtgtccaatctccaggagttcaggttcatgataggtgggggctgctccgaggaagatgccctttag

SEQ ID NO: 292205 - DNA, 4018 bp, Artificial Sequence
  derived and/or modified sequence
gcggcggcggcggtcgctgtcgcggcggcgagagcgcgattccagaagcggcatcgcggcggcggcagcggcggcggctacaccgggcttggccccctccctcctccgttcccccctcctcccccctcccctcagcggtggctcccaagaagtccgagacacgcggatcaactcactatcctgaaggtccattctcccaagaagaggggacagaaagacagatctatttgtaagaaaggcttgggtatcccatgaacgagccaacagaaaaccgattggggtgcagcaggactccagagccagatataaggctcagaaaagggcaccaactggatggtacacgaagaggtgataatgacagccaccaaggagatttggagcccattttagaggcatctgttctatcttcccatcataaaaaaagctctgaggaacatgaatacagtgatgaagctcctcaggaagatgagggctttatgggcatgtcccctctcttacaagcccatcatgctatggaaaaaatggaagaatttgtttgtaaggtatgggaaggtcggtggcgagtgatccctcatgatgtactaccagactggctcaaggataatgacttcctcttgcatggacaccggcctcctatgccttctttccgggcctgttttaagagcattttcagaatacacacagaaacaggcaacatttggacacatctcttaggttgtgtattcttcctgtgcctggggatcttttatatgtttcgcccaaatatctcctttgtggcccctctgcaagagaaggtggtctttggattatttttcttaggagccattctctgcctttctttttcatggctcttccacacagtctactgccactcagagggggtctctcggctcttctctaaactggattactctggtattgctcttctgattatgggaagttttgttccttggctttattattctttctactgtaatccacaaccttgcttcatctacttgattgtcatctgtgtgctgggcattgcagccattatagtctcccagtgggacatgtttgccacccctcagtatcggggagtaagagcaggagtgtttttgggcctaggcctgagtggaatcattcctaccttgcactatgtcatctcggaggggttccttaaggccgccaccatagggcagataggctggttgatgctgatggccagcctctacatcacaggagctgccctgtatgctgcccggatccccgaacgctttttccctggcaaatgtgacatctggtttcactctcatcagctgtttcatatctttgtggttgctggagcttttgttcacttccatggtgtctcaaacctccaggagtttcgtttcatgatcggcgggggctgcagtgaagaggatgcactgtgatacctaccagtctccagggactatgaccctaaaccagggcctgcggcacttgcgggcctccctgctggctactgatgccagtaccagaggagccccaaaactttgacagcctcgtgggctttgtgacggcccagtggctctgcgtggtacatgactgagaagagaaaaacaaaaataaatcatacctcaaaggatggagtgcatcaattgggagaaaaggagacatagcccaaaccctggcttattcttgggatctactgattgcgggctctgcaagacccttggcaaactggcttctgatccatatcatatttatttgtagaagatggcgaaacagtttagctggtggttctttcttctccctttctctctctctatgacaataatacaaaccaatttaagtgaacatttatatccgataaggggtgggagtgtgattttaaatgctcttttgggagaacaaagaaattaatgtaaataagatttctaactgtttaaataagactttatataaatgtttaaaacataggggtaagggagggagggagaatttttgtatagaatgaaacatgcaagtaccacacactgtttgaattttgcacaaaaagtgactgtaggatcaggtgatagccccggaatgtacagtgtcttggtgcaccaagatgccttctaaaggctgacataccttggaccctaatggggcagagagtatagccctagcccagtggtgacatgaccactccctttgggaggcctgaggtagaggggagtggtatgtgttttctcagtggaagcagcacatgagtgggtgacaggatgttagataaaggctctagttagggtgtcattgtcatttgagagactgacacactcctagcagctggtaaaggggtgctggaggccatggaggagctctagaaacattagcatgggctgatctgattacttcctggcatcccgctcacttttatgggaagtcttattagagggatgggacagttttccatatccttgctgtggagctctggaacactctctaaatttccctctattaaaaatcactgccctaactacacttcctccttgagggaatagaaatggacctttctctgacatagttcttggcatgggagccagccacaaatgagattctgacgtgtccaggtttctcctgagctcatctacatagattggtagacccttcctttggattaggaaagatgagttttacctctggtacactgtcttggtaagcctggatgtgacagacacctcggctctccttgaataagaaagccagcagaactcttaaagccagttgtagtacggagttgtcagcactcactgaacctcactttacagggataagagtggtgtggcattttaaatacaatggtatgttattgccagggagtgaggtacaagacgatggctcatgtcacaggcctacctgatacggtgtcagagaaagtggtggggaaaggatctggttcatggaattctgatcttggcccataggtgaaccaccaaaatagtgctcgagtcttaggttactgtcatcaaagacttgggatgactccattatatcctggggttgtgggtattagaactaaatatggaggtcctgagcatggggactggcgtcctcagtaggtgtttgggaatatgggaagggtctcctatttattcaatagagttttctcagttattttcctcccttgcccttgcaatctccagcaaaaggtgggatctaggaagaaagaatccagtgtagaagttgagaagaacttgaacgttttggttctggataaggtcactgtcctaggtgctaggtggaccgagcaaaagactcagtggatgaactggtgcagtgcctgacagaataaagaacagtattaatccctttgagaaagcatagtccagcaggacagtggccatttggacagaagcccacttagtttcttgggagcaacagcacgtatcagaagccagacttgctcttcggtcatgcactttgggatacagcgtataggtgcagccctgtcacaacaccaacagaagtagcagcctctgggtgcagtcacccacaccccaaagctggaaggatctggttcaacatagcacaaacccttaggaaaaatgaaattaacatcactgatgtgtaatccagtaaaatctccctttttcgggtgtgtatgtgggcatgtgcccatttctatgtgtgtgtctacgtgcagctcactaccaacagcctcatgtgcacttgacctgacagtgctcgctgagaactctcaccaggttggcgcctgaatgccttactctcagcagtcagaggcttgcttgctctgtgcagatttttaattttcttttttggccctaggctggttgggacctctacagcttcattctttcaccattaaatagtggcctttttcagtattttccctcttcccctttataaattatgctaaagccacaaagcacatttttggggatcatagaaggttggggttccagaaaggcatctgtgtgatggttccattgatgtgggatttccctacttgctgtattctcagtttctaataaaaagaaccaaatgaaatatg

SEQ ID NO: 292206 - DNA, 1161 bp, Artificial Sequence
  derived and/or modified sequence
atgaatgagcccacagagaaccggctgggctgcagcaggaccccagagccagacatccggctgaggaagggccaccagctggatggcaccaggagaggagacaatgacagccaccagggcgacctggagcccatcctggaggcctctgtgctgagcagccaccacaagaagagcagcgaggagcacgagtacagtgatgaggccccccaggaggatgagggcttcatgggcatgagccccctgctgcaggcccaccacgccatggagaagatggaggagtttgtgtgcaaggtgtgggagggccgctggagggtcatcccccatgatgtgctgcctgactggctgaaggacaatgacttcctgctgcacggccacaggcctcccatgcccagcttccgggcctgcttcaagagcatcttccgcatccacacagagaccggcaacatctggacccacctgctgggctgtgtgttcttcctgtgcctgggcatcttctacatgttccggcccaacatcagctttgtggcccccctgcaggagaaggtggtgtttggcctcttcttcctgggcgccatcctgtgcctgtccttctcctggctgttccacacagtgtactgccacagcgagggcgtgtcccggctcttcagcaagctggactacagcggcatcgccctgctgatcatgggcagctttgtgccctggctgtactacagcttctactgcaacccccagccctgcttcatctacctgattgtcatctgtgtgctgggcattgctgccatcatcgtgtcccagtgggacatgtttgccaccccccagtaccggggcgtgcgggccggggtcttcctgggcctgggcctgagcggcatcatccccaccctgcactacgtgatcagcgagggcttcctgaaggccgccaccatcggccagatcggctggctgatgctgatggccagcctgtacatcactggagctgccctgtatgctgcccgcatccctgagcgcttcttccctggaaaatgtgacatctggttccacagccaccagctgttccacatctttgtggtggccggggcctttgtgcacttccacggcgtgagcaacctgcaggagttccgcttcatgattggaggcggctgcagtgaagaagatgccctgtag

SEQ ID NO: 292207 - DNA, 1161 bp, Artificial Sequence
  derived and/or modified sequence
atgaacgagcccaccgagaaccggctgggctgcagccggacccccgaacccgacatccggctaaggaaaggccaccagctggacggaactaggcgcggcgataacgatagccaccagggggatttggagccgatattagaggcctctgtgctcagctctcaccataagaagagtagcgaagaacatgaatactccgatgaggccccacaagaggatgaggggttcatgggcatgagccccctgctgcaggctcaccatgcaatggagaaaatggaggaatttgtgtgcaaggtctgggagggacgctggcgggtgatccctcacgacgtcctccctgattggctcaaagacaacgatttcctgctgcacgggcatcggccgccaatgccctcatttagagcttgttttaagtccatctttagaatccacacagagaccggaaatatttggacccatctgttgggatgcgtattttttctgtgcttgggcattttctacatgtttcgtcccaacatttcttttgtggctcctctgcaggaaaaggtcgtgttcggccttttttttctaggcgcaatcttgtgtttatcctttagttggctgtttcatacagtctactgtcacagtgaaggcgtcagccggttgttctctaaactcgactactcaggtatcgccttgcttatcatgggctcttttgtgccttggttatactactccttctactgtaacccccagccatgctttatttatctcatcgttatctgcgtgctggggattgcagccatcatcgtgtctcagtgggatatgttcgccactcctcagtatcgcggggttcgcgcaggcgtcttcttgggcctcggactttctgggatcatcccgactctccactacgtgatcagcgagggctttctcaaagcagccacaattggacagatcggatggctgatgttaatggcaagcctgtacatcacgggggcagctctctatgccgccaggatccctgaacgcttctttcctggaaaatgcgatatctggttccattcacaccagctgttccacatcttcgtcgtggcaggagccttcgtgcactttcatggagtgagcaatttacaggaatttcgtttcatgatagggggaggctgtagtgaagaagatgcgctgtag

SEQ ID NO: 292208 - DNA, 1161 bp, Artificial Sequence
  derived and/or modified sequence
atgaacgaacccacagaaaatagattgggctgtagcaggacaccggaacccgacattcggctcagaaaaggacatcaactggacggtacacgcaggggtgataacgattctcatcagggtgacctagagccaattctcgaagctagcgttctgagcagtcaccacaagaaaagctctgaggaacacgagtactccgacgaggcaccccaggaggatgaaggcttcatggggatgtcccctcttctacaggcccatcacgctatggagaagatggaggaattcgtctgcaaagtgtgggaagggcgttggagggtgatcccccatgacgtactaccagactggttgaaggacaatgactttttgctccacggccatcgccctcccatgccatcttttcgcgcatgcttcaagagtatctttcgaattcacaccgagaccggaaatatttggactcacctcctggggtgcgtgtttttcctatgtttgggaattttctacatgttccgacccaacatttcctttgtggctcctctccaggagaaggtggtgttcggcctgttcttcctcggagctattctgtgcctgtccttctcctggctttttcacactgtctattgccactcagaaggcgtgtcccgactcttttctaagctcgactactctggaattgccctcctgatcatgggctcttttgtgccctggctctactatagtttctactgtaatccccagccatgcttcatctacctcatcgttatctgcgtcctgggaattgccgctattatcgtgtcacagtgggatatgttcgctactcctcagtacaggggcgtccgcgcaggggttttcttgggcctggggttaagcggcattattcccaccttgcattacgtcatatccgaaggctttctgaaggccgcaactattggccagattggctggcttatgctgatggcaagtctgtacattacaggggctgccctgtatgcagccagaattccggagcgattcttcccaggcaagtgtgacatatggttccatagtcaccagctctttcatattttcgtagttgcaggagcctttgtccactttcacggcgtaagtaatttacaggagttcaggtttatgatcggcggaggctgttccgaagaggacgccctgtag

SEQ ID NO: 292209 - DNA, 1161 bp, Artificial Sequence
  derived and/or modified sequence
atgaacgagcccaccgagaacagactgggctgcagcagaacccccgagcccgacatcagactgagaaagggccaccagctggacggcaccagaagaggcgacaacgacagccaccagggcgacctggagcccatcctggaggccagcgtgctgagcagccaccacaagaagagcagcgaggagcacgagtacagcgacgaggccccccaggaggacgagggcttcatgggcatgagccccctgctgcaggcccaccacgccatggagaagatggaggagttcgtgtgcaaggtgtgggagggcagatggagagtgatcccccacgacgtgctgcccgactggctgaaggacaacgacttcctgctgcacggccacagaccccccatgcccagcttcagagcctgcttcaagagcatcttcagaatccacaccgagaccggcaacatctggacccacctgctgggctgcgtgttcttcctgtgcctgggcatcttctacatgttcagacccaacatcagcttcgtggcccccctgcaggagaaggtggtgttcggcctgttcttcctgggcgccatcctgtgcctgagcttcagctggctgttccacaccgtgtactgccacagcgagggcgtgagcagactgttcagcaagctggactacagcggcatcgccctgctgatcatgggcagcttcgtgccctggctgtactacagcttctactgcaacccccagccctgcttcatctacctgatcgtgatctgcgtgctgggcatcgccgccatcatcgtgagccagtgggacatgttcgccaccccccagtacagaggcgtgagagccggcgtgttcctgggcctgggcctgagcggcatcatccccaccctgcactacgtgatcagcgagggcttcctgaaggccgccaccatcggccagatcggctggctgatgctgatggccagcctgtacatcaccggcgccgccctgtacgccgccagaatccccgagagattcttccccggcaagtgcgacatctggttccacagccaccagctgttccacatcttcgtggtggccggcgccttcgtgcacttccacggcgtgagcaacctgcaggagttcagattcatgatcggcggcggctgcagcgaggaggacgccctgtag

SEQ ID NO: 292210 - DNA, 570 bp, Artificial Sequence
  derived and/or modified sequence
tttgcagacatatgggtgattggtacagtaggtttataaacagaagtttaaacttatttctttacatattcatcaatgtctgaagaagttacttatgcagatcttcaattccagaactccagtgagatggaaaaaatcccagaaattggcaaatttggggaaaaagcacctccagctccctctcatgtatggcgtccagcagccttgtttctgactcttctgtgccttctgttgctcattggattgggagtcttggcaagcatgtttcacgtaactttgaagatagaaatgaaaaaaatgaacaaactacaaaacatcagtgaagagctccagagaaatatttctctacaactgatgagtaacatgaatatctccaacaagatcaggaacctctccaccacactgcaaacaatagccaccaaattatgtcgtgagctatatagcaaagaacaagagcacaaatgtaagccttgtccaaggagatggatttggcataaggacagctgttatttcctaagtgatgatgtccaaacatggcaggagagtaaaatggcctgtgctgctcagaat

SEQ ID NO: 292211 - DNA, 1515 bp, Artificial Sequence
  derived and/or modified sequence
tggtacagtaggtttataaacagaagtttaaacttgtaagcttaagcttccgtttataaacagaagtttaaaattataggtcctgtttaacattcagctctgttaactcactcatctttttgtgtttttacactttgtcaagatttctttacatattcatcaatgtctgaagaagttacttatgcagatcttcaattccagaactccagtgagatggaaaaaatcccagaaattggcaaatttggggaaaaagcacctccagctccctctcatgtatggcgtccagcagccttgtttctgactcttctgtgccttctgttgctcattggattgggagtcttggcaagcatgtttcacgtaactttgaagatagaaatgaaaaaaatgaacaaactacaaaacatcagtgaagagctccagagaaatatttctctacaactgatgagtaacatgaatatctccaacaagatcaggaacctctccaccacactgcaaacaatagccaccaaattatgtcgtgagctatatagcaaagaacaagagcacaaatgtaagccttgtccaaggagatggatttggcataaggacagctgttatttcctaagtgatgatgtccaaacatggcaggagagtaaaatggcctgtgctgctcagaatgccagcctgttgaagataaacaacaaaaatgcattggaatttataaaatcccagagtagatcatatgactattggctgggattatctcctgaagaagattccactcgtggtatgagagtggataatataatcaactcctctgcctgaaaatatcaaacgaagaaagaaaccagagtctcaacctgctggacactattggaagtccatcatttaacacgtttttagtatatacttttagcaggagacagctctgagtcaactgtgttgaggtgccaccacagcgagtttaggcactcagatccctgcatactcatcacattgggccataatggcaaatagaattttttgttttgttttgtttgtttgctttttctttcacatagaaatagtaagtgtaggagtgtgggtcagaaagaaaaggtggccctacctctgatggttggcaatgataggatacaatgggagataagctatctacaaatggagtggagaaggatatatatttcaaaggcctaatttgtagtgaaagactagagacaaaggtaatgtgtgtgtcaggagagagtacagatggaatcttgttttgcaaacgtagaatatgtatgtgtttgtaattattgcaaatggaatggtaatctataatggaatggaaaacattgtagatattttcagttatcaaaaagaaaactgaaaaagtatataataattgtatgtatgatatatatatgtgtgtgtgtgtgtatatatatcttcactttataactctgtgttgttttggggtttgtttctgaaagggggttgtaataaatgacatctgtactatgtcaccacaaataaatctcattcttaaacatttaa

SEQ ID NO: 292212 - protein, 139 aa, Artificial Sequence
  derived and/or modified sequence
MAAFTKLSIEPAFTPGPNIELQKDSDCCSCQEKWVGYRCNCYFISSEQKTWNESRHLCASQKSSLLQLQNTDELDFMSSSQQFYWIGLSYSEEHTAWLWENGSALSQYLFPSFETFNTKNCIAYNPNGNALDESCEDKN

SEQ ID NO: 292213 - protein, 51 aa, Artificial Sequence
  derived and/or modified sequence
SALSQYLFPSFETFNTKNCIAYNPNGNALDESCEDKNRYIYKVLLCCPGWS

SEQ ID NO: 292214 - DNA, 156 bp, Artificial Sequence
  derived and/or modified sequence
agcgcactgtcccagtacctgtttccttcttttgaaaccttcaatacaaagaattgtattgcatataatccaaacgggaatgcgttagatgagtcatgtgaggataagaaccggtacatttacaaagtgctcctgtgttgccctggttggtcttag

SEQ ID NO: 292215 - DNA, 446 bp, Artificial Sequence
  derived and/or modified sequence
tctgcactctcccagtatctatttccatcatttgaaacttttaatacaaagaactgcatagcgtataatccaaatggaaatgctttagatgaatcctgtgaagataaaaatcgttatatctacaaggtcttgctatgttgcccaggctggtcttgaactcctggcctcaagggattctcccaccttggattcccaaagtgctgggattataggtgtgaaccaccatccctggccctcttcacattcttgtatgaagattgatttgggaaaaatgcatttcaggtaactgacaaaagatataggatgaaaaataatatctttcaaatgtttaatttgaactaagagagcttatgcattgcactttctggagatttgtaatgttttggttttgttgtccatgtgactacaaaataatatattttttaattaaaaaatttaaaataata

SEQ ID NO: 292216 - DNA, 156 bp, Artificial Sequence
  derived and/or modified sequence
tctgccctgagccagtacctgttccccagctttgagaccttcaacaccaagaactgcatcgcctacaaccccaatggaaatgccctggatgagagctgtgaggacaagaaccgctacatctacaaggtgctgctgtgctgccccggctggagctag

SEQ ID NO: 292217 - DNA, 156 bp, Artificial Sequence
  derived and/or modified sequence
agcgccctgagccagtacctgttccccagcttcgagaccttcaacaccaagaattgtattgcctacaatccgaacgggaacgcacttgacgagtcttgcgaggacaaaaaccgctatatctataaggtgttgttgtgttgccctggatggtcttag

SEQ ID NO: 292218 - DNA, 156 bp, Artificial Sequence
  derived and/or modified sequence
tccgcattgtcacagtacctcttcccgtctttcgagacatttaacacaaagaactgtatcgcttataaccccaatgggaatgctctggacgagtcctgtgaggataagaaccgctatatctacaaagtgctgctgtgctgccccggatggtcgtag

SEQ ID NO: 292219 - DNA, 156 bp, Artificial Sequence
  derived and/or modified sequence
agcgccctgagccagtacctgttccccagcttcgagaccttcaacaccaagaactgcatcgcctacaaccccaacggcaacgccctggacgagagctgcgaggacaagaacagatacatctacaaggtgctgctgtgctgccccggctggagctag

SEQ ID NO: 292220 - protein, 232 aa, Artificial Sequence
  derived and/or modified sequence
MATLKEKLIAPVAEEEATVPNNKITVVGVGQVGMACAISILGKSLADELALVDVLEDKLKGEMMDLQHGSLFLQTPKIVADKDYSVTANSKIVVVTAGVRQQEGESRLNLVQRNVNVFKFIIPQIVKYSPDCIIIVVSNPVDILTYVTWKLSGLPKHRVIGSGCNLDSARFRYLMAEKLGIHPSSCHGWILGEHGDSSVAVWSGVNVAGVSLQELNPEMGTDNDSENWKEVH

SEQ ID NO: 292221 - protein, 102 aa, Artificial Sequence
  derived and/or modified sequence
MATLKEKLIAPVAEEEATVPNNKITVVGVGQVGMACAISILGKSLADELALVDVLEDKLKGEMMDLQHGSLFLQTPKIVADKDYSVTANSKIVVVTAGVRQQ

SEQ ID NO: 292222 - protein, 1105 aa, Artificial Sequence
  derived and/or modified sequence
MTSEEKKERPISMINEASNYNVTSDYAVHPMSPVGRTSRASKKVHNFGKRSNSIKRNPNAPVVRRGWLYKQDSTGMKLWKKRWFVLSDLCLFYYRDEKEEGILGSILLPSFQIALLTSEDHINRKYAFKAAHPNMRTYYFCTDTGKEMELWMKAMLDAALVQTEPVKRVDKITSENAPTKETNNIPNHRVLIKPEIQNNQKNKEMSKIEEKKALEAEKYGFQKDGQDRPLTKINSVKLNSLPSEYESGSACPAQTVHYRPINLSSSENKIVNVSLADLRGGNRPNTGPLYTEADRVIQRTNSMQQLEQWIKIQKGRGHEEETRGVISYQTLPRNMPSHRAQIMARYPEGYRTLPRNSKTRPESICSVTPSTHDKTLGPGAEEKRRSMRDDTMWQLYEWQQRQFYNKQSTLPRHSTLSSPKTMVNISDQTMHSIPTSPSHGSIAAYQGYSPQRTYRSEVSSPIQRGDVTIDRRHRAHHPKHVYVPDRRSVPAGLTLQSVSPQSLQGKTMKENEPIITMVHTMIENSALRPQLYQQFLRQKSKISLYCLSQDEGRGTLYKYRPEEVDIDAKLSRLCEQDKVVHALEEKLQQLHKEKYTLEQALLSASQEIEMHADNPAAIQTVVLQRDDLQNGLLSTCRELSRATAELERAWREYDKLEYDVTVTRNQMQEQLDHLGEVQTESAGIQRAQIQKELWRIQDVMEGLSKHKQQRGMIGSKPFSTVKYKNEEEEVVPPRPPLPRSYDFTEQPPIIPPLPSDSSSLLCYSRGPVHLPEEKKMYQVQGYPRNGSHCGPDYRLYKSEPELTTVAEVDESNGEEKSEPVSEIETSVVKGSHFPVGVVPPRAKSPTPESSTIASYVTLRKTKKMMDLRTERPRSAVEQLCLAESTRPRMTVEEQMERIRRHQQACLREKKKGLNVIGASDQSPLQSPSNLRDNPFRTTQTRRRDDKELDTAIRENDVKPDHETPATEIVQLKETEPQNVDFSKELKKTENISYEMLFEPEPNGVNSVEMMDKERNKDKMPEDVTFSPQDETQTANHKPEEHPEENTKNSVDEQEETVISYESTPEVSRGNQTMAVKSLSPSPESSASPVPSTQPQLTEGSHFMCV

SEQ ID NO: 292223 - DNA, 3318 bp, Artificial Sequence
  derived and/or modified sequence
atgaccagcgaggagaagaaggagagacccatcagcatgatcaacgaggccagcaactacaacgtgaccagcgactacgccgtgcaccccatgagccccgtgggcagaaccagcagagccagcaagaaggtgcacaacttcggcaagagaagcaacagcatcaagagaaaccccaacgcccccgtggtgagaagaggctggctgtacaagcaggacagcaccggcatgaagctgtggaagaagagatggttcgtgctgagcgacctgtgcctgttctactacagagacgagaaggaggagggcatcctgggcagcatcctgctgcccagcttccagatcgccctgctgaccagcgaggaccacatcaacagaaagtacgccttcaaggccgcccaccccaacatgagaacctactacttctgcaccgacaccggcaaggagatggagctgtggatgaaggccatgctggacgccgccctggtgcagaccgagcccgtgaagagagtggacaagatcaccagcgagaacgcccccaccaaggagaccaacaacatccccaaccacagagtgctgatcaagcccgagatccagaacaaccagaagaacaaggagatgagcaagatcgaggagaagaaggccctggaggccgagaagtacggcttccagaaggacggccaggacagacccctgaccaagatcaacagcgtgaagctgaacagcctgcccagcgagtacgagagcggcagcgcctgccccgcccagaccgtgcactacagacccatcaacctgagcagcagcgagaacaagatcgtgaacgtgagcctggccgacctgagaggcggcaacagacccaacaccggccccctgtacaccgaggccgacagagtgatccagagaaccaacagcatgcagcagctggagcagtggatcaagatccagaagggcagaggccacgaggaggagaccagaggcgtgatcagctaccagaccctgcccagaaacatgcccagccacagagcccagatcatggccagataccccgagggctacagaaccctgcccagaaacagcaagaccagacccgagagcatctgcagcgtgacccccagcacccacgacaagaccctgggccccggcgccgaggagaagagaagaagcatgagagacgacaccatgtggcagctgtacgagtggcagcagagacagttctacaacaagcagagcaccctgcccagacacagcaccctgagcagccccaagaccatggtgaacatcagcgaccagaccatgcacagcatccccaccagccccagccacggcagcatcgccgcctaccagggctacagcccccagagaacctacagaagcgaggtgagcagccccatccagagaggcgacgtgaccatcgacagaagacacagagcccaccaccccaagcacgtgtacgtgcccgacagaagaagcgtgcccgccggcctgaccctgcagagcgtgagcccccagagcctgcagggcaagaccatgaaggagaacgagcccatcatcaccatggtgcacaccatgatcgagaacagcgccctgagaccccagctgtaccagcagttcctgagacagaagagcaagatcagcctgtactgcctgagccaggacgagggcagaggcaccctgtacaagtacagacccgaggaggtggacatcgacgccaagctgagcagactgtgcgagcaggacaaggtggtgcacgccctggaggagaagctgcagcagctgcacaaggagaagtacaccctggagcaggccctgctgagcgccagccaggagatcgagatgcacgccgacaaccccgccgccatccagaccgtggtgctgcagagagacgacctgcagaacggcctgctgagcacctgcagagagctgagcagagccaccgccgagctggagagagcctggagagagtacgacaagctggagtacgacgtgaccgtgaccagaaaccagatgcaggagcagctggaccacctgggcgaggtgcagaccgagagcgccggcatccagagagcccagatccagaaggagctgtggagaatccaggacgtgatggagggcctgagcaagcacaagcagcagagaggcatgatcggcagcaagcccttcagcaccgtgaagtacaagaacgaggaggaggaggtggtgccccccagaccccccctgcccagaagctacgacttcaccgagcagccccccatcatcccccccctgcccagcgacagcagcagcctgctgtgctacagcagaggccccgtgcacctgcccgaggagaagaagatgtaccaggtgcagggctaccccagaaacggcagccactgcggccccgactacagactgtacaagagcgagcccgagctgaccaccgtggccgaggtggacgagagcaacggcgaggagaagagcgagcccgtgagcgagatcgagaccagcgtggtgaagggcagccacttccccgtgggcgtggtgccccccagagccaagagccccacccccgagagcagcaccatcgccagctacgtgaccctgagaaagaccaagaagatgatggacctgagaaccgagagacccagaagcgccgtggagcagctgtgcctggccgagagcaccagacccagaatgaccgtggaggagcagatggagagaatcagaagacaccagcaggcctgcctgagagagaagaagaagggcctgaacgtgatcggcgccagcgaccagagccccctgcagagccccagcaacctgagagacaaccccttcagaaccacccagaccagaagaagagacgacaaggagctggacaccgccatcagagagaacgacgtgaagcccgaccacgagacccccgccaccgagatcgtgcagctgaaggagaccgagccccagaacgtggacttcagcaaggagctgaagaagaccgagaacatcagctacgagatgctgttcgagcccgagcccaacggcgtgaacagcgtggagatgatggacaaggagagaaacaaggacaagatgcccgaggacgtgaccttcagcccccaggacgagacccagaccgccaaccacaagcccgaggagcaccccgaggagaacaccaagaacagcgtggacgagcaggaggagaccgtgatcagctacgagagcacccccgaggtgagcagaggcaaccagaccatggccgtgaagagcctgagccccagccccgagagcagcgccagccccgtgcccagcacccagccccagctgaccgagggcagccacttcatgtgcgtgtag

SEQ ID NO: 292224 - DNA, 3318 bp, Artificial Sequence
  derived and/or modified sequence
atgacttctgaggaaaagaaagagcgtcctatctcgatgattaatgaggcatccaactataatgtgaccagcgactacgccgtccaccccatgtctccagtgggcagaacatctagagcttcaaaaaaggtccacaacttcggaaagcggagtaactcgataaagaggaatccaaacgcacccgtggtccgcaggggttggctgtataaacaagattctacaggtatgaagctgtggaagaagcggtggtttgtgctcagcgacttgtgcctgttttactatagagacgagaaagaggagggaattctgggctccattttgctaccttcttttcagattgcccttcttacaagtgaggaccacatcaaccggaaatacgcatttaaggccgcgcaccccaatatgaggacctactacttctgcacggataccgggaaagaaatggaactgtggatgaaggccatgctggatgcggcactggttcagactgaaccggtcaaaagagttgataaaattacttccgagaatgcacctaccaaggaaacaaataacattccaaaccatagggtcctaatcaaaccagaaatccagaataatcagaagaacaaagaaatgagcaagattgaagagaaaaaagctctcgaggcagagaaatacgggtttcagaaggacgggcaggatagaccattgactaagattaacagcgtcaagttgaacagcttgccatccgagtacgaaagtggctccgcgtgtcccgcccaaaccgtgcattatcgaccaattaatctcagctcctcagaaaacaaaatagttaacgttagcctagccgacctcagagggggtaatcgccccaataccgggccgctgtacactgaagccgatcgcgtaatccagagaacgaacagcatgcaacagctggagcagtggatcaagatccagaaggggagggggcacgaggaggagactcgcggcgttattagctatcagaccctacctagaaacatgccatcccatagagctcaaatcatggccagataccccgagggctatcgtacgctgccccgtaacagtaagaccagaccagagagcatctgtagcgtcacgccctctactcatgataaaacacttggccccggcgccgaggaaaagcggagaagcatgagagacgacacgatgtggcaactctatgaatggcaacagcgacaattctacaacaaacagagcaccttgcccagacactcaacccttagttcaccaaaaactatggttaacatcagtgaccagacaatgcactcaatacccacaagtccatctcatggatctattgctgcgtaccaaggctattcccctcagagaacatatagatcggaggtatcgtccccgattcagcgcggagatgtcacgatcgaccgtcgacaccgggcccaccaccctaagcatgtttacgtacctgataggaggtctgtacccgccgggctcacccttcaaagcgtgtctccacagtccctacaaggcaagacgatgaaagagaacgagcctataattaccatggttcacaccatgatcgaaaattccgctttgcggcctcagctgtaccagcagttcctaaggcaaaaaagcaagatcagcctgtactgcttgtcacaagatgaaggacgagggaccttgtataaataccgccctgaagaggtggatatcgacgctaaactcagcagactgtgtgaacaggacaaggtggtccacgccctggaggagaaattacagcagctgcataaggaaaagtacactctggagcaggctcttctttcagcatcacaggaaattgaaatgcacgctgacaatccggctgccatccagacagtcgtactccaacgcgatgatctacagaacggcctgctctctacctgtcgtgaactgtcaagagctaccgccgagctagaacgcgcgtggagggaatacgataaactggagtacgatgtaacagtcacaaggaatcaaatgcaggaacagctggatcacctgggagaggtccagacagagtcagctggcatccagcgggctcagatccagaaagaactgtggaggatccaagacgtaatggagggtctctcaaagcacaaacagcagaggggtatgattggcagtaaaccatttagcactgtaaaatataagaacgaggaagaagaagtagtacccccaaggccccccctgccccgctcctacgacttcacggagcaaccaccaataataccgccacttccatctgattcaagctcgttactctgttattcaaggggcccagtgcatctccctgaagaaaagaaaatgtaccaggtgcaggggtacccaagaaatggcagccactgcggccctgactacagattatacaagtcggagcctgagttgaccacagtggccgaagttgatgaatccaatggcgaggaaaaatctgaacccgtgagcgaaattgaaacatcggtggttaagggatctcatttccctgtaggcgtggtcccaccacgcgccaagagcccaacacccgagagctctaccatcgctagttacgtaactcttagaaagactaagaagatgatggatctaagaaccgagcgaccaagaagtgctgtcgaacagctctgcctcgccgagtcaacccggcctagaatgacagtggaagagcagatggaaaggatcaggaggcatcagcaagcttgtctccgcgagaagaaaaaggggctaaacgttatcggggctagtgaccaaagtccactgcagagtccttccaatttgagggataacccttttcgaacgacacagactcgtaggagagacgacaaagagttggacaccgcgattagagagaacgacgtcaagcccgatcacgaaacacctgcaactgagatcgtgcagctaaaggaaacagagcctcaaaacgtggatttctcaaaggaactgaaaaagaccgaaaatatttcttatgaaatgcttttcgaaccggagccaaatggagttaacagtgtcgagatgatggataaagaaaggaacaaggacaaaatgcctgaggatgttactttctctcctcaggatgaaacccagacggcaaaccacaaacctgaagaacaccctgaggaaaacacaaagaattcggtggatgagcaggaagagacagtcattagctacgaaagtactcccgaggtcagccggggtaatcagaccatggccgttaaatcccttagcccatctcctgagagtagcgcttcaccagtgccttctactcagccccagcttactgagggaagccattttatgtgcgtttag

SEQ ID NO: 292225 - DNA, 3318 bp, Artificial Sequence
  derived and/or modified sequence
atgaccagcgaggagaagaaggagcggcccatctccatgatcaatgaggccagcaactacaacgtgaccagtgactatgctgtgcaccccatgagccctgtgggccgcaccagccgggccagcaagaaggtgcacaactttgggaagaggagcaacagcatcaagaggaaccccaatgcccctgtggtgcggcggggctggctgtacaagcaggacagcacaggcatgaagctgtggaagaagcgctggtttgtgctgagtgacctgtgcctcttctactacagagatgagaaggaggagggcatcctgggcagcatcctgctgcccagcttccagatcgccctgctgaccagcgaggaccacatcaacagaaaatatgccttcaaggccgcccaccccaacatgaggacctactacttctgcacagacaccgggaaggagatggagctgtggatgaaggccatgctggatgctgccctggtgcagacagagcctgtgaagagggtggacaagatcaccagtgaaaatgcccccaccaaggagaccaacaacatccccaaccaccgggtgctgatcaagccagagatccagaacaaccagaagaacaaggagatgagcaagattgaggagaagaaggccctggaggccgagaagtatggcttccagaaggatggccaggaccggcccctgaccaagatcaacagcgtgaagctgaacagcctgcccagtgaatatgaaagtggcagcgcctgcccagcccagacagtgcactaccggcccatcaacctgagcagcagcgagaacaagatcgtgaatgtgtccctggccgacctgcggggcggcaaccggcccaacacaggccccctgtacacagaagctgacagagtcatccagaggaccaacagcatgcagcagctggagcagtggatcaagatccagaagggccggggccacgaggaggagacccggggcgtcatctcctaccagaccctgcccaggaacatgcccagccaccgggcccagatcatggcccgctacccagagggctaccgcaccctgcccaggaacagcaagaccaggcctgagagcatctgcagcgtgacccccagcacccatgacaagaccctgggccctggagctgaggagaagaggaggtccatgagagatgacaccatgtggcagctgtatgagtggcagcagaggcagttctacaacaagcagagcaccctgcccaggcacagcaccctgagcagccccaagaccatggtgaacatcagtgaccagaccatgcacagcatccccaccagccccagccacggcagcattgctgcctaccagggctacagcccccagaggacctacagaagtgaggtgagcagccccatccagagaggagatgtgaccatcgacagaagacaccgggcccaccaccccaagcacgtgtatgtgcctgaccggcgctctgtgcctgctggcctgaccctgcagagcgtgagcccccagagcctgcagggcaagaccatgaaggaaaatgagcccatcatcaccatggtgcacaccatgattgaaaattctgccctgcggccccagctgtaccagcagttcctgcggcagaagagcaagatcagcctgtactgcctgagccaggatgagggccggggcaccctgtacaagtacagacctgaggaggtggacattgatgccaagctgagccggctgtgtgagcaggacaaggtggtgcacgccctggaggagaagctgcagcagctgcacaaggagaagtacaccctggagcaggccctgctgagcgccagccaggagattgagatgcacgccgacaacccagctgccatccagacagtggtgctgcagagagatgacctgcagaatggcctgctgagcacctgccgggagctgagccgggccacagctgagctggagcgggcctggagagaatatgacaagctggagtatgatgtgacagtgaccaggaaccagatgcaggagcagctggaccacctgggggaggtgcagacagaatctgctggcatccagagggcccagatccagaaggagctgtggaggatccaggatgtgatggagggcctgagcaagcacaagcagcagaggggcatgattggcagcaagcccttcagcacagtgaagtacaagaatgaggaggaggaggtggtgccccccaggcctcccctgcccaggagctatgacttcacagagcagccccccatcatcccccccctgcccagcgacagcagcagcctgctgtgctacagccggggccctgtgcacctgcctgaggagaagaagatgtaccaggtgcagggctaccccagaaatggcagccactgcggccctgactaccgcctgtacaagtctgagcctgagctgaccaccgtggccgaggtggatgagagcaatggagaggagaagtctgagcctgtgtctgaaattgagacctctgtggtgaagggcagccacttccctgtgggcgtggtgcccccccgggccaagagccccaccccagagagcagcaccatcgccagctatgtgaccctgaggaagaccaagaagatgatggacctgaggacagagcggcccaggtctgctgtggagcagctgtgcctggccgagagcacccggcccaggatgacagtggaggagcagatggagcgcatcagaagacaccagcaggcctgcctgcgggagaagaagaagggcctgaatgtcatcggggccagtgaccagagccccctgcagagccccagcaacctgcgggacaaccccttccgcaccacccagaccaggagaagagatgacaaggagctggacacagccatccgggagaatgatgtgaagccagaccacgagaccccagccacagagatcgtgcagctgaaggagacagagccccagaatgtggacttcagcaaggagctgaagaagacagagaacatctcctatgagatgctgtttgagcctgagcccaacggggtgaacagcgtggagatgatggacaaggagaggaacaaggacaagatgccagaagatgtgaccttcagcccccaggatgagacccagacagccaaccacaagccagaggagcaccctgaggagaacaccaagaacagcgtggatgagcaggaggagaccgtcatctcctatgagagcaccccagaggtgtcccggggcaaccagaccatggctgtgaagagcctgagccccagccctgagagcagcgccagccctgtgcccagcacccagccccagctgacagagggcagccacttcatgtgtgtgtag

SEQ ID NO: 292226 - DNA, 3318 bp, Artificial Sequence
  derived and/or modified sequence
atgaccagcgaggagaagaaggagcggcccatcagcatgatcaacgaggccagcaattataatgtgacttccgactacgccgtgcaccctatgtccccagtgggtcgaactagtagggcttcaaagaaggtccataattttggaaagagaagcaactctattaagaggaacccaaacgcccctgtggtccggcgaggctggctatataagcaggactctaccggtatgaaactttggaagaaacgttggtttgtcctcagtgatctctgccttttttattatagagatgagaaagaggaaggaattcttggctccatcctgttgccaagctttcagattgccctgctcacatcggaggatcacatcaatcggaaatacgcgttcaaagccgcccacccgaacatgcggacatactacttctgtactgacactgggaaggagatggagctgtggatgaaggccatgttggacgctgccctagtgcagacagagcccgttaaacgagtggataagatcaccagcgaaaacgcacccaccaaagaaactaacaatattccaaatcatcgagtgctaataaagcctgagattcagaataatcagaaaaacaaggagatgtcaaagattgaggagaaaaaggccctggaggccgagaaatatggattccaaaaagacggtcaggacagacctctcacaaagatcaattccgtaaagctgaacagcctgccttccgagtatgaatccgggagcgcgtgccccgcccaaaccgtacattaccgcccaatcaacctgtcaagcagcgagaacaaaattgttaacgtttcactcgctgatttgcggggcgggaatcgacctaacaccggtccattatacactgaggccgatcgagttattcagagaacaaacagcatgcagcagcttgagcaatggataaaaatccagaagggcagggggcacgaggaggaaactagaggtgtgatttcctaccagacactgccacggaatatgccatctcaccgcgctcagataatggccaggtaccctgaaggttaccggaccttaccccggaatagtaagacccgccccgagtcgatttgctcagttactccgtctacccatgataaaaccttaggccccggcgctgaagaaaagagacggtccatgcgggatgatacaatgtggcagctgtacgagtggcaacagcgccagttctacaacaagcagtctacactgcctagacattctacactcagttctcctaaaaccatggtgaacatttctgaccaaactatgcatagcatccctacctctccttcacacggatcgatcgccgcctaccaaggctattctccccagcgaacttacagatctgaagtgtcttcacctatacaaagaggagacgttaccatagaccgcagacaccgggctcaccacccaaagcacgtgtatgtgccagaccggcgctccgtgcccgccggtttaacactccaatcggtgtcaccgcaaagcttgcagggtaagacaatgaaggagaatgaacctatcatcacaatggtccacaccatgattgagaatagtgcgctacggcctcagctgtaccagcagttccttaggcagaaatcaaaaatttccctgtactgcctgtcacaggacgagggacgcggcacattgtacaagtataggccggaggaagttgacatcgacgccaaactgtctaggttgtgtgaacaagacaaagttgtgcatgccctcgaggagaagttgcaacagttacataaagaaaagtatacattggaacaggcactgctgtcggccagccaggagatcgaaatgcacgccgataacccagctgcaatccagacagtagtgctgcagcgcgacgacttacagaacgggctgctgtcaacctgtcgggagctgtcgagggcgactgctgagctggaaagagcatggcgagaatatgacaagttggaatatgacgtgactgtgaccagaaaccagatgcaggagcagctcgaccacctgggggaagtgcagacagagtccgccggtatccagcgtgcccaaatccaaaaagaactttggagaatccaggacgtgatggaaggactgagcaagcacaagcaacagcgtggcatgattgggtcaaaaccttttagcacagtaaagtataaaaacgaagaggaggaagtcgtaccccctaggccccctcttcctcgatcatacgattttacagagcagcctccgattatcccaccgctacctagcgattcgagtagcctgctttgctacagcaggggaccggtccatttaccagaagaaaaaaagatgtaccaggtccaggggtatccacgcaacggttctcattgcggcccagactaccggctgtacaagagtgagcccgagctgacaactgtggccgaagtggacgagtctaatggagaagagaagagcgaaccagtgtcagaaatcgagacctctgttgtaaaaggctcacattttccagttggggtcgtaccccccagggcaaagtctcccacgccggagtcaagcaccatcgcttcctacgtgactctcaggaaaaccaaaaagatgatggacctccggactgaacgacctcgatcagcggttgagcagctttgtttagccgaatcaacccggcccaggatgaccgtagaggaacaaatggaaagaattcgtcgccaccagcaggcctgtctccgagagaagaaaaaaggcctgaacgtcataggcgcgtccgatcagtcacctttacagagtcctagtaatttaagagacaaccccttcaggacaacacagacaagacggcgggatgacaaagaactggacacagccatccgcgagaatgacgtcaagccggatcacgagacccccgccactgagatcgtgcagctaaaagaaacagagccccagaatgtcgacttctctaaggaactaaagaagactgaaaatatttcatatgaaatgctgtttgagcctgagccaaatggcgttaacagcgtggagatgatggacaaggaaaggaacaaagataagatgcccgaggacgtgacattttccccacaagatgagacacagaccgccaaccacaaacctgaagaacatccagaagaaaatacaaaaaactctgtggatgagcaggaagagacagttatctcttatgagagcaccccagaggtctcacggggtaatcaaacaatggcagtaaaatcccttagcccatcccccgaatccagtgccagtcccgtgccatctacgcaaccacagttaaccgaaggttctcacttcatgtgcgtgtag

SEQ ID NO: 292227 - DNA, 4412 bp, Artificial Sequence
  derived and/or modified sequence
aaaagagatcacggtgtgcccctttgtcatcgttctgtcaggaagcatgtaatttgtctttagaaaccagaagcctgagacaaagaaaagaacacagatttttagcaaaaggctatttgccataatgaaaggaaagtgacctgcaaacatccagtcacaggacaaccatcacaggacaattgtatttttgtagtgaatgaacagactgttgcaaccatgacatctgaagaaaagaaggaacggccaataagtatgataaatgaagcttctaactataacgtgacttcagattatgcagtgcatccaatgagccctgtaggcagaacttcacgagcttcaaaaaaagttcataattttggaaagaggtcaaattcaattaaaaggaatcctaatgcaccggttgtcagacgaggttggctttataaacaggacagtactggcatgaaattgtggaagaaacgctggtttgtgctttctgacctttgcctcttttattatagagatgagaaagaagagggtatcctgggaagcatactgttacctagttttcagatagctttgcttacctctgaagatcacattaatcgcaaatatgcttttaaggcagcccatccaaacatgcggacctattatttctgcactgatacaggaaaggaaatggagttgtggatgaaagccatgttagatgctgccctagtacagacagaacctgtgaaaagagtggacaagattacatctgaaaatgcaccaactaaagaaaccaataacattcccaaccatagagtgctaattaaaccagagatccaaaacaatcaaaaaaacaaggaaatgagcaaaattgaagaaaaaaaggcattagaagctgaaaaatatggatttcagaaggatggtcaagatagacccttaacaaaaattaatagtgtaaagctgaattctctgccatctgaatatgagagtgggtcagcatgccctgctcagactgtgcactacagaccaatcaacttgagcagttcagagaacaaaatagtcaatgttagcctggcagatcttagaggtggaaatcgccccaatacagggcccttatacacagaggccgatcgagtcatacagagaacaaattcaatgcagcagttggaacagtggattaaaatccagaaggggaggggtcatgaagaagaaaccaggggagtaatttcttaccaaacattaccaagaaatatgccaagtcacagagcccagattatggcccgctaccctgaaggttatagaacactcccaagaaacagcaagacaaggcctgaaagtatctgcagtgtaaccccttccactcatgacaagacattaggacccggagcggaggagaaacggaggtccatgagagatgacacaatgtggcagctctacgaatggcagcagcgtcagttttataacaaacagagcaccctccctcgacacagtactttgagtagtcccaaaaccatggtaaatatttctgaccagacaatgcactctattcccacatcaccttcccacgggtcaatagctgcttatcagggatactcccctcaacgaacttacagatcggaagtgtcttcaccaattcagagaggagatgtgacaatagaccgcagacacagggcccatcaccctaagcatgtctatgtgcctgacagaaggtcagtgccagctggcctgactttacagtctgttagtccccagagcctccaagggaaaacgatgaaagaaaatgaacctattatcaccatggttcacacaatgattgagaactcggcgctaagaccccaactgtaccagcaattcttaagacagaagagcaagataagtctatattgtctgtcacaagatgaaggtagaggcacattatacaaatacagacctgaagaagtagatattgatgccaagttaagccgattatgtgaacaagataaagtggtgcatgctctggaagagaaacttcagcaactccacaaggagaaatacacgcttgagcaagctttgctatcagccagccaagagatagaaatgcatgcagataacccagcagccattcagacagtggtgttacaaagggatgatttacaaaatggactgcttagtacgtgtcgagaactttctcgagccactgccgaattggaacgagcatggagagaatatgataagttagaatacgatgtaactgttaccaggaaccagatgcaagagcagctggatcaccttggtgaagttcagacggaatcagcaggaattcagcgtgcacagattcagaaagaactttggcgaattcaggatgtcatggaagggctgagtaaacataagcagcaaagaggtatgataggatcaaagcctttctcaacagttaagtacaaaaatgaggaagaggaagtagtcccacctcgtcctccacttcctcggtcctatgactttacagagcagcctcccataatcccccctctgcccagtgatagcagctccttgctctgttatagcaggggcccagttcatctgcctgaagaaaagaagatgtatcaagttcaaggatatccaagaaatggatctcactgtggtccagattatagactctacaagagtgaaccagagttaacaacagtggcagaagttgatgaatctaatggagaagaaaaatcagaacctgtttcagagatagaaacttcagttgttaaaggttcccactttcctgttggagtagtccctccaagagcaaaatcaccaacacccgaatcttcgacaatagcttcctatgtaaccttgaggaaaactaagaagatgatggatctaagaacggaaagaccaagaagtgcagtggaacagctctgtttggctgaaagtactcgaccaaggatgactgtggaagagcaaatggaaagaataagaagacatcaacaagcgtgcctgagggagaagaaaaaagggttaaatgttatcggtgcttcagaccagtcacccttacaaagcccttcaaatttaagggataatccatttaggactactcagactcgaaggagggatgataaggaactggacactgccattagagaaaatgatgtaaagccagaccatgaaactcctgcaacagaaattgttcaactaaaagaaaccgaaccccaaaatgtggacttcagcaaagagttaaaaaaaactgaaaacatttcatatgaaatgctttttgaacctgagccaaatggagtaaattctgtggaaatgatggataaagaaagaaacaaagacaaaatgcctgaggatgttacattcagccctcaagatgaaacacagaccgcaaatcataaaccagaagagcatcctgaagaaaatacaaagaacagtgttgacgaacaggaagaaactgttatttcttacgaatcaactcctgaggtttctagaggaaatcaaacaatggcagtgaaaagtctgtccccatctcctgagtcctcggcatcgccagttccatccactcagccgcagctcacagaaggatcacatttcatgtgtgtgtagtcttagaagaactatactgacttctgttgaaaccattcaaagctaaagacatggaccttcagcagtgtaagaagatattgtacagtatattttaaatctatgaaattcatagttctgatgcttttggtcacagagcatcattttatcacttctggaaaatgtttattccaaaacagctttaatggcccatatgtacacttcgtaatctcaaggttattattctgacaccagcttgctgctatgatttcagagcacataagtaaaggtgctttttaatgtgcagtctatttccagagcttacttagttgctgatttccagatttcgatgtttcttaagtctaggtgaatttatatatatatttttttgcttttcattttctaaagttagttattatttccattgaagcttgttttcttttttttcttcccattttagctactgcagtgcttttgtttcacacttgatttgtaaaaattttatatatatgtatttaaaatgtgccattttattgctaagtgaagtatgtcctgttttctgctataattctttctcggtcagattgcaatgtcagcagttactgccacactcctgtcagcttaaacacaaatgttactgcttatcttttcttaaaaaaaaaaaaaacaaagtgtaggtattttgaagtactgggcttatatttcattggaatacatgtgtacagcaataagcaggtttccaaatccggtacttagtttgtgtacaaatgtaattatgttcattgtgtatatattatacaatgagcacatgtaatgtattaaaggctacttactattgtttaaatgcaaatgttcatatctcatttctttttttatcatgttaaataaatgttgatgttctt

SEQ ID NO: 292228 - DNA, 3803 bp, Artificial Sequence
  derived and/or modified sequence
aaaagagatcacggtgtgcccctttgtcatcgttctgtcaggaagcatgtaatttgtctttagaaaccagaagcctgagacaaagaaaagaacacagatttttagcaaaaggctatttgccataatgaaaggaaagtgacctgcaaacatccagtcacaggacaaccatcacaggacaattgtatttttgtagtgaatgaacagactgttgcaaccatgacatctgaagaaaagaaggaacggccaataagtatgataaatgaagcttctaactataacgtgacttcagattatgcagtgcatccaatgagccctgtaggcagaacttcacgagcttcaaaaaaagttcataattttggaaagaggtcaaattcaattaaaaggaatcctaatgcaccggttgtcagacgaggttggctttataaacaggacagtactggcatgaaattgtggaagaaacgctggtttgtgctttctgacctttgcctcttttattatagagatgagaaagaagagggtatcctgggaagcatactgttacctagttttcagatagctttgcttacctctgaagatcacattaatcgcaaatatgcttttaaggcagcccatccaaacatgcggacctattatttctgcactgatacaggaaaggaaatggagttgtggatgaaagccatgttagatgctgccctagtacagacagaacctgtgaaaagagtggacaagattacatctgaaaatgcaccaactaaagaaaccaataacattcccaaccatagagtgctaattaaaccagagatccaaaacaatcaaaaaaacaaggaaatgagcaaaattgaagaaaaaaaggcattagaagctgaaaaatatggatttcagaaggatggtcaagatagacccttaacaaaaattaatagtgtaaagctgaattctctgccatctgaatatgagagtgggtcagcatgccctgctcagactgtgcactacagaccaatcaacttgagcagttcagagaacaaaatagtcaatgttagcctggcagatcttagaggtggaaatcgccccaatacagggcccttatacacagaggccgatcgagtcatacagagaacaaattcaatgcagcagttggaacagtggattaaaatccagaaggggaggggtcatgaagaagaaaccaggggagtaatttcttaccaaacattaccaagaaatatgccaagtcacagagcccagattatggcccgctaccctgaaggttatagaacactcccaagaaacagcaagacaaggcctgaaagtatctgcagtgtaaccccttccactcatgacaagacattaggacccggagcggaggagaaacggaggtccatgagagatgacacaatgtggcagctctacgaatggcagcagcgtcagttttataacaaacagagcaccctccctcgacacagtactttgagtagtcccaaaaccatggtaaatatttctgaccagacaatgcactctattcccacatcaccttcccacgggtcaatagctgcttatcagggatactcccctcaacgaacttacagatcggaagtgtcttcaccaattcagagaggagatgtgacaatagaccgcagacacagggcccatcaccctaagcatgtctatgtgcctgacagaaggtcagtgccagctggcctgactttacagtctgttagtccccagagcctccaagggaaaacgatgaaagaaaatgaacctattatcaccatggttcacacaatgattgagaactcggcgctaagaccccaactgtaccagcaactgtcacaagatgaaggtagaggcacattatacaaatacagacctgaagaagtagatattgatgccaagttaagccgattatgtgaacaagataaagtggtgcatgctctggaagagaaacttcagcaactccacaaggagaaatacacgcttgagcaagctttgctatcagccagccaagagatagaaatgcatgcagataacccagcagccattcagacagtggtgttacaaagggatgatttacaaaatggactgcttagtacgtgtcgagaactttctcgagccactgccgaattggaacgagcatggagagaatatgataagttagaatacgatgtaactgttaccaggaaccagatgcaagagcagctggatcaccttggtgaagttcagacggaatcagcaggaattcagcgtgcacagattcagaaagaactttggcgaattcaggatgtcatggaagggctgagtaaacataagcagcaaagaggtactacagaaataggtatgataggatcaaagcctttctcaacagttaagtacaaaaatgaggaagaggaagtagtcccacctcgtcctccacttcctcggtcctatgactttacagagcagcctcccataatcccccctctgcccagtgatagcagctccttgctctgttatagcaggggcccagttcatctgcctgaagaaaagaagatgtatcaagttcaaggatatccaagaaatggatctcactgtggtccagattatagactctacaagagtgaaccagagttaacaacagtggcagaagttgatgaatctaatggagaagaaaaatcagaacctgtttcagagatagaaacttcagttgttaaaggttcccactttcctgttggagtagtccctccaagagcaaaatcaccaacacccgaatcttcgacaatagcttcctatgtaaccttgaggaaaactaagaagatgatggatctaagaacggaaagaccaagaagtgcagtggaacagctctgtttggctgaaagtactcgaccaaggatgactgtggaagagcaaatggaaagaataagaagacatcaacaagcgtgcctgagggagaagaaaaaagggttaaatgttatcggtgcttcagaccagtcacccttacaaagcccttcaaatttaagggataatccatttaggactactcagactcgaaggagggatgataaggaactggacactgccattagagaaaatgatgtaaagccagaccatgaaactcctgcaacagaaattgttcaactaaaagaaaccgaaccccaaaatgtggacttcagcaaagagttaaaaaaaactgaaaacatttcatatgaaatgctttttgaacctgagccaaatggagtaaattctgtggaaatgatggataaagaaagaaacaaagacaaaatgcctgaggatgttacattcagccctcaagatgaaacacagaccgcaaatcataaaccagaagagcatcctgaagaaaatacaaagaacagtgttgacgaacaggaagaaactgttatttcttacgaatcaactcctgaggtttctagaggaaatcaaacaatggcagtgaaaagtctgtccccatctcctgagtcctcggcatcgccagttccatccactcagccgcagctcacagaaggatcacatttcatgtgtgtgtagtcttagaagaactatactgacttctgttgaaaccattcaaagctaaagacatggaccttcagcagtgtaagaagatattgtacagtatattttaaatctatgaaattcatagttctgatgcttttggtcacagagcatcattttatcacttctggaaaatgtttattccaaaacagctttaatggcccatatgtacacttcgtaatctcaaggttattattctgacaccagcttgctgctatgatttcagagcacataagtaaaggtgctttttaatgtgcagtctattt

SEQ ID NO: 292229 - DNA, 3318 bp, Artificial Sequence
  derived and/or modified sequence
atgacgtctgaggagaagaaggagaggcccatatccatgatcaatgaagccagcaactataatgtgacatctgattacgcggtgcacccgatgagtcctgtaggacgtacaagccgggcatctaaaaaggttcataacttcggcaaacgctcaaatagcatcaagcgcaatcccaatgcacccgtcgtccggaggggctggctctacaagcaggactccaccggcatgaaactgtggaaaaagcgctggttcgtgctctctgacctgtgccttttctactatagggatgaaaaggaagaaggaatcttggggtctatactcttgccctcctttcagatagcactgttgacatctgaggaccatatcaataggaaatatgcgttcaaagccgcacaccccaacatgcgtacctactacttttgcacagatactggcaaggagatggagttgtggatgaaagcaatgctggacgcggcactggtacaaaccgaacccgtgaagagggtcgataaaatcacatcagaaaacgccccaacgaaggagaccaataatataccaaatcatagggtgttgattaagcctgagatacagaataaccagaaaaataaggaaatgtctaaaatcgaggagaagaaggcactggaagccgagaaatatggcttccaaaaggacggtcaggacagacctctgactaagatcaacagcgtcaagttaaattcgctcccgagcgaatacgaatccggctcagcgtgtcccgctcagactgtacattaccgacctattaatttaagctcttccgagaacaagatcgtgaacgtgtcattagccgacttgagaggaggaaacagaccaaacactggacccctctacactgaggctgaccgcgtcatacagagaacgaacagtatgcaacagctcgagcaatggataaaaattcagaaggggcgaggccacgaggaagaaactcgcggagttatcagctaccaaaccctgcctcggaatatgccatcccatcgcgcacagattatggctaggtatccagaaggatatcggacattgcctcggaactctaagacaagacccgaaagtatctgttcggtgacgccatcaacacatgataagactttgggccctggggctgaggagaagaggcggtcaatgcgtgacgacacgatgtggcagctgtacgaatggcagcagcgccagttctataacaaacagagcaccttaccacgacactcgacacttagttcccccaaaactatggtgaatatctcagaccaaaccatgcattctattcctactagtccgtctcatggttccatcgccgcttatcagggttactccccccagcgcacctatcggtcagaggtgagcagtccgattcagagaggggacgttacaattgaccgcaggcaccgcgcacaccatccgaaacatgtgtatgtccccgatagaaggagtgttcctgccggactcacactgcagagtgtatctccccagagtttacagggtaagaccatgaaggagaatgaacccattattaccatggtccacaccatgattgagaatagtgctttgcggcctcagctatatcaacagtttctgaggcaaaagtcaaagatatctctgtattgcctgagccaggatgaaggacgaggcacgctgtacaagtaccgcccagaagaagtggatattgatgctaaattatcgagactgtgtgaacaagacaaagttgtacatgcacttgaggagaagttacagcaacttcataaggaaaagtacactctcgagcaagccctgctctccgcaagccaggagatcgaaatgcatgcagacaaccccgctgccattcagaccgtggtgctgcagagagacgatttgcaaaacgggctcctgtccacatgtcgcgagctctcccgagccacagcagaactagaacgtgcctggcgggagtacgacaagctcgagtatgacgtgaccgtcaccagaaatcagatgcaggaacaactcgaccacttgggtgaagtgcaaaccgagtccgccggaatccagagggctcagatccagaaagagctatggcggattcaggatgtgatggaaggcctctctaagcacaagcagcaacgcggtatgattggtagcaaacccttttccaccgttaaatataaaaacgaagaggaggaagttgtgccacccaggccacccctcccaaggagctatgacttcaccgagcagccacccattataccccctctgccttccgacagtagtagcttgctatgctactcacgcggaccagtgcacctgcccgaggagaaaaagatgtatcaggttcaaggatacccacgaaacggctcacactgcgggccagattaccgcttgtacaagagcgagcctgaacttacaaccgtcgccgaggtggatgagtcaaacggggaggaaaagtcagagcccgtgtccgagatcgagacatctgttgtaaaaggttcgcattttcccgtgggagttgtccctccaagggcaaaatccccgactcccgaaagctccactatcgctagctatgtaacactgagaaagaccaaaaagatgatggatctgagaacagagagaccccgaagcgccgtggaacagctgtgtcttgctgagagtacacgcccaagaatgaccgtggaggagcagatggagagaatccgcagacatcagcaggcctgtctgcgggagaagaagaagggactcaatgtgataggggcaagtgaccagagccccctccagtcgccatctaacttgcgggataacccctttagaacaacccagaccagacggcgagatgacaaagagttggatacagcaataagggagaatgatgtaaaacccgaccacgagacgcctgccacagagattgtgcagctcaaagaaacagaaccacaaaatgtggatttctcaaaagagctgaaaaagacagagaacataagctacgagatgctgttcgagccagaacccaacggagtcaacagcgttgagatgatggacaaagaaaggaataaggataagatgcctgaggatgtcacattctcaccacaagacgaaacccaaacggccaatcacaagccggaggagcatcccgaagagaacacaaaaaattccgtagacgagcaggaggagacagtgatatcctacgaatctacacccgaggtgtcacggggtaaccagaccatggcggtcaaatctctgtctccttcacccgagagctccgcttcaccggttccatctacccagccccagttgacggaggggagccattttatgtgcgtctag

SEQ ID NO: 292230 - protein, 76 aa, Artificial Sequence
  derived and/or modified sequence
MAADLNLEWISLPRSWTYGITRGGRVFFINEEAKSTTWLHPVTGEAVVTGHRRQSTDLPTGWEEAYTFEGARYYIN

SEQ ID NO: 292231 - DNA, 2326 bp, Artificial Sequence
  derived and/or modified sequence
attcctaataccttaagtgtacttgtaagtgaagagcaaagttggaggctgttgagctgtttacttctaattatttcctgattcacaaattaatttttgcaattcacaacttcaagaatacttggactattggattcaatccatagtaatctgcaaaagaagagaagcagaattatacctagaagtctactaatggacagttagtcacccacctacatgttgagattcctgacattcagacaactgacttgtaactgacttataactgacttgtaatacactgctactatatcaaaccgacaatgaattggaatgaaaaaccaaagagtgctacattaccaccactgtatcctaaaagccagccaccttttttgcaccagtctttaataaaccaaattaccacaacatctcagagttctttcagctatcctggaagtaaccaagaagcatgcatgtatcccggtaattcaaatccaatttcacagccactgctgaatatccaaaattatcctcaacaaatttctgtttctgatatgcataatgggacagttgtggcctcacacacttcagtagaaagaataacatatgcaaatgttaatggacccaaacaactaactcacaatttgcagatgtcttcaggagttacccaaaacgtatggttgaactcaccaatgaggaatcctgtgcattctcatataggggcaactgtatctcatcaaactgattttggagctaacgtacccaatatgccggcactacagagtcaactgataacatcagatacctattctatgcaaatgcagatgatcccttctaattctacacgacttcctgtagcttaccaaggaaatcagggacttaaccagtctttttcagagcaacaggttgattggacacaacagtgtatatctaagggactgacttacccagattacagaccacctccaaagctataccgttactcaccacaaagctttttaccagattctaccattcaaaaacaaaactttataccacatacatcattgcaagttaaaaatagtcagcttctaaattctgtattaactttaccatcaaggcagacctcagctgtaccatcacagcagtatgccacgcaaactgacaaaagacctcctcctcctccttacaactgtagatatggaagccagcctttgcaaagtactcagcatattactaaacacttgtctatggaagttcctcagagtcgagaaatgctgtcatctgaaataaggaccagctttcaacagcagtggcaaaaccctaatgaaaatgtcagcacaattggaaatttcactaacttgaaagtaaataccaacagcaaacagccttttaacagtcccattagatcttctgtggatggtgttcagactcttgctcaaactaatgaagagaaaataatggattcttgcaatccaacttcaaatcaagtactggacacaagtgttgcaaaagaaaagctagtaagggatattaaaacattagtagagataaaacagaagttttcagaacttgcaaggaaaattaaaatcaataaagatcttttgatggcagcaggttgtattaaaatgactaatacttcttatagtgaaccagctcagaattctaaattgtctctaaaacaaactgccaaaatccagtctggaccccagataactccagtaatgccagagaatgcagagagacaaacaccaacagtagtggaatctgcagaaacaaataagactcaatgtatgttgaattctgacattcaggaagtcaattgcagaaggtttaaccaagttgattctgttttaccaaatcctgtctattctgaaaagcggccaatgccagactcatctcatgatgtgaaagttctcacttcaaagacatcagctgttgagatgacccaggcagtattgaatactcagctttcatcagaaaatgttaccaaagttgagcaaaattcaccagcagtttgtgaaacaatttctgttcccaagtccatgtccactgaggaatataaatcaaaaattcaaaatgaaaatatgctacttctcgctttgctttcacaggcacgtaagactcagaagacagtattaaaagatgctaatcaaactattcaggattctaaaccagacagttgtgaaatgaatccaaatacccaaatgactggtaaccaactgaatttgaagaacatggaaactccaagtacttctaatgtaagtggcagggttttggacaactccttttgcagtggacaagaatcctcaacaaaaggaatgcctgctaaaagtgacagtagctgttccatggaagtgctagcaac

SEQ ID NO: 292232 - DNA, 362 bp, Artificial Sequence
  derived and/or modified sequence
ggaccccacttgacttaaactctggggcccgggaggccgccggttttctccccgcttgccggggtggtcctcttccctttgtcggaccaaagaagtaaacactgtgtggagagggactgacgtgtttggagggaaatgggaatgtacacgataattaaagagtaaagttgtgctcaacgattcctgacattcagacaactgacttgtaactgacttataactgacttgtaatacactgctactatatcaaaccgacaatgaattggaatgaaaaaccaaagagtgctacattaccaccactgtatcctaaaagccagccaccttttttgcaccagtctttaataaaccaaattaccacaaca

SEQ ID NO: 292233 - DNA, 2028 bp, Artificial Sequence
  derived and/or modified sequence
atgaactggaacgagaagcccaagagcgccaccctgccccccctgtaccccaagagccagccccccttcctgcaccagagcctgatcaaccagatcaccaccaccagccagagcagcttcagctaccccggcagcaaccaggaggcctgcatgtaccccggcaacagcaaccccatcagccagcccctgctgaacatccagaactacccccagcagatcagcgtgagcgacatgcacaacggcaccgtggtggccagccacaccagcgtggagagaatcacctacgccaacgtgaacggccccaagcagctgacccacaacctgcagatgagcagcggcgtgacccagaacgtgtggctgaacagccccatgagaaaccccgtgcacagccacatcggcgccaccgtgagccaccagaccgacttcggcgccaacgtgcccaacatgcccgccctgcagagccagctgatcaccagcgacacctacagcatgcagatgcagatgatccccagcaacagcaccagactgcccgtggcctaccagggcaaccagggcctgaaccagagcttcagcgagcagcaggtggactggacccagcagtgcatcagcaagggcctgacctaccccgactacagacccccccccaagctgtacagatacagcccccagagcttcctgcccgacagcaccatccagaagcagaacttcatcccccacaccagcctgcaggtgaagaacagccagctgctgaacagcgtgctgaccctgcccagcagacagaccagcgccgtgcccagccagcagtacgccacccagaccgacaagagaccccccccccccccctacaactgcagatacggcagccagcccctgcagagcacccagcacatcaccaagcacctgagcatggaggtgccccagagcagagagatgctgagcagcgagatcagaaccagcttccagcagcagtggcagaaccccaacgagaacgtgagcaccatcggcaacttcaccaacctgaaggtgaacaccaacagcaagcagcccttcaacagccccatcagaagcagcgtggacggcgtgcagaccctggcccagaccaacgaggagaagatcatggacagctgcaaccccaccagcaaccaggtgctggacaccagcgtggccaaggagaagctggtgagagacatcaagaccctggtggagatcaagcagaagttcagcgagctggccagaaagatcaagatcaacaaggacctgctgatggccgccggctgcatcaagatgaccaacaccagctacagcgagcccgcccagaacagcaagctgagcctgaagcagaccgccaagatccagagcggcccccagatcacccccgtgatgcccgagaacgccgagagacagacccccaccgtggtggagagcgccgagaccaacaagacccagtgcatgctgaacagcgacatccaggaggtgaactgcagaagattcaaccaggtggacagcgtgctgcccaaccccgtgtacagcgagaagagacccatgcccgacagcagccacgacgtgaaggtgctgaccagcaagaccagcgccgtggagatgacccaggccgtgctgaacacccagctgagcagcgagaacgtgaccaaggtggagcagaacagccccgccgtgtgcgagaccatcagcgtgcccaagagcatgagcaccgaggagtacaagagcaagatccagaacgagaacatgctgctgctggccctgctgagccaggccagaaagacccagaagaccgtgctgaaggacgccaaccagaccatccaggacagcaagcccgacagctgcgagatgaaccccaacacccagatgaccggcaaccagctgaacctgaagaacatggagacccccagcaccagcaacgtgagcggcagagtgctggacaacagcttctgcagcggccaggagagcagcaccaagggcatgcccgccaagagcgacagcagctgcagcatggaggtgctggccacctag

SEQ ID NO: 292234 - DNA, 2028 bp, Artificial Sequence
  derived and/or modified sequence
atgaattggaacgaaaagcctaagagcgctacattacctcccctttatccgaaatcgcaacctccctttctccaccaaagcctgattaaccagattaccaccacaagccaaagtagcttctcctaccccggctctaaccaggaggcttgtatgtacccaggcaatagcaacccaatctctcagcccctgctgaatattcagaactacccacagcagatctccgtctctgatatgcataacgggaccgtggttgcttctcatacaagcgtagagcgtataacctacgccaatgttaacggtcccaaacagctgacccataaccttcagatgtcttctggcgtaacccagaatgtgtggttgaacagcccgatgaggaatcctgtccacagtcacatcggtgcaactgtttcccaccagaccgatttcggagcgaacgtgcccaatatgcccgccctacagtctcagttgattaccagtgacacctattctatgcagatgcagatgattccttctaattctactcggctacccgttgcctaccaaggtaatcagggcctgaaccaatccttttccgaacagcaggtcgattggacgcagcagtgcatctctaagggcctcacttaccctgactacaggcccccgcccaagctgtatcgttactctccacagtctttcttacccgattcgaccatccagaagcagaactttatcccacacacgtccttgcaggtaaagaattcccaactgctcaactccgtgctcacgctgccctctcggcaaacatctgccgtaccgagccagcagtacgcgacccaaaccgacaagcgccccccccctcccccatacaactgcagatacggttcacaacccttacaatccactcagcacattacaaagcatcttagcatggaagtcccccagagcagagaaatgttgtcttccgagatacgaaccagttttcagcagcaatggcagaatccaaacgaaaacgtcagcacaataggaaattttaccaatctcaaagtcaataccaattcaaaacagccttttaactctcctatccgttcctctgtggacggcgtgcagaccctagcccagaccaatgaggaaaagataatggactcctgcaatccgacttccaaccaagttcttgacaccagcgtcgctaaggagaagctcgtaagagacatcaagaccctggttgaaattaaacagaaattttccgaactcgctcgtaagataaaaatcaacaaggatcttctcatggccgcaggctgcatcaagatgaccaatacgtcgtacagcgagccagctcagaattccaaattgtcgctgaagcagacagccaaaatccagagtgggccgcagattactcccgtgatgccggaaaatgctgagcggcagacacccaccgtagtggagtctgccgagaccaataaaacacagtgtatgttgaattcagatattcaggaggttaattgccggaggtttaaccaggttgatagtgtcttacctaaccctgtctattctgagaagaggccgatgccggacagtagccatgacgttaaagttctgacctccaaaacctcagctgtggaaatgacgcaggctgtgcttaacacacaattgtcctccgagaacgtgaccaaggtggagcagaactcccctgctgtctgtgaaactatttctgttcctaaatcaatgagcacggaggagtataagtccaaaattcagaacgaaaacatgctcctgctcgccctgctctcacaggcaaggaaaacccagaagaccgtgctcaaggatgctaaccagacgatccaggatagcaaacccgacagctgcgagatgaacccaaatacccagatgaccggcaaccagctgaacctgaagaacatggagactccttccacatccaacgttagcgggcgggttctggataactcgttctgcagcggtcaggaaagctccacaaaagggatgcccgctaaatcagacagcagctgctcaatggaggttctcgctacttag

SEQ ID NO: 292235 - DNA, 2028 bp, Artificial Sequence
  derived and/or modified sequence
atgaactggaatgagaagcccaagagcgccaccctgccccccctgtaccccaagagccagccccccttcctgcaccagagcctcatcaaccagatcaccaccaccagccagagcagcttctcctacccaggcagcaaccaggaggcctgcatgtacccaggcaacagcaaccccatcagccagcccctgctgaacatccagaactacccccagcagatctctgtgtctgacatgcacaacggcaccgtggtggccagccacacctctgtggagcgcatcacctacgccaacgtgaatggccccaagcagctgacccacaacctgcagatgagcagcggcgtgacccagaatgtgtggctgaacagccccatgagaaatcctgtgcacagccacatcggggccaccgtgagccaccagacagactttggagccaacgtgcccaacatgcctgccctgcagagccagctgatcaccagtgacacctacagcatgcagatgcagatgatccccagcaacagcacccggctgcctgtggcctaccagggcaaccagggcctgaaccagagcttcagcgagcagcaggtggactggacccagcagtgcatcagcaagggcctgacctacccagactacagacctccacccaagctgtaccgctacagcccccagagcttcctgcctgacagcaccatccagaagcagaacttcatcccccacaccagcctgcaggtgaagaacagccagctgctgaacagcgtgctgaccctgcccagccggcagaccagcgctgtgcccagccagcagtatgccacccagacagacaagaggcctcctcctccaccctacaactgccgctatggcagccagcccctgcagagcacccagcacatcaccaagcacctgtccatggaggtgccccagagccgggagatgctgagcagcgagatccgcaccagcttccagcagcagtggcagaaccccaatgaaaatgtgtccaccatcggcaacttcaccaacctgaaggtgaacaccaacagcaagcagcccttcaacagccccatccgcagctctgtggatggagtgcagaccctggcccagaccaatgaggagaagatcatggacagctgcaaccccaccagcaaccaggtgctggacacctctgtggccaaggagaagctggtgcgggacatcaagaccctggtggagatcaagcagaagttcagcgagctggccaggaagatcaagatcaacaaggacctgctgatggccgccggctgcatcaagatgaccaacaccagctacagcgagcccgcccagaacagcaagctgagcctgaagcagacagccaagatccagagcggcccccagatcacccctgtgatgccagaaaatgctgagcggcagacccccaccgtggtggagagcgctgagaccaacaagacccagtgcatgctgaacagcgacatccaggaggtgaactgccgccgcttcaaccaggtggacagcgtgctgcccaaccctgtgtacagcgagaagaggcccatgccagacagcagccatgatgtgaaggtgctgaccagcaagaccagcgctgtggagatgacccaggccgtgctgaacacccagctgagcagtgaaaatgtgaccaaggtggagcagaacagccctgctgtgtgtgagaccatctctgtgcccaagtccatgagcacagaggagtacaagagcaagatccagaatgaaaacatgctgctgctggccctgctgagccaggccaggaagacccagaagacagtgctgaaggatgccaaccagaccatccaggacagcaagccagacagctgtgagatgaaccccaacacccagatgactggaaaccagctgaacctgaagaacatggagacccccagcaccagcaatgtgtctggccgggtgctggacaacagcttctgcagcggccaggagagcagcaccaagggcatgcctgccaagagtgacagcagctgcagcatggaggtgctggccacctag

SEQ ID NO: 292236 - DNA, 2028 bp, Artificial Sequence
  derived and/or modified sequence
atgaactggaacgagaagcccaagagcgccaccctgccccccctgtatcccaagtctcagcctcccttcctacaccagtctctgatcaatcaaatcaccaccacttcccagagctccttctcttatcctggctccaaccaggaggcttgcatgtacccaggaaattccaatcccattagccagcctctgcttaacattcagaactacccccaacagatatccgtcagcgatatgcacaacgggactgtggtggcttcacacacctccgtggaaaggataacctacgctaacgttaacggacccaaacagctcacgcataacttgcaaatgtcgtccggtgtgactcagaatgtttggcttaattcacccatgagaaacccggtgcattcccacatcggtgcaaccgttagccaccagacagacttcggagccaatgtgccaaatatgcctgccctgcagagccagctgataacctctgatacgtacagcatgcaaatgcaaatgattcctagtaatagcactcggcttccggtcgcttatcagggtaatcaaggcttgaatcaaagttttagcgaacagcaggtggactggactcagcagtgtatttccaaaggactgacctaccccgattatcggccacctcctaaactgtatagatattcaccacagtcctttcttcctgatagcaccatccagaaacaaaatttcatcccacacacatctctgcaggtgaaaaacagccagctgctcaactcagtgctgacactgccctcccgccaaacctcagccgtcccatcgcagcagtacgccacacaaaccgataagcgtcctccccctcccccatacaactgcaggtacggtagccaacccctgcagtctacccagcacattaccaagcacctgtctatggaggtgccccagagtcgcgaaatgctgtccagcgaaattcgtacttcttttcaacagcagtggcagaaccctaacgagaacgtcagcaccatcgggaatttcaccaatctgaaagtaaacactaactctaaacaaccctttaattcccccataaggtcttcggtggacggcgtgcaaacactggctcaaaccaatgaggagaaaatcatggacagctgcaatcccacgtctaaccaggtgcttgatacttcagttgctaaggaaaaactcgtgagggacattaaaacgctggttgagattaagcaaaagtttagcgagctagcccgtaaaattaagattaataaggatctgttgatggctgcaggatgtattaaaatgacgaatacttcctatagtgaacctgctcagaattccaagctctcactcaagcaaacggccaagattcaatctggtccacaaataacccccgtcatgccggaaaacgcggaacgacagacccctacagttgtcgaatccgccgaaaccaacaaaacacaatgcatgctcaattcagacattcaagaggtgaactgcagacgcttcaaccaggtggactcagttctgcccaatcctgtgtattccgagaagcgccccatgccggacagctctcatgatgtgaaggtcttgacatcaaaaacttccgccgttgaaatgactcaggctgttctgaatacccagctgtctagcgagaacgtgacgaaggtggaacaaaactcccccgctgtatgcgaaacgattagtgtgcctaagagtatgtctactgaagagtataaatctaagattcagaatgaaaatatgcttttattagcccttctgagtcaagcaagaaaaactcaaaagacagtcttgaaagacgccaaccagacgatccaggactcgaaaccagacagctgcgagatgaacccaaacacccaaatgactggcaatcagttaaatctgaagaatatggaaacaccaagcaccagtaacgtgtctggacgggtgttggataacagtttttgctctgggcaagagtcctcaaccaaagggatgcctgctaagtctgacagcagctgcagcatggaagtgttggctacatag

SEQ ID NO: 292237 - DNA, 2028 bp, Artificial Sequence
  derived and/or modified sequence
atgaattggaatgagaaacctaaaagtgcgaccctgccacccctgtaccccaaatcccagccccctttcttacatcagtccctgatcaaccaaattactaccaccagccagtctagtttttcctaccccggaagcaaccaggaggcttgcatgtatccagggaactcaaaccctatttctcagccgctgctgaacattcaaaactaccctcaacaaatttcggtgtccgacatgcataatggtacagtggtggcaagccacacatctgtggaaaggattacgtacgcaaatgttaacgggccaaaacagcttacccataacctccagatgtcatcaggagttactcagaacgtttggctaaattcaccgatgagaaatccagtgcattctcacattggggcaaccgtttcgcaccagactgattttggggctaatgtgccaaacatgcccgctttgcagagtcagctgatcacctctgacacatactcaatgcagatgcagatgattccttctaacagcacgagactgcctgttgcctaccagggcaatcagggcctcaaccagagcttttccgagcaacaggtggactggacccagcaatgtatttccaaaggtctgacctacccagactatcggcctcctcctaagctctatcgatacagcccgcagagctttttacccgattcgacaatccagaagcaaaacttcattccccacacttccctccaagtcaagaattcacagctactaaatagcgttctaacactgccaagtcggcaaacatccgctgtcccgtcccaacagtacgcgacccagacggataaacgacccccaccccctccctacaactgccggtatgggtctcaaccccttcaaagtacacaacatataaccaaacacttatcaatggaagtaccccagagccgagagatgctgtcctcagaaattaggacttcatttcagcagcagtggcagaaccctaatgaaaacgtaagtacgattggaaacttcacaaacctaaaggtgaacaccaactccaaacaaccttttaactcacccattaggtcctccgtggacggcgtccagacccttgcccaaactaacgaggaaaagatcatggactcatgcaatcctacgagtaaccaggtgttggacacatctgtagccaaagaaaagctggtgcgggacattaaaacactggtggagattaaacagaagttctcagaactcgcacggaagattaaaattaataaggatcttttgatggccgcaggatgtatcaagatgacaaacacatcttatagtgagcctgcccaaaactcaaagctatcccttaagcagacagccaagatccagtctggccctcagataactccggtcatgcccgaaaacgcggagaggcagacccccaccgtggtggagagcgccgaaacaaataagacacagtgcatgctaaacagcgacatacaagaggtaaattgtcgccgattcaaccaggtggattcagttctgccaaatcccgtttacagcgagaaaaggcccatgcccgattcctcccacgatgtcaaggtgttaacttctaaaacctccgcggtggaaatgactcaagcggtattaaatactcagttgtcatcagagaacgtgaccaaagtggagcagaatagtcccgcagtatgcgagacaatctcggtgccaaaaagcatgtcaaccgaagagtacaagtcaaaaatccagaacgaaaacatgctgcttctcgccctgctcagccaggctaggaagacccagaagacagtgcttaaggatgcgaatcagacgatccaggattcaaaacctgactcatgcgagatgaacccgaatactcagatgactggaaaccaactgaatctgaagaatatggagactccctcaacttccaatgtcagcggacgggtgttggataattctttctgctctggacaagagtcttcgacaaagggcatgcctgctaaaagtgactcctcatgcagcatggaagtgctcgccacctag

SEQ ID NO: 292238 - DNA, 279 bp, Artificial Sequence
  derived and/or modified sequence
atggagagactggagatccagagaatcgagaaggagaagtggcacagactggaggccaaggacctggagagaagaaacgaggagctggaggagctgtacctgctggagagatgcttccccgaggccgagaagctgaagcaggagaccaagctgctgagccagtggaagcactacatccagtgcgacggcagccccgaccccagcgtggcccaggagatgaacaccttcatcagcctgtggaaggagaagaccaacgagaccttcgaggaggtgatctag

SEQ ID NO: 292239 - DNA, 279 bp, Artificial Sequence
  derived and/or modified sequence
atggagcggctcgagatccagcggatcgaaaaagaaaaatggcaccgcctggaagcaaaggatctcgagagaagaaacgaggagcttgaggagctgtatttgcttgagaggtgtttccctgaggctgaaaaactcaagcaggagacaaaacttctctcccagtggaaacactatattcaatgcgatgggtcgccagatccgagtgtggcccaggaaatgaatacttttatctccctctggaaggaaaagactaatgagactttcgaggaggtgatctag

SEQ ID NO: 292240 - DNA, 279 bp, Artificial Sequence
  derived and/or modified sequence
atggagcggctggagatccagagaattgagaaggagaagtggcaccggctggaggccaaggacctggagaggagaaatgaggagctggaggagctgtacctgctggagcgctgcttccctgaggccgagaagctgaagcaggagaccaagctgctgagccagtggaagcactacatccagtgtgatggcagcccagaccccagcgtggcccaggagatgaacaccttcatcagcctgtggaaggagaagaccaatgagacctttgaggaggtgatctag

SEQ ID NO: 292241 - DNA, 279 bp, Artificial Sequence
  derived and/or modified sequence
atggagcggctggagatccagcggatcgagaaggagaagtggcaccgacttgaggcgaaggatctggagcggaggaatgaagagctcgaggagctctacctgctggaacgctgtttccctgaggccgaaaagctcaaacaggagaccaagctactgtctcaatggaagcactacatccagtgcgatggttcacctgatccctctgtggcacaggagatgaatacctttataagcctgtggaaggaaaagacgaatgaaacattcgaggaagtaatctag

SEQ ID NO: 292242 - DNA, 279 bp, Artificial Sequence
  derived and/or modified sequence
atggaaagactcgaaatccagcgcatcgaaaaggaaaagtggcaccggctggaagccaaagacttggagagacgaaatgaagaactggaagaactgtacctgttagagcgctgctttccggaagcagagaagctgaagcaggagacaaagctccttagtcagtggaaacactatattcaatgtgacgggagtcctgacccatctgtagcccaggagatgaatacatttatttcactttggaaggagaaaactaacgagactttcgaggaggtgatttag

SEQ ID NO: 292243 - DNA, 583 bp, Artificial Sequence
  derived and/or modified sequence
acacaatttctgctccgactctgcggactactgcagtggagcttgactcttaatgagtttcgctctgttgcccaggctggaatgcaatggcgcgatctcggcttactgaaacctctgcctcccgggttcaagcgattctccttcaagcgattctcctgcctcagcctcccgagtagctgggattacagtctggcagtaagaaaaagaaagtcaccaaagctgaacgattgaagctgctacaagaggaggaggagagacgactgaaagaggaagaggaagcccgtttgaaatatgagaaagaagaaatggaaaggcttgaaatacagcgaattgagaaagaaaaatggcatcgacttgaagcaaaagatctagaaaggagaaatgaagaacttgaagaactttatttattagagaggtgttttcctgaagcagagaaattgaaacaggaaactaaattgctttctcagtggaagcactacattcaatgtgatgggagtcctgatccttcagtagcccaagaaatgaacacgtttattagtttgtggaaagagaaaacaaatgagacttttgaggaagtgattga

SEQ ID NO: 292244 - protein, 199 aa, Artificial Sequence
  derived and/or modified sequence
MASVSALTEELDSITSELHAVEIQIQELTERQQELIQKKKVLTKKIKQCLEDSDAGASNEYDSSPAAWNKEDFPWSGKVKDILQNVFKLEKFRPLQLETINVTMAGKEVFLVMPTGGGKSLCYQLPALCSDGFTLVICPLISLMEDQLMVLKQLGISATMLNASSSKEHVKWVHAEMVNKNSELKLIYVTPEKIAKSKM

SEQ ID NO: 292245 - protein, 211 aa, Artificial Sequence
  derived and/or modified sequence
MASVSALTEELDSITSELHAVEIQIQELTERQQELIQKKKVLTKKIKQCLEDSDAGASNEYDSSPAAWNKEDFPWSGKVKDILQNVFKLEKFRPLQLETINVTMAGKEVFLVMPTGGGKSLCYQLPALCSDGFTLVICPLISLMEDQLMVLKQLGISATMLNASSSKEHVKWVHAEMVNKNSELKLIYVTPEKIAKSKMFMSRLEKAYEAR

SEQ ID NO: 292246 - protein, 649 aa, Artificial Sequence
  derived and/or modified sequence
MASVSALTEELDSITSELHAVEIQIQELTERQQELIQKKKVLTKKIKQCLEDSDAGASNEYDSSPAAWNKEDFPWSGKVKDILQNVFKLEKFRPLQLETINVTMAGKEVFLVMPTGGGKSLCYQLPALCSDGFTLVICPLISLMEDQLMVLKQLGISATMLNASSSKEHVKWVHAEMVNKNSELKLIYVTPEKIAKSKMFMSRLEKAYEARRFTRIAVDEVHCCSQWGHDFRPDYKALGILKRQFPNASLIGLTATATNHVLTDAQKILCIEKCFTFTASFNRPNLYYEVRQKPSNTEDFIEDIVKLINGRYKGQSGIIYCFSQKDSEQVTVSLQNLGIHAGAYHANLEPEDKTTVHRKWSANEIQVVVATVAFGMGIDKPDVRFVIHHSMSKSMENYYQESGRAGRDDMKADCILYYGFGDIFRISSMVVMENVGQQKLYEMVSYCQNISKCRRVLMAQHFDEVWNSEACNKMCDNCCKDSAFERKNITEYCRDLIKILKQAEELNEKLTPLKLIDSWMGKGAAKLRVAGVVAPTLPREDLEKIIAHFLIQQYLKEDYSFTAYATISYLKIGPKANLLNNEAHAITMQVTKSTQNSFRAESSQTCHSEQGDKKMEEKNSGNFQKKAANMLQQSGSKNTGAKKRKIDDA

SEQ ID NO: 292247 - protein, 106 aa, Artificial Sequence
  derived and/or modified sequence
MASVSALTEELDSITSELHAVEIQIQELTERQQELIQKKKVLTKKIKQCLEDSDAGASNEYDSSPAAWNKEDFPWSGKVKDILQNVFKLEKFRPLQLETINVTMAG

SEQ ID NO: 292248 - protein, 97 aa, Artificial Sequence
  derived and/or modified sequence
MASVSALTEELDSITSELHAVEIQIQELTERQQELIQKKKVLTKKIKQCLEDSDAGASNEYDSSPAAWNKEDFPWSGKVKDILQNVFKLEKFRPLQL

SEQ ID NO: 292249 - protein, 72 aa, Artificial Sequence
  derived and/or modified sequence
MASVSALTEELDSITSELHAVEIQIQELTERQQELIQKKKVLTKKIKQCLEDSDAGASNEYDSSPAAWNKED

SEQ ID NO: 292250 - protein, 131 aa, Artificial Sequence
  derived and/or modified sequence
MASVSALTEELDSITSELHAVEIQIQELTERQQELIQKKKVLTKKIKQCLEDSDAGASNEYDSSPAAWNKEDFPWSGKVKDILQNVFKLEKFRPLQLETINVTMAGKEVFLVMPTGGGKSLCYQLPALCSD

SEQ ID NO: 292251 - DNA, 600 bp, Artificial Sequence
  derived and/or modified sequence
atggcatccgtgtctgccctgacagaggaattagattccatcacttcggagttgcacgcggtagagatccaaatacaggaactgactgagcggcaacaagagctcattcagaagaagaaggtgttgactaaaaaaattaagcagtgtctggaagactctgatgccggtgccagtaacgaatacgattcttcaccagccgcttggaacaaggaagacttcccctggagcgggaaagtcaaagatattttacagaacgtgttcaaactcgagaagtttagaccactccagctcgagacaattaatgtcacgatggccggtaaggaggtattcttggtgatgccaacgggtggcggcaaatccctttgctaccagttacctgccctgtgttccgacgggttcactctggtgatctgccctctgattagtcttatggaggaccagctgatggtactaaaacagttgggtatcagcgcaactatgctgaacgccagtagtagtaaggagcacgtcaagtgggtgcatgccgagatggtaaacaaaaattctgaactgaaattgatttacgtgactccggaaaaaatcgccaagtcgaaaatgtag

SEQ ID NO: 292252 - DNA, 636 bp, Artificial Sequence
  derived and/or modified sequence
atggccagtgtctccgcactgactgaggaactcgacagcattactagcgaactccacgccgttgaaatccagatacaggaactgacagagaggcaacaggagctgattcagaagaagaaggttctcactaagaagataaagcagtgtctcgaagatagtgacgcgggggcctccaacgagtatgactcctctccagctgcttggaataaggaagatttcccatggagtggcaaggtgaaagatatcctgcagaacgtattcaagctggaaaaattcaggcccttgcagttagagaccattaacgtgactatggccgggaaggaagttttcctcgtgatgcctacgggtggcggcaaatctctgtgttaccagctgccggcgttgtgtagtgacggatttactctggtcatttgccccctgatctcactcatggaggatcaacttatggtcttaaagcagctgggtatttctgcaacaatgctcaatgcaagcagcagtaaggaacatgtaaaatgggtgcatgcagaaatggtgaataagaattctgagctgaagctgatatatgttaccccagagaaaatagctaagagcaagatgtttatgagccgacttgagaaggcatatgaggcccggtag

SEQ ID NO: 292253 - DNA, 1950 bp, Artificial Sequence
  derived and/or modified sequence
atggcttccgtgtccgccttgacagaggagctcgactccatcactagcgaactgcacgcagtcgaaatacagatccaagaattaacggaaaggcagcaggagctgattcagaagaaaaaggttctcacaaagaaaattaagcaatgcttggaggactctgacgctggcgcctcgaacgagtacgatagtagtccagctgcttggaacaaggaggacttcccgtggtcgggcaaggtgaaagacatcctgcagaacgtcttcaagcttgaaaaattcagaccactgcagcttgagaccataaacgtgacaatggccggtaaagaagtctttctggtcatgcctaccggaggggggaagtccctgtgctaccagctgcctgctttatgtagtgatggctttaccctggtgatctgcccgcttatctctctgatggaggatcagctgatggtgctgaagcagctgggaatttcagccacaatgttgaacgccagtagcagcaaggagcacgtcaagtgggtccacgccgagatggtcaataagaactccgagctaaagctgatctatgtgacaccagaaaaaatcgccaagagcaagatgtttatgagtagactagaaaaagcctacgaggcaaggcgatttacacgaatagccgtggatgaggtgcactgttgcagtcagtggggacacgactttcgccctgactacaaggccctgggaatacttaaacgccagtttcccaacgcctctttgatcggtctgacagccaccgccacaaatcacgtgctcacggatgctcagaaaatcctctgtatagagaagtgcttcacctttacagccagtttcaatcggcccaatctgtactacgaagtgagacagaagccatctaacaccgaggacttcatcgaggacattgtgaagctaatcaatggccgttacaagggacagtctggcattatttactgcttttctcagaaggacagcgagcaggtaaccgtgtcactgcaaaacctgggtatccacgcaggagcataccacgccaacctggagcccgaagacaagacaaccgtccaccgcaagtggagcgccaatgaaattcaggtggtcgtggctactgtcgcatttggaatggggatcgataagcccgacgtgaggttcgtcattcatcacagcatgtcaaagtctatggagaattactaccaggaaagtggacgggctggccgggatgatatgaaggccgattgtatcctttactacggcttcggggatatctttagaattagtagtatggtcgtcatggagaacgtgggccagcagaaactgtacgaaatggtctcctattgtcaaaacatctctaagtgcaggcgggtgctcatggcccaacatttcgatgaggtatggaacagtgaggcctgcaataaaatgtgcgacaactgttgtaaggattctgcatttgaacggaagaatattacagaatactgtcgggatctcatcaagatactaaaacaagccgaagagcttaacgagaaattaacacctttaaagttaatagactcttggatggggaaaggggccgcaaagctccgcgtggcaggagtagtcgctcccaccctgcccagagaagatctggaaaagattatagcacacttcttaatccagcaatatctgaaggaagattactcctttacagcgtacgcaaccataagctacctgaaaatagggccaaaagctaatctgttaaataacgaagctcacgccattaccatgcaagtgacaaaatctacgcaaaactcatttagggcagaatcatctcaaacatgccacagcgagcagggagacaaaaagatggaggaaaaaaattctggcaacttccagaagaaggccgccaacatgctccagcaaagcggtagtaaaaataccggcgcgaaaaagaggaaaattgacgacgcttag

SEQ ID NO: 292254 - DNA, 1950 bp, Artificial Sequence
  derived and/or modified sequence
atggctagcgtgagtgctctgaccgaagaactggacagcattacctcggagttgcatgcggtggagattcagattcaggagcttactgaacgccagcaggaattgattcagaagaaaaaggttctgacaaagaaaataaagcagtgtttggaagactcagacgcaggcgcctccaacgaatacgattccagcccagcagcctggaataaagaggatttcccatggagcggcaaagtgaaagatatactccagaacgtgttcaagctcgaaaagttcagaccactgcagctggaaacaatcaatgtgaccatggcaggcaaggaagtgttcctggttatgccaaccggagggggaaagagcttatgctaccagcttcctgcattgtgctcagatggatttacactcgtaatctgtccgctcattagccttatggaggaccagctgatggttctgaagcaactcggcatttcggcaaccatgttgaacgcatcctcttcaaaggaacacgtgaagtgggtgcatgccgagatggttaacaaaaactcggaactgaaactgatttatgttacaccagaaaagattgccaaatctaaaatgttcatgagccggctcgaaaaagcgtatgaggctaggcggttcacgaggatcgccgtggacgaagtgcattgctgttctcaatgggggcatgactttcgaccagattacaaggccctcggtatccttaagagacagtttccgaacgcatccctgattggccttaccgctacagctaccaatcatgtgctgacggacgctcaaaagattttgtgcatcgaaaagtgtttcaccttcacggcaagctttaataggccgaatctgtactatgaggtgcggcaaaaaccctcaaatacggaagactttatcgaggacattgtgaaactgattaatggaagatataagggacagtctggcatcatttattgtttttcccagaaggattccgagcaggtcaccgtgagtttgcagaacctagggattcatgctggagcatatcacgcaaatttggaacccgaggataagactactgtgcaccggaaatggtctgccaatgaaatacaggtcgtggttgcgacagttgcattcggaatggggatcgacaagccagatgtgagattcgtgattcaccacagcatgagcaagtcgatggagaactactaccaagaaagcgggagggcaggcagggatgatatgaaagcggattgtatcttatactatgggtttggggatatttttagaatctcatcaatggtggtcatggagaatgtaggccagcagaagctctatgagatggtctcttactgtcagaatatatctaagtgcagaagagtcttgatggcacagcacttcgacgaggtatggaattcagaggcatgtaacaagatgtgtgacaattgttgcaaagattctgcattcgaacgtaaaaacattactgagtactgtcgtgatcttattaaaatcttgaagcaggccgaagagctgaacgagaagctgaccccgctcaagctcatcgattcatggatgggcaagggagcagctaagctccgagtggcaggcgtggtggctcccactctgcccagggaagatttggagaagattattgctcactttctgatccaacagtatctgaaagaggactattcattcacagcatacgccactatatcctacttaaaaatagggcccaaggccaacttgctgaacaatgaagcccacgctataacaatgcaagtgactaagtccactcagaacagctttagagcagagtcaagccagacttgtcactcggagcagggagacaaaaagatggaagagaaaaacagtggtaattttcagaagaaagccgcaaatatgctgcaacagagtggaagcaaaaacactggggccaagaaaaggaaaatcgacgacgcctag

SEQ ID NO: 292255 - DNA, 321 bp, Artificial Sequence
  derived and/or modified sequence
atggcctcagtcagcgccttgacagaagagctggactctattacatccgagttgcacgccgttgagattcagattcaggaactgaccgagcggcagcaggagctcatacagaagaagaaggttcttacaaaaaaaataaaacagtgccttgaagatagtgacgccggagcctcaaatgagtacgactccagccctgcagcctggaataaagaggacttcccatggagcgggaaggtgaaggatatactgcaaaatgtgttcaagttagagaagttccgacctttgcaactcgaaactatcaatgtaactatggccggctag

SEQ ID NO: 292256 - DNA, 294 bp, Artificial Sequence
  derived and/or modified sequence
atggccagtgtgtctgcactgactgaagagttggatagtattacttctgaactgcatgctgtggaaattcaaatacaagaactgaccgagcggcagcaggaactgatacaaaaaaaaaaggtgcttactaagaaaattaagcagtgccttgaggattcagacgcaggagcatctaatgaatatgatagctcccccgcagcctggaacaaggaagactttccttggtccggcaaggttaaggacatccttcaaaacgtgtttaagcttgagaaatttcggccattgcaactgtag

SEQ ID NO: 292257 - DNA, 219 bp, Artificial Sequence
  derived and/or modified sequence
atggccagcgtgtcagcgctaactgaagaactggatagtatcacatccgagctgcatgccgttgagatccagatccaggaactcaccgagcgccagcaggagctgattcagaaaaagaaggtactcaccaagaagataaagcagtgcctggaggattccgatgcgggcgcgagcaatgagtatgactccagtcctgccgcatggaataaggaagactag

SEQ ID NO: 292258 - DNA, 396 bp, Artificial Sequence
  derived and/or modified sequence
atggcctccgtttccgcgctcactgaagagttagatagcatcacttctgaactgcacgcggtcgaaatccagatacaggagctaacggaaagacagcaggagctcatccagaaaaaaaaggtactcaccaagaagatcaagcagtgcttagaagactcagatgctggcgcctctaacgaatatgactcctccccagctgcctggaataaggaagactttccgtggagtggcaaggttaaggacatcttgcagaatgtgttcaaactggagaaattccggccattgcaactcgaaacaataaatgtgaccatggccggcaaagaagtgttcttggtgatgcccactggaggcggaaaatccctttgctatcagttgcccgctttatgcagtgattag

SEQ ID NO: 292259 - DNA, 600 bp, Artificial Sequence
  derived and/or modified sequence
atggcctctgtgtctgccctgacagaggagctggacagcatcaccagcgagctgcatgctgtggagatccagatccaggagctgacagagcggcagcaggagctgatccagaagaagaaggtgctgaccaagaagatcaagcagtgcctggaggacagtgatgctggggccagcaatgaatatgacagcagccctgctgcctggaacaaggaggacttcccctggagcggcaaggtgaaggacatcctgcagaatgtgttcaagctggagaagttccggcccctgcagctggagaccatcaacgtgaccatggccggcaaggaggtgttcctggtgatgcccactggaggcggcaagagcctgtgctaccagctgcctgccctgtgcagtgatggcttcaccctggtgatctgccccctcatcagcctgatggaggaccagctgatggtgctgaagcagctgggcatcagcgccaccatgctgaatgccagcagcagcaaggagcacgtgaagtgggtgcatgctgagatggtgaacaagaacagcgagctgaagctgatctacgtgaccccagagaagatcgccaagagcaagatgtag

SEQ ID NO: 292260 - DNA, 636 bp, Artificial Sequence
  derived and/or modified sequence
atggcctctgtgtctgccctgacagaggagctggacagcatcaccagcgagctgcatgctgtggagatccagatccaggagctgacagagcggcagcaggagctgatccagaagaagaaggtgctgaccaagaagatcaagcagtgcctggaggacagtgatgctggggccagcaatgaatatgacagcagccctgctgcctggaacaaggaggacttcccctggagcggcaaggtgaaggacatcctgcagaatgtgttcaagctggagaagttccggcccctgcagctggagaccatcaacgtgaccatggccggcaaggaggtgttcctggtgatgcccactggaggcggcaagagcctgtgctaccagctgcctgccctgtgcagtgatggcttcaccctggtgatctgccccctcatcagcctgatggaggaccagctgatggtgctgaagcagctgggcatcagcgccaccatgctgaatgccagcagcagcaaggagcacgtgaagtgggtgcatgctgagatggtgaacaagaacagcgagctgaagctgatctacgtgaccccagagaagatcgccaagagcaagatgttcatgagccggctggagaaggcctatgaggccaggtag

SEQ ID NO: 292261 - DNA, 1950 bp, Artificial Sequence
  derived and/or modified sequence
atggcctctgtgtctgccctgacagaggagctggacagcatcaccagcgagctgcatgctgtggagatccagatccaggagctgacagagcggcagcaggagctgatccagaagaagaaggtgctgaccaagaagatcaagcagtgcctggaggacagtgatgctggggccagcaatgaatatgacagcagccctgctgcctggaacaaggaggacttcccctggagcggcaaggtgaaggacatcctgcagaatgtgttcaagctggagaagttccggcccctgcagctggagaccatcaacgtgaccatggccggcaaggaggtgttcctggtgatgcccactggaggcggcaagagcctgtgctaccagctgcctgccctgtgcagtgatggcttcaccctggtgatctgccccctcatcagcctgatggaggaccagctgatggtgctgaagcagctgggcatcagcgccaccatgctgaatgccagcagcagcaaggagcacgtgaagtgggtgcatgctgagatggtgaacaagaacagcgagctgaagctgatctacgtgaccccagagaagatcgccaagagcaagatgttcatgagccggctggagaaggcctatgaggcccggcgcttcaccagaattgctgtggatgaggtgcactgctgcagccagtggggccatgacttccggccagactacaaggccctgggcatcctgaagaggcagttccccaatgccagcctgattggcctgacagccacagccaccaaccacgtgctgacagatgcccagaagatcctgtgcatcgagaagtgcttcaccttcaccgccagcttcaaccggcccaacctgtactatgaggtgcggcagaagcccagcaacacagaggacttcatcgaggacatcgtgaagctgatcaatggccgctacaagggccagagcggcatcatctactgcttcagccagaaggacagcgagcaggtgacagtgtccctgcagaacctgggcatccatgctggggcctaccacgccaacctggagcctgaggacaagaccaccgtgcacaggaagtggagcgccaatgagatccaggtggtggtggccaccgtggccttcggcatgggcatcgacaagccagatgtgcgctttgtgatccaccacagcatgagcaagtccatggagaactactaccaggagagcggccgggccggcagagatgacatgaaggctgactgcatcctgtactacggctttggagacatcttccgcatcagctccatggtggtgatggagaatgtgggccagcagaagctgtatgagatggtgtcctactgccagaacatcagcaagtgccggcgggtgctgatggcccagcactttgatgaggtgtggaacagcgaggcctgcaacaagatgtgtgacaactgctgcaaggacagcgcctttgagaggaagaacatcacagagtactgccgggacctgatcaagatcctgaagcaggccgaggagctgaatgagaagctgacccccctgaagctgattgacagctggatgggcaagggggccgccaagctgcgggtggccggcgtggtggcccccaccctgccccgggaggacctggagaagatcatcgcccacttcctgatccagcagtacctgaaggaggactacagcttcaccgcctatgccaccatctcctacctgaagattggccccaaggccaacctgctgaacaatgaggcccacgccatcaccatgcaggtgaccaagagcacccagaacagcttccgggcagagagcagccagacctgccacagcgagcagggcgacaagaagatggaggagaagaacagcggcaacttccagaagaaggccgccaacatgctgcagcagagcggcagcaagaacacaggagccaagaagaggaagattgatgatgcctag

SEQ ID NO: 292262 - DNA, 321 bp, Artificial Sequence
  derived and/or modified sequence
atggcctctgtgtctgccctgacagaggagctggacagcatcaccagcgagctgcatgctgtggagatccagatccaggagctgacagagcggcagcaggagctgatccagaagaagaaggtgctgaccaagaagatcaagcagtgcctggaggacagtgatgctggggccagcaatgaatatgacagcagccctgctgcctggaacaaggaggacttcccctggagcggcaaggtgaaggacatcctgcagaatgtgttcaagctggagaagttccggcccctgcagctggagaccatcaacgtgaccatggccggctag

SEQ ID NO: 292263 - DNA, 294 bp, Artificial Sequence
  derived and/or modified sequence
atggcctctgtgtctgccctgacagaggagctggacagcatcaccagcgagctgcatgctgtggagatccagatccaggagctgacagagcggcagcaggagctgatccagaagaagaaggtgctgaccaagaagatcaagcagtgcctggaggacagtgatgctggggccagcaatgaatatgacagcagccctgctgcctggaacaaggaggacttcccctggagcggcaaggtgaaggacatcctgcagaatgtgttcaagctggagaagttccggcccctgcagctgtag

SEQ ID NO: 292264 - DNA, 219 bp, Artificial Sequence
  derived and/or modified sequence
atggcctctgtgtctgccctgacagaggagctggacagcatcaccagcgagctgcatgctgtggagatccagatccaggagctgacagagcggcagcaggagctgatccagaagaagaaggtgctgaccaagaagatcaagcagtgcctggaggacagtgatgctggggccagcaatgaatatgacagcagccctgctgcctggaacaaggaggactag

SEQ ID NO: 292265 - DNA, 396 bp, Artificial Sequence
  derived and/or modified sequence
atggcctctgtgtctgccctgacagaggagctggacagcatcaccagcgagctgcatgctgtggagatccagatccaggagctgacagagcggcagcaggagctgatccagaagaagaaggtgctgaccaagaagatcaagcagtgcctggaggacagtgatgctggggccagcaatgaatatgacagcagccctgctgcctggaacaaggaggacttcccctggagcggcaaggtgaaggacatcctgcagaatgtgttcaagctggagaagttccggcccctgcagctggagaccatcaacgtgaccatggccggcaaggaggtgttcctggtgatgcccactggaggcggcaagagcctgtgctaccagctgcctgccctgtgcagcgactag

SEQ ID NO: 292266 - DNA, 600 bp, Artificial Sequence
  derived and/or modified sequence
atggccagcgtgagcgccctgaccgaggagctggacagcatcacctccgagctccacgctgtggaaatccaaattcaggaactgactgagcgtcagcaggaacttatacagaagaagaaagtgctaaccaagaaaattaaacaatgcttggaagactccgatgccggagcaagcaacgagtacgattccagccctgccgcctggaacaaagaagatttcccttggtctgggaaagtgaaggacattctgcagaacgttttcaagctggagaagtttcgtccattgcagttagaaacaataaacgtgaccatggcaggaaaagaagtgttcttagtgatgcctacgggcggcggtaagtctctatgctatcagctgccagctttatgcagcgacggatttacactcgtcatatgtccgttaattagtttaatggaagatcagctgatggtattgaaacaactcgggatctccgccacaatgctaaacgcaagttcatccaaggagcacgtgaagtgggtccacgcagagatggtcaacaagaattctgagcttaagctcatttacgtgactcccgagaagatcgccaaatccaagatgtag

SEQ ID NO: 292267 - DNA, 636 bp, Artificial Sequence
  derived and/or modified sequence
atggccagcgtgagcgccctgaccgaggagctggacagcatcaccagcgaactccatgccgtggaaatccagatacaggagttaacagaaagacagcaggagctcattcagaagaaaaaagtgctcactaaaaagatcaagcagtgtctggaagacagcgacgctggcgcctctaacgagtatgacagctctcctgccgcatggaacaaggaggatttcccttggtctggaaaggtgaaggacatcctccagaacgtattcaagctggagaagtttcgccctttacagcttgaaacaattaacgtaaccatggccgggaaggaggtatttctcgttatgcccaccggcgggggcaagagcctgtgctatcaattacctgccctctgttctgatgggtttacccttgtgatatgtccactgatctctctgatggaggatcaactgatggtgcttaaacagttgggtataagtgctacgatgctgaatgcaagctcctcaaaggagcatgtaaaatgggtgcacgctgaaatggttaataagaattcggagctaaagctgatctatgttactcccgagaaaattgccaagtctaaaatgtttatgagcaggttggagaaagcctatgaggcgcgctag

SEQ ID NO: 292268 - DNA, 1950 bp, Artificial Sequence
  derived and/or modified sequence
atggccagcgtgagcgccctgaccgaggagctggacagcatcacctctgagttgcatgcagtggagatccagattcaggaattgactgagcgtcagcaggagctaatccagaagaagaaagtcctcactaaaaaaataaagcagtgcctggaagacagtgatgcaggcgccagtaatgagtatgatagttcccctgccgcctggaacaaggaagattttccttggtcaggaaaggtaaaggatatcctgcagaacgtgttcaagctcgaaaagtttcgcccactgcagctagaaacaattaacgtgactatggcaggaaaggaggtatttctagtcatgcctaccggtggagggaagtccctatgttaccagctccccgcattgtgttctgatggctttaccctcgttatctgtccactgataagcctcatggaagatcagttgatggtgttgaagcaactcggcatcagcgcgaccatgctcaacgcatctagctctaaggagcacgttaagtgggtccatgctgaaatggtgaataaaaattccgagttaaagctaatttatgttacacctgagaaaatcgcgaaatcgaaaatgtttatgtcaaggctagagaaagcttatgaagctcggaggtttactcgaattgccgtcgatgaagttcactgctgttcccagtggggacatgactttcggcctgactacaaggctctggggatcctcaagaggcagtttcccaacgccagtcttattggcctcaccgcaaccgccactaaccacgtgctgaccgacgcccagaaaatcctttgtatcgagaagtgcttcacatttacagccagctttaaccgtcctaacctgtactacgaggtgagacaaaaaccatctaacactgaagacttcattgaggatatcgtaaaactcatcaacggcagatacaagggacagagtggcattatatattgcttcagccagaaagatagcgaacaggttaccgtgtccctacagaatctcggaatccacgccggagcatatcatgccaatctagaacccgaggataagacaacggtgcacagaaagtggagtgccaatgagatccaggtggtcgtggcaacagtcgcctttgggatgggcatagacaaaccggatgttcggtttgtaattcaccatagcatgagcaaatcaatggagaactactaccaagagtccggcagagccggcagagacgacatgaaagccgactgcattctctattatggattcggcgatatcttcaggatctcgtctatggtagtgatggagaacgtcggccaacagaagctgtatgaaatggtgtcctactgtcagaacatctctaaatgcaggagagtcctgatggcccaacacttcgacgaggtgtggaattctgaggcctgtaacaagatgtgtgataactgctgcaaggactcagccttcgagcgaaaaaatattactgaatactgtcgagatctcataaagatcctcaagcaggccgaggaactgaatgagaaactgaccccactcaaattgattgatagttggatgggcaaaggagccgcaaagttacgcgtggccggcgtggtggcccccacgttgcctagagaagatctggaaaaaatcatcgcccacttcttgattcagcaatacttgaaggaggattattccttcacagcctatgcaactatttcctacctgaaaatcggcccaaaggctaacttgcttaataacgaggcacacgccattaccatgcaggtgactaaaagtacccagaactcgtttagggccgagagcagtcagacatgccatagcgaacaaggcgataaaaagatggaggagaaaaacagtggcaattttcaaaagaaagcagctaacatgctgcagcaaagcggcagcaagaatacaggtgccaaaaaaaggaagatcgacgatgcctag

SEQ ID NO: 292269 - DNA, 1950 bp, Artificial Sequence
  derived and/or modified sequence
atggccagcgtgagcgccctgaccgaggagctggacagcatcaccagtgagctccatgccgtggagatacagattcaggaactgacagaacgtcagcaagaactgatacagaagaagaaagtgctaactaagaagatcaaacagtgtctggaggactcagacgcaggggcttctaacgagtatgatagctcgcctgcggcctggaacaaagaagactttccatggtcaggcaaggtaaaggacatccttcagaacgtcttcaagttggagaagttcagacccctgcagctcgagacaatcaatgttaccatggccggtaaggaagtcttccttgtgatgcccacaggcggaggcaagagcttatgctaccaattgccggctttgtgtagcgatgggtttactctcgtcatttgcccgctgatatccttgatggaggaccagttaatggtgcttaaacagctggggatctccgctaccatgctaaatgcgagttcctctaaggaacatgttaagtgggtccacgccgaaatggttaacaagaactctgaattaaaactgatatatgtaactcccgagaaaatcgctaaatctaaaatgtttatgtccaggctcgagaaggcatacgaggccaggaggttcacccgcattgctgtcgatgaagtgcactgttgttctcagtgggggcacgacttcaggccagattacaaagcgctcggcatactcaagagacagttcccaaatgcaagccttattgggctgaccgccacagccaccaatcacgttctaacagacgcccaaaagatcttatgcattgagaaatgttttaccttcacagcatctttcaatcgccccaacctctactacgaagtgaggcagaagcctagtaatacggaggatttcatcgaggacatagtgaaactgattaacgggaggtataaaggccagagcggaatcatatactgcttttcgcagaaagattctgagcaggttactgtctctctgcagaaccttgggatccatgctggagcctaccacgccaacctggagcccgaagataaaaccacagtacaccgcaagtggtccgcaaatgagatccaggtggtagtggccacagtcgccttcggcatgggtattgataagcccgatgtgcgctttgtaattcatcacagcatgagtaaaagtatggaaaattactatcaagagagtggaagggccggacgcgacgatatgaaggcagactgtattctctattacggatttggggatatattcaggatctcttctatggtagtaatggaaaatgtgggacaacaaaaattatatgaaatggtgtcatattgtcagaatatttctaagtgccgaagagttctgatggctcagcatttcgacgaggtttggaactctgaagcttgtaacaagatgtgcgacaattgttgcaaggactccgccttcgagcggaaaaatataaccgagtactgccgcgatctgatcaaaatactcaagcaggctgaagagctgaatgagaagctgaccccccttaagctgatagacagctggatgggaaagggagctgctaagctgagagtggctggtgtggtagcccccactctaccccgagaggaccttgagaagattattgcccactttcttatccaacagtacctgaaggaggattattctttcacagcctatgccaccattagctatctgaagattgggcccaaagcaaatctgttgaataatgaggcccacgccatcactatgcaagtcactaagtccacgcagaatagtttccgagctgagtcatcgcagacatgccacagcgagcagggcgataaaaaaatggaggaaaagaactccgggaactttcagaagaaggctgctaacatgttgcagcagtcaggatccaagaacactggcgccaaaaagcggaaaatagatgatgcttag

SEQ ID NO: 292270 - DNA, 321 bp, Artificial Sequence
  derived and/or modified sequence
atggccagcgtgagcgccctgaccgaggagctggacagcatcaccagcgagctccacgcggtcgaaattcaaattcaagagctgactgaacgacagcaggagctgatccagaagaagaaagtgctgacaaagaaaatcaaacagtgcctcgaggactcagatgccggagcctctaatgagtatgacagctcccctgcggcgtggaacaaagaggacttcccttggagcggaaaggtaaaagacattctacagaacgtatttaagttggaaaaattcaggcccctccagttggagactatcaatgtgactatggcggggtag

SEQ ID NO: 292271 - DNA, 294 bp, Artificial Sequence
  derived and/or modified sequence
atggccagcgtgagcgccctgaccgaggagctggacagcatcacctctgaactgcatgccgtggagatccagattcaggagcttacagaacggcagcaggaactgatacagaagaagaaggtcctgaccaaaaaaattaagcagtgtcttgaggatagcgatgctggtgcgagcaacgaatacgattcctcacctgccgcatggaacaaagaggattttccgtggagcgggaaagtcaaggacatcttgcagaacgtttttaagctagagaaattccgcccgctacaactctag

SEQ ID NO: 292272 - DNA, 219 bp, Artificial Sequence
  derived and/or modified sequence
atggccagcgtgagcgccctgaccgaggagctggacagcatcacctctgagctgcatgccgtggaaattcagattcaggagctgacagaaaggcaacaggaactcattcaaaaaaagaaggtgcttaccaagaagattaaacagtgcctggaggatagcgatgccggcgcaagcaacgagtacgattcctctccagccgcctggaacaaggaagactag

SEQ ID NO: 292273 - DNA, 396 bp, Artificial Sequence
  derived and/or modified sequence
atggccagcgtgagcgccctgaccgaggagctggacagcatcacctcagagttgcacgcagtggaaatccagatccaagagcttactgagcgacagcaggagctgatacagaaaaagaaagtcctaaccaaaaagatcaagcagtgtctggaagacagtgacgccggcgcatctaacgaatacgattcgagtccggccgcatggaacaaagaggattttccctggtctggtaaagtgaaggacattcttcagaacgtgtttaagctggagaaatttcgccctcttcagctggaaaccatcaatgtgacgatggctggaaaagaagttttcctagtcatgcctaccggcggaggcaagagtctgtgttaccagcttcctgccttgtgctctgactag

SEQ ID NO: 292274 - DNA, 600 bp, Artificial Sequence
  derived and/or modified sequence
atggctagtgttagcgccttgacagaggagttggattccattacatctgagctgcacgccgtcgagatacaaattcaagagctcacagagaggcagcaggaactcatccagaagaaaaaggtgctgactaaaaaaattaagcagtgcctggaagactccgacgcaggagcttcaaatgagtacgactccagccctgccgcatggaacaaagaagacttcccctggtctgggaaagtgaaggacatcctgcagaacgtctttaaactggagaaattccgacccctgcagcttgagaccatcaatgtaactatggcaggaaaagaagtttttctcgtgatgcctacgggcggaggtaaatcactctgctatcaactccccgcattgtgttcagatggctttactctggtcatctgccccctaatctccctcatggaagatcagctcatggttctgaaacagcttgggatctctgctacaatgctaaatgcctcgagtagcaaagagcacgtgaaatgggtgcatgccgagatggtcaacaagaactcggagttaaagttgatttacgtcacccccgaaaaaatcgctaagtctaagatgtag

SEQ ID NO: 292275 - DNA, 636 bp, Artificial Sequence
  derived and/or modified sequence
atggcatctgtaagcgctttgacagaggaacttgacagtattacctcagagctgcatgcagtggagatccaaatccaggagctgacagagcggcagcaagagctgatccagaagaagaaggtactgaccaagaagataaagcagtgcttggaggactctgatgccggtgcatccaatgagtatgattcctccccagcagcttggaacaaagaggacttcccatggtcaggcaaggtcaaagatatcttgcagaacgtgttcaaattggaaaagttccggcctctgcagctcgagactatcaatgtgacaatggcgggtaaagaggttttcctagtcatgcccacaggtggtggcaaatccctgtgttatcagttgcctgcactttgtagcgatggcttcaccctggtgatctgtcctttgatctccctcatggaggaccagttaatggtactcaaacagctggggatttccgccaccatgctcaacgcctcatcgagcaaggagcacgtgaagtgggtgcatgctgaaatggtcaataagaattctgagctgaagctgatatatgtcacaccagaaaaaatcgccaagtctaaaatgtttatgagccggttagagaaggcctatgaagcacgctag

SEQ ID NO: 292276 - DNA, 1950 bp, Artificial Sequence
  derived and/or modified sequence
atggctagtgtatctgcgctgactgaggagctcgattctatcacctcagaactgcatgctgtagagattcaaatacaggaactgacggagcgccagcaagaattgatacagaagaaaaaagtactcaccaagaaaatcaaacaatgtctcgaggattcggacgccggagcgtctaacgaatatgacagttcgcccgcagcatggaacaaggaggatttcccctggtccggcaaagtgaaggacatcctgcaaaatgtattcaagctcgaaaaatttcgtcccttgcagctggagaccattaacgtgaccatggctggaaaagaggttttcctggtgatgccaaccgggggaggaaaaagcttatgttaccagctgcccgctctctgttccgatgggttcacgctcgtgatctgccccctgatttctttgatggaagatcagctgatggtgctaaagcagttagggatctccgccacaatgctgaatgcctcctcttccaaagaacatgtgaagtgggttcatgccgagatggttaacaagaactcggaacttaagctgatatacgtcacccctgagaaaatcgccaaatctaaaatgttcatgtctagactggagaaggcctatgaggccaggcggttcacaaggatcgccgtggatgaggtccattgttgttcccagtggggccacgatttccgacccgactataaagctctcggcatcttgaagagacagtttcctaatgctagcctgattggactgacagcgacagctaccaaccacgttttaactgacgcccaaaaaattctgtgcatcgaaaagtgtttcaccttcacggcttctttcaacaggcccaatctctattatgaggtgaggcagaaaccctcaaacactgaggatttcatcgaggacatcgtaaaactgattaacggtcgctacaaggggcagagcgggattatttattgtttctcgcagaaggactccgaacaggtcaccgtctcactccaaaatctcggaatacacgccggtgcctaccacgctaacctggagcccgaggataagaccactgtgcatcgtaaatggtctgccaatgagattcaggtcgtcgtggcaactgttgcctttggaatggggattgataagcccgacgttaggttcgtgatacaccactcaatgtccaaaagtatggagaactactatcaggaatcaggacgggcaggacgagatgatatgaaagctgattgtatactctactacggattcggtgacatcttccgcattagctctatggttgtaatggagaacgtggggcagcaaaagctgtatgagatggtgtcgtattgtcaaaatatctccaagtgtagacgtgtgctgatggcccagcattttgatgaggtgtggaattcggaggcttgtaacaagatgtgcgataattgctgtaaagattcggccttcgaacgcaaaaatatcacagagtactgcagggatcttattaaaatcctcaagcaggccgaggaactgaatgaaaagctgacaccacttaagttaatagatagctggatggggaagggcgcagccaagctccgagtggccggtgtcgtagcgccaacactgccacgcgaagatctggagaaaattattgcacatttcctcattcagcaatacctcaaagaggattattcattcacagcctatgcgactatcagttacttgaaaatcggcccaaaagctaacctgctgaataatgaggcacatgcgattacaatgcaagttacaaagtccacgcagaattcctttcgcgcagagtcgagtcagacctgtcatagtgaacaaggggacaaaaagatggaggagaaaaatagcggaaattttcagaaaaaggcggctaacatgctccagcagagtggttcaaaaaatacaggcgcaaagaagaggaaaatagatgacgcttag

SEQ ID NO: 292277 - DNA, 1950 bp, Artificial Sequence
  derived and/or modified sequence
atggccagcgtgagcgcactgaccgaagaactggactcaatcacgtccgagcttcatgccgtggaaatccagattcaggaattgaccgagcggcagcaggaattgattcagaagaaaaaagtgctaacaaaaaagattaagcagtgcctggaagattcagacgcgggtgccagtaacgagtacgatagtagtcctgctgcctggaataaggaagacttcccctggagcgggaaagtcaaggatatcttgcagaacgttttcaaactagagaagtttaggccactccagctagagacaatcaatgtgaccatggctggcaaagaagtctttctggtgatgcccacgggtggcggtaaatccctgtgttatcagctgccagcgctgtgttctgatggcttcaccctggttatttgccctctcatttcattaatggaagaccagctcatggtgcttaagcaactggggatctcagccactatgctgaacgcttcatccagcaaggagcacgtcaaatgggtgcacgccgaaatggtgaataagaattctgagcttaaattgatttatgttactccagagaaaatcgcgaagagtaaaatgttcatgagcagactggagaaggcctatgaagcacgaagattcacccgtatcgcagtcgacgaagtacactgctgctctcaatgggggcacgactttcgccctgactataaggctctgggcatcctcaagagacaattccccaatgcctccctaatcggactgaccgccactgcaaccaatcatgtgttgacggacgcacaaaagatcctgtgcatagaaaagtgcttcacctttacagcctcttttaaccggccaaatctgtattatgaagttcggcagaagccaagcaatacagaggacttcattgaggacatagtcaagttgataaatggaagatataagggacagtcagggatcatctattgcttctcgcagaaagacagtgagcaggtgacagtgtccctgcagaacctggggatacacgctggcgcttaccacgccaatctggagcctgaggacaagactaccgttcaccggaaatggtctgccaacgagattcaggtggtggtcgccacagtggccttcggcatggggatcgataagccggacgtcagattcgtcattcaccattccatgtctaaaagtatggagaactactatcaggaatcagggagagccggtcgcgatgacatgaaagccgactgtatactgtactatggcttcggcgatattttccgtattagtagcatggtagtgatggaaaacgtggggcagcagaaattgtatgaaatggtatcatactgtcaaaacatttctaagtgccggagggtgctgatggcccaacactttgatgaggtgtggaattccgaggcctgcaacaaaatgtgtgacaattgttgcaaggattctgcctttgagcggaaaaacattaccgagtattgcagggacctcatcaaaattctgaaacaggccgaagagctgaacgagaagctgacccccctaaaactcatcgatagctggatgggcaaaggtgcagccaaactgagggttgcgggagtggtcgctcccacactcccgcgtgaggatttagagaaaattatcgcacattttttaattcagcagtacctgaaggaggactacagctttacggcatacgccaccatctcctacctgaaaatcgggcctaaagctaatctgctcaataacgaggctcacgccatcaccatgcaggtgactaaaagcacccaaaattcctttagagcagagtcttcccagacatgccattcagaacagggggacaagaaaatggaggaaaagaattccggcaacttccaaaagaaagctgccaatatgctgcagcagtccggatccaagaacaccggcgcaaaaaaacggaaaattgatgacgcttag

SEQ ID NO: 292278 - DNA, 321 bp, Artificial Sequence
  derived and/or modified sequence
atggcctcagtgtccgctttaactgaggaactggacagcataacctcagaattacacgccgtcgagattcaaatccaagagttgacagagcggcagcaggagctgatccagaagaaaaaagttctgacaaaaaaaatcaagcagtgtctcgaggactctgatgcaggcgcttctaatgaatacgactcgagtccagccgcatggaacaaagaagacttcccgtggagcggtaaagtcaaggatatccttcagaacgtgtttaagcttgaaaagtttcgccctttgcagctggaaaccattaacgtgactatggcagggtag

SEQ ID NO: 292279 - DNA, 294 bp, Artificial Sequence
  derived and/or modified sequence
atggcatctgtttctgccctgactgaggaacttgacagcatcacaagcgagctccacgctgtggaaatacaaattcaggagctgaccgaaaggcagcaggagcttattcaaaaaaagaaagtcctcacaaaaaagatcaagcagtgcttggaagattctgatgccggagctagtaacgagtatgactcatcaccagcagcatggaacaaggaggattttccatggtcagggaaggttaaagacatacttcagaatgttttcaagctcgagaagttcagaccattgcagctctag

SEQ ID NO: 292280 - DNA, 219 bp, Artificial Sequence
  derived and/or modified sequence
atggctagcgttagcgcactgacggaagagttggactcaattaccagcgagctgcacgcggtagagatccagatacaggagctcaccgagcgccaacaggaactgatccagaaaaaaaaggtcctaactaagaagataaagcagtgtctagaggacagtgatgccggagcttctaatgaatacgactcttcccctgctgcttggaataaggaagattag

SEQ ID NO: 292281 - DNA, 396 bp, Artificial Sequence
  derived and/or modified sequence
atggccagcgtgtcagctctgacagaggagctagactcaattacctccgagcttcacgcagttgagattcagattcaggaactgaccgagaggcagcaggagctgattcagaagaagaaggtcctcaccaaaaagatcaaacagtgcttggaggactccgacgctggcgcatcgaatgagtatgacagctccccagctgcctggaacaaagaggattttccatggagtgggaaagtaaaagatattctccagaatgtgtttaagctggaaaaatttcgtccactgcagcttgaaactatcaacgtcaccatggctggaaaggaggtgtttctggtgatgcctaccggaggtggcaagtctctttgctaccagctccccgcactctgctcagactag

SEQ ID NO: 292282 - DNA, 1054 bp, Artificial Sequence
  derived and/or modified sequence
atctgtgattggctgaacggaccgacccggaagggtggatgctctcagctggctggcgggaagattttactcccgagtagcggaaagatctgctcgaggcctgggtgctttggtgtcggagatccgagagtcggagatcggagagtcggacacaggacagtcggacaccggacagtcaaacaccggagagttagaccgggcttctcgggcgaggccggtctgtagcggatcacttcctttcgcccacacattggcggaggagaaaccggaaagttaatcactgccctgctctgagaactcgggcctttaggggcacgttcgcctgctgaccggtcttctgatctccccattcttttccatgcaggaggattggccaccaaagcctgtttattagcagctgccatttgttgaaagaaatttggattattttagaaacaaatttggaaagaaaaagaatggcgtccgtttcagctctaactgaggaactggattctataaccagtgagctacatgcagtagaaattcaaattcaagaacttacggaaaggcaacaagagcttattcagaaaaaaaaagtcctgacaaagaaaataaagcagtgtttagaggattctgatgccggggcaagcaatgaatatgattcttcacctgccgcttggaataaagaagattttccatggtctggtaaagttaaagatattctgcaaaatgtctttaaactggaaaagttcagaccacttcagcttgaaactattaacgtaacaatggctggaaaggaggtatttcttgttatgcctacaggaggtggaaagagcttatgttaccagttaccagcattatgttcagatggttttacactcgtcatttgcccattgatctctcttatggaagaccaattaatggttttaaaacaattaggaatttcagcaaccatgttaaatgcttctagttctaaggagcatgttaaatgggttcatgctgaaatggtaaataaaaactccgagttaaagctgatttatgtgactccagagaaaattgcaaaaagcaaaatgtt

SEQ ID NO: 292283 - DNA, 932 bp, Artificial Sequence
  derived and/or modified sequence
atctgtgattggctgaacggaccgacccggaagggtggatgctctcagctggctggcgggaagattttactcccgagtagcggaaagatctgctcgaggcctgggtgctttggtgtcggagatccgagagtcggagatcggagagtcggacacaggacagtcggacaccggacagtcaaacaccggagagttagaccgggcttctcggaggattggccaccaaagcctgtttattagcagctgccatttgttgaaagaaatttggattattttagaaacaaatttggaaagaaaaagaatggcgtccgtttcagctctaactgaggaactggattctataaccagtgagctacatgcagtagaaattcaaattcaagaacttacggaaaggcaacaagagcttattcagaaaaaaaaagtcctgacaaagaaaataaagcagtgtttagaggattctgatgccggggcaagcaatgaatatgattcttcacctgccgcttggaataaagaagattttccatggtctggtaaagttaaagatattctgcaaaatgtctttaaactggaaaagttcagaccacttcagcttgaaactattaacgtaacaatggctggaaaggaggtatttcttgttatgcctacaggaggtggaaagagcttatgttaccagttaccagcattatgttcagatggttttacactcgtcatttgcccattgatctctcttatggaagaccaattaatggttttaaaacaattaggaatttcagcaaccatgttaaatgcttctagttctaaggagcatgttaaatgggttcatgctgaaatggtaaataaaaactccgagttaaagctgatttatgtgactccagagaaaattgcaaaaagcaaaatgtttatgtcaagactagagaaagcctatgaagcaagga

SEQ ID NO: 292284 - DNA, 2572 bp, Artificial Sequence
  derived and/or modified sequence
gagatccgagagtcggagatcggagagtcggacacaggacagtcggacaccggacagtcaaacaccggagagttagaccgggcttctcggtggggagaggctctgggataactactgttacagctttgaagggtcaagggaggattggccaccaaagcctgtttattagcagctgccatttgttgaaagaaatttggattattttagaaacaaatttggaaagaaaaagaatggcgtccgtttcagctctaactgaggaactggattctataaccagtgagctacatgcagtagaaattcaaattcaagaacttacggaaaggcaacaagagcttattcagaaaaaaaaagtcctgacaaagaaaataaagcagtgtttagaggattctgatgccggggcaagcaatgaatatgattcttcacctgccgcttggaataaagaagattttccatggtctggtaaagttaaagatattctgcaaaatgtctttaaactggaaaagttcagaccacttcagcttgaaactattaacgtaacaatggctggaaaggaggtatttcttgttatgcctacaggaggtggaaagagcttatgttaccagttaccagcattatgttcagatggttttacactcgtcatttgcccattgatctctcttatggaagaccaattaatggttttaaaacaattaggaatttcagcaaccatgttaaatgcttctagttctaaggagcatgttaaatgggttcatgctgaaatggtaaataaaaactccgagttaaagctgatttatgtgactccagagaaaattgcaaaaagcaaaatgtttatgtcaagactagagaaagcctatgaagcaaggagatttactcgaattgctgtggatgaagttcactgctgtagtcagtggggacatgatttcagacctgattataaggcacttggtatcttaaagcggcagttccctaacgcatcactaattgggctgactgcaactgcaacaaatcacgttttgacggatgctcagaaaattttgtgcattgaaaagtgttttacttttacagcttcttttaataggccaaatctatattatgaggttcggcagaagccctcaaacactgaagattttattgaggatattgtaaagctcattaatgggagatacaaagggcaatcaggaatcatatattgtttttctcagaaagactctgaacaagttacggttagtttgcagaatctgggaattcatgcaggtgcttaccatgccaatttggagccagaagataagaccacagttcatagaaaatggtcagccaatgaaattcaggtagtagtggcaactgttgcatttggtatgggaattgataagccagatgtgaggtttgttatccatcattcaatgagtaaatccatggaaaattattaccaagagagtggacgtgcaggtcgagatgacatgaaagcagactgtattttgtactacggctttggagatatattcagaataagttcaatggtggtgatggaaaatgtgggacagcagaagctttatgagatggtatcatactgtcaaaacataagcaaatgtcgtcgtgtgttgatggctcaacattttgatgaagtatggaactcagaagcatgtaacaaaatgtgcgataactgctgtaaagacagtgcatttgaaagaaagaacataacagagtactgcagagatctaatcaagatcctgaagcaggcagaggaactgaatgaaaaactcactccattgaaactgattgattcttggatgggaaagggtgcagcaaaactgagagtagcaggtgttgtggctcccacacttcctcgtgaagatctggagaagattattgcacactttctaatacagcagtatcttaaagaagactacagttttacagcttatgctaccatttcgtatttgaaaataggacctaaagctaatcttctgaacaatgaggcacatgctattactatgcaagtgacaaagtccacgcagaactctttcagggctgaatcgtctcaaacttgtcattctgaacaaggtgataaaaagatggaggaaaaaaattcaggcaacttccagaagaaggctgcaaacatgcttcagcaatctggttctaagaatacaggagctaagaaaagaaaaatcgatgatgcctgatatgaatgttactaaattttctaattaaagatggtttatgcatgtatatgccattatttttgtagttagacaatagtttttaaaagaatttcatagatattttatatgtatggatctatattttcagagcttatctctgaagatctaaacttttgagaatgtttgaaaattagagatcatgaattatataattttccagtataaaacaagggaaaaatttttatgtaaaaccctttaaatgtaaaatatttgagaataagttcatacaatcgtcttaagttttttatgcctttatatacttagctatattttttcttttgacataactatctttttgaaagcaatattatactgacagaggctcactgagtgatactttaagttaaatatgt

SEQ ID NO: 292285 - DNA, 3702 bp, Artificial Sequence
  derived and/or modified sequence
gtagcggaaagatctgctcgaggcctgggtgctttggtgtcggagatccgagagtcggagatcggagagtcggacacaggacagtcggacaccggacagtcaaacaccggagagttagaccgggcttctcggtggggagaggctctgggataactactgttacagctttgaagggtcaagggtgtgcgctttttgtttcatccttccctttcctgctgcagggcgaggccggtctgtagcggatcacttcctttcgcccacacattggcggaggagaaaccggaaagttaatcactgccctgctctgagaactcgggcctttaggggcacgttcgcctgctgaccggtcttctgatctccccattcttttccatgcaggaggattggccaccaaagcctgtttattagcagctgccatttgttgaaagaaatttggattattttagaaacaaatttggaaagaaaaagaatggcgtccgtttcagctctaactgaggaactggattctataaccagtgagctacatgcagtagaaattcaaattcaagaacttacggaaaggcaacaagagcttattcagaaaaaaaaagtcctgacaaagaaaataaagcagtgtttagaggattctgatgccggggcaagcaatgaatatgattcttcacctgccgcttggaataaagaagattttccatggtctggtaaagttaaagatattctgcaaaatgtctttaaactggaaaagttcagaccacttcagcttgaaactattaacgtaacaatggctggaaaggaggtatttcttgttatgcctacaggaggtggaaagagcttatgttaccagttaccagcattatgttcagatggttttacactcgtcatttgcccattgatctctcttatggaagaccaattaatggttttaaaacaattaggaatttcagcaaccatgttaaatgcttctagttctaaggagcatgttaaatgggttcatgctgaaatggtaaataaaaactccgagttaaagctgatttatgtgactccagagaaaattgcaaaaagcaaaatgtttatgtcaagactagagaaagcctatgaagcaaggagatttactcgaattgctgtggatgaagttcactgctgtagtcagtggggacatgatttcagacctgattataaggcacttggtatcttaaagcggcagttccctaacgcatcactaattgggctgactgcaactgcaacaaatcacgttttgacggatgctcagaaaattttgtgcattgaaaagtgttttacttttacagcttcttttaataggccaaatctatattatgaggttcggcagaagccctcaaacactgaagattttattgaggatattgtaaagctcattaatgggagatacaaagggcaatcaggaatcatatattgtttttctcagaaagactctgaacaagttacggttagtttgcagaatctgggaattcatgcaggtgcttaccatgccaatttggagccagaagataagaccacagttcatagaaaatggtcagccaatgaaattcaggtagtagtggcaactgttgcatttggtatgggaattgataagccagatgtgaggtttgttatccatcattcaatgagtaaatccatggaaaattattaccaagagagtggacgtgcaggtcgagatgacatgaaagcagactgtattttgtactacggctttggagatatattcagaataagttcaatggtggtgatggaaaatgtgggacagcagaagctttatgagatggtatcatactgtcaaaacataagcaaatgtcgtcgtgtgttgatggctcaacattttgatgaagtatggaactcagaagcatgtaacaaaatgtgcgataactgctgtaaagacagtgcatttgaaagaaagaacataacagagtactgcagagatctaatcaagatcctgaagcaggcagaggaactgaatgaaaaactcactccattgaaactgattgattcttggatgggaaagggtgcagcaaaactgagagtagcaggtgttgtggctcccacacttcctcgtgaagatctggagaagattattgcacactttctaatacagcagtatcttaaagaagactacagttttacagcttatgctaccatttcgtatttgaaaataggacctaaagctaatcttctgaacaatgaggcacatgctattactatgcaagtgacaaagtccacgcagaactctttcagggctgaatcgtctcaaacttgtcattctgaacaaggtgataaaaagatggaggaaaaaaattcaggcaacttccagaagaaggctgcaaacatgcttcagcaatctggttctaagaatacaggagctaagaaaagaaaaatcgatgatgcctgatatgaatgttactaaattttctaattaaagatggtttatgcatgtatatgccattatttttgtagttagacaatagtttttaaaagaatttcatagatattttatatgtatggatctatattttcagagcttatctctgaagatctaaacttttgagaatgtttgaaaattagagatcatgaattatataattttccagtataaaacaagggaaaaatttttatgtaaaaccctttaaatgtaaaatatttgagaataagttcatacaatcgtcttaagttttttatgcctttatatacttagctatattttttcttttgacataactatctttttgaaagcaatattatactgacagaggctcactgagtgatactttaagttaaatatgtagatcaaggatgtccaatcttttggcttccctgagccacattggaagaagaattgtcttgggccgcacataaaatatgctaacactgatgatagctgatgagcttaaaaaaaaaattgcaagaaaaatctcatgttttaagaaagtttacaaaaaatgtaaaatatttgagaataagttcatgtaattgtcttaagttttttatgcctttatatacttagctatattttttcttttgacataaccatctttttgaaagcaatattatactgacagaggttcactgagtgatactttaagttaaatatgtagatcagggatgtccaatcttttggcttccctgagccacattggaagaagaattgtcttgggccgcacataaaatatgctaacactgacgatagctgatgagcttaaaaaaaaaaaaattgcaagaaaaatctcatgttttaagaaagtttacagatttgtgttgggctgcattcaaagctgttctgggctgcattagacccgtgggctagagttggacaagcttgtagatgatttcaggttataaaaccagaagtacaattcaacaaaaaaggagtaagtcatcaatataaatattagcaaacgagatattgctacatctctatttaaagtaaaatacaaccgattttaaagttcctgaaaccatagccatattttgacatttcacaaagaatggttctagtctactagagtacatttggctaagtagataacttacctaaatttgctccaaagctaaatcacaagtaaacatatttatgtttaaaacacagaaataaataacttaagatttttatctaagcggtcagtgttgtattggaaagatatatctataaataaactttgaactgatttcaaactt

SEQ ID NO: 292286 - DNA, 565 bp, Artificial Sequence
  derived and/or modified sequence
gattggctgaacggaccgacccggaagggtggatgctctcagctggctggcgggaagattttactcccgagtagcggaaagatctgctcgaggcctgggtgctttggtgtcggagatccgagagtcggagatcggagagtcggacacaggacagtcggacaccggacagtcaaacaccggagagttagaccgggcttctcgaaagaaatttggattattttagaaacaaatttggaaagaaaaagaatggcgtccgtttcagctctaactgaggaactggattctataaccagtgagctacatgcagtagaaattcaaattcaagaacttacggaaaggcaacaagagcttattcagaaaaaaaaagtcctgacaaagaaaataaagcagtgtttagaggattctgatgccggggcaagcaatgaatatgattcttcacctgccgcttggaataaagaagattttccatggtctggtaaagttaaagatattctgcaaaatgtctttaaactggaaaagttcagaccacttcagcttgaaactattaacgtaacaatggctggaa

SEQ ID NO: 292287 - DNA, 578 bp, Artificial Sequence
  derived and/or modified sequence
gaacggaccgacccggaagggtggatgctctcagctggctggcgggaagattttactcccgagtagcggaaagatctgctcgaggcctgggtgctttggtgtcggagatccgagagtcggagatcggagagtcggacacaggacagtcggacaccggacagtcaaacaccggagagttagaccgggcttctcggtggggagaggctctgggataactactgttacagctttgaagggtcaaggaaagaaatttggattattttagaaacaaatttggaaagaaaaagaatggcgtccgtttcagctctaactgaggaactggattctataaccagtgagctacatgcagtagaaattcaaattcaagaacttacggaaaggcaacaagagcttattcagaaaaaaaaagtcctgacaaagaaaataaagcagtgtttagaggattctgatgccggggcaagcaatgaatatgattcttcacctgccgcttggaataaagaagattttccatggtctggtaaagttaaagatattctgcaaaatgtctttaaactggaaaagttcagaccacttcagct

SEQ ID NO: 292288 - DNA, 579 bp, Artificial Sequence
  derived and/or modified sequence
gtagcggaaagatctgctcgaggcctgggtgctttggtgtcggagatccgagagtcggagatcggagagtcggacacaggacagtcggacaccggacagtcaaacaccggagaggcgaggccggtctgtagcggatcacttcctttcgcccacacattggcggaggagaaaccggaaagttaatcactgccctgctctgagaactcgggcctttaggggcacgttcgcctgctgaccggtcttctgatctccccattcttttccatgcaggaggattggccaccaaagcctgtttattagcagctgccatttgttgaaagaaatttggattattttagaaacaaatttggaaagaaaaagaatggcgtccgtttcagctctaactgaggaactggattctataaccagtgagctacatgcagtagaaattcaaattcaagaacttacggaaaggcaacaagagcttattcagaaaaaaaaagtcctgacaaagaaaataaagcagtgtttagaggattctgatgccggggcaagcaatgaatatgattcttcacctgccgcttggaataaagaagattt

SEQ ID NO: 292289 - DNA, 600 bp, Artificial Sequence
  derived and/or modified sequence
gagtagcggaaagatctgctcgaggcctgggtgctttggtgtcggagatccgagagtcggagatcggagagtcggacacaggacagtcggacaccggacagtcaaacaccggagagaggattggccaccaaagcctgtttattagcagctgccatttgttgaaagaaatttggattattttagaaacaaatttggaaagaaaaagaatggcgtccgtttcagctctaactgaggaactggattctataaccagtgagctacatgcagtagaaattcaaattcaagaacttacggaaaggcaacaagagcttattcagaaaaaaaaagtcctgacaaagaaaataaagcagtgtttagaggattctgatgccggggcaagcaatgaatatgattcttcacctgccgcttggaataaagaagattttccatggtctggtaaagttaaagatattctgcaaaatgtctttaaactggaaaagttcagaccacttcagcttgaaactattaacgtaacaatggctggaaaggaggtatttcttgttatgcctacaggaggtggaaagagcttatgttaccagttaccagcattatgttcagatg

SEQ ID NO: 292290 - DNA, 600 bp, Artificial Sequence
  derived and/or modified sequence
atggccagcgtgagcgccctgaccgaggagctggacagcatcaccagcgagctgcacgccgtggagatccagatccaggagctgaccgagagacagcaggagctgatccagaagaagaaggtgctgaccaagaagatcaagcagtgcctggaggacagcgacgccggcgccagcaacgagtacgacagcagccccgccgcctggaacaaggaggacttcccctggagcggcaaggtgaaggacatcctgcagaacgtgttcaagctggagaagttcagacccctgcagctggagaccatcaacgtgaccatggccggcaaggaggtgttcctggtgatgcccaccggcggcggcaagagcctgtgctaccagctgcccgccctgtgcagcgacggcttcaccctggtgatctgccccctgatcagcctgatggaggaccagctgatggtgctgaagcagctgggcatcagcgccaccatgctgaacgccagcagcagcaaggagcacgtgaagtgggtgcacgccgagatggtgaacaagaacagcgagctgaagctgatctacgtgacccccgagaagatcgccaagagcaagatgtag

SEQ ID NO: 292291 - DNA, 636 bp, Artificial Sequence
  derived and/or modified sequence
atggccagcgtgagcgccctgaccgaggagctggacagcatcaccagcgagctgcacgccgtggagatccagatccaggagctgaccgagagacagcaggagctgatccagaagaagaaggtgctgaccaagaagatcaagcagtgcctggaggacagcgacgccggcgccagcaacgagtacgacagcagccccgccgcctggaacaaggaggacttcccctggagcggcaaggtgaaggacatcctgcagaacgtgttcaagctggagaagttcagacccctgcagctggagaccatcaacgtgaccatggccggcaaggaggtgttcctggtgatgcccaccggcggcggcaagagcctgtgctaccagctgcccgccctgtgcagcgacggcttcaccctggtgatctgccccctgatcagcctgatggaggaccagctgatggtgctgaagcagctgggcatcagcgccaccatgctgaacgccagcagcagcaaggagcacgtgaagtgggtgcacgccgagatggtgaacaagaacagcgagctgaagctgatctacgtgacccccgagaagatcgccaagagcaagatgttcatgagcagactggagaaggcctacgaggccagatag

SEQ ID NO: 292292 - DNA, 1950 bp, Artificial Sequence
  derived and/or modified sequence
atggccagcgtgagcgccctgaccgaggagctggacagcatcaccagcgagctgcacgccgtggagatccagatccaggagctgaccgagagacagcaggagctgatccagaagaagaaggtgctgaccaagaagatcaagcagtgcctggaggacagcgacgccggcgccagcaacgagtacgacagcagccccgccgcctggaacaaggaggacttcccctggagcggcaaggtgaaggacatcctgcagaacgtgttcaagctggagaagttcagacccctgcagctggagaccatcaacgtgaccatggccggcaaggaggtgttcctggtgatgcccaccggcggcggcaagagcctgtgctaccagctgcccgccctgtgcagcgacggcttcaccctggtgatctgccccctgatcagcctgatggaggaccagctgatggtgctgaagcagctgggcatcagcgccaccatgctgaacgccagcagcagcaaggagcacgtgaagtgggtgcacgccgagatggtgaacaagaacagcgagctgaagctgatctacgtgacccccgagaagatcgccaagagcaagatgttcatgagcagactggagaaggcctacgaggccagaagattcaccagaatcgccgtggacgaggtgcactgctgcagccagtggggccacgacttcagacccgactacaaggccctgggcatcctgaagagacagttccccaacgccagcctgatcggcctgaccgccaccgccaccaaccacgtgctgaccgacgcccagaagatcctgtgcatcgagaagtgcttcaccttcaccgccagcttcaacagacccaacctgtactacgaggtgagacagaagcccagcaacaccgaggacttcatcgaggacatcgtgaagctgatcaacggcagatacaagggccagagcggcatcatctactgcttcagccagaaggacagcgagcaggtgaccgtgagcctgcagaacctgggcatccacgccggcgcctaccacgccaacctggagcccgaggacaagaccaccgtgcacagaaagtggagcgccaacgagatccaggtggtggtggccaccgtggccttcggcatgggcatcgacaagcccgacgtgagattcgtgatccaccacagcatgagcaagagcatggagaactactaccaggagagcggcagagccggcagagacgacatgaaggccgactgcatcctgtactacggcttcggcgacatcttcagaatcagcagcatggtggtgatggagaacgtgggccagcagaagctgtacgagatggtgagctactgccagaacatcagcaagtgcagaagagtgctgatggcccagcacttcgacgaggtgtggaacagcgaggcctgcaacaagatgtgcgacaactgctgcaaggacagcgccttcgagagaaagaacatcaccgagtactgcagagacctgatcaagatcctgaagcaggccgaggagctgaacgagaagctgacccccctgaagctgatcgacagctggatgggcaagggcgccgccaagctgagagtggccggcgtggtggcccccaccctgcccagagaggacctggagaagatcatcgcccacttcctgatccagcagtacctgaaggaggactacagcttcaccgcctacgccaccatcagctacctgaagatcggccccaaggccaacctgctgaacaacgaggcccacgccatcaccatgcaggtgaccaagagcacccagaacagcttcagagccgagagcagccagacctgccacagcgagcagggcgacaagaagatggaggagaagaacagcggcaacttccagaagaaggccgccaacatgctgcagcagagcggcagcaagaacaccggcgccaagaagagaaagatcgacgacgcctag

SEQ ID NO: 292293 - DNA, 321 bp, Artificial Sequence
  derived and/or modified sequence
atggccagcgtgagcgccctgaccgaggagctggacagcatcaccagcgagctgcacgccgtggagatccagatccaggagctgaccgagagacagcaggagctgatccagaagaagaaggtgctgaccaagaagatcaagcagtgcctggaggacagcgacgccggcgccagcaacgagtacgacagcagccccgccgcctggaacaaggaggacttcccctggagcggcaaggtgaaggacatcctgcagaacgtgttcaagctggagaagttcagacccctgcagctggagaccatcaacgtgaccatggccggctag

SEQ ID NO: 292294 - DNA, 294 bp, Artificial Sequence
  derived and/or modified sequence
atggccagcgtgagcgccctgaccgaggagctggacagcatcaccagcgagctgcacgccgtggagatccagatccaggagctgaccgagagacagcaggagctgatccagaagaagaaggtgctgaccaagaagatcaagcagtgcctggaggacagcgacgccggcgccagcaacgagtacgacagcagccccgccgcctggaacaaggaggacttcccctggagcggcaaggtgaaggacatcctgcagaacgtgttcaagctggagaagttcagacccctgcagctgtag

SEQ ID NO: 292295 - DNA, 219 bp, Artificial Sequence
  derived and/or modified sequence
atggccagcgtgagcgccctgaccgaggagctggacagcatcaccagcgagctgcacgccgtggagatccagatccaggagctgaccgagagacagcaggagctgatccagaagaagaaggtgctgaccaagaagatcaagcagtgcctggaggacagcgacgccggcgccagcaacgagtacgacagcagccccgccgcctggaacaaggaggactag

SEQ ID NO: 292296 - DNA, 396 bp, Artificial Sequence
  derived and/or modified sequence
atggccagcgtgagcgccctgaccgaggagctggacagcatcaccagcgagctgcacgccgtggagatccagatccaggagctgaccgagagacagcaggagctgatccagaagaagaaggtgctgaccaagaagatcaagcagtgcctggaggacagcgacgccggcgccagcaacgagtacgacagcagccccgccgcctggaacaaggaggacttcccctggagcggcaaggtgaaggacatcctgcagaacgtgttcaagctggagaagttcagacccctgcagctggagaccatcaacgtgaccatggccggcaaggaggtgttcctggtgatgcccaccggcggcggcaagagcctgtgctaccagctgcccgccctgtgcagcgactag

SEQ ID NO: 292297 - protein, 116 aa, Artificial Sequence
  derived and/or modified sequence
MEYHPDLENLDEDGYTQLHFDSQSNTRIAVVSEKGSCAASPPWRLIAVILGILCLVILVIAVVLGTMGTGQFLKDLSFLNNRRKLFGDPIQEATHWRMATFYQEIKRTTVNPHNHL

SEQ ID NO: 292298 - protein, 793 aa, Artificial Sequence
  derived and/or modified sequence
MLIQSEKKTQLSKTESVKESESLMEFAQPEIQPQEFLNRRYMTEVDYSNKQGEEQPWEADYARKPNLPKRWDMLTEPDGQEKKQESFKSWEASGKHQEVSKPAVSLEQRKQDTSKLRSTLPEEQKKQEISKSKPSPSQWKQDTPKSKAGYVQEEQKKQETPKLWPVQLQKEQDPKKQTPKSWTPSMQSEQNTTKSWTTPMCEEQDSKQPETPKSWENNVESQKHSLTSQSQISPKSWGVATASLIPNDQLLPRKLNTEPKDVPKPVHQPVGSSSTLPKDPVLRKEKLQDLMTQIQGTCNFMQESVLDFDKPSSAIPTSQPPSATPGSPVASKEQNLSSQSDFLQEPLQATSSPVTCSSNACLVTTDQASSGSETEFMTSETPEAAIPPGKQPSSLASPNPPMAKGSEQGFQSPPASSSSVTINTAPFQAMQTVFNVNAPLPPRKEQEIKESPYSPGYNQSFTTASTQTPPQCQLPSIHVEQTVHSQETANYHPDGTIQVSNGSLAFYPAQTNVFPRPTQPFVNSRGSVRGCTRGGRLITNSYRSPGGYKGFDTYRGLPSISNGNYSQLQFQAREYSGAPYSQRDNFQQCYKRGGTSGGPRANSRAGWSDSSQVSSPERDNETFNSGDSGQGDSRSMTPVDVPVTNPAATILPVHVYPLPQQMRVAFSAARTSNLAPGTLDQPIVFDLLLNNLGETFDLQLGRFNCPVNGTYVFIFHMLKLAVNVPLYVNLMKNEEVLVSAYANDGAPDHETASNHAILQLFQGDQIWLRLHRGAIYGSSWKYSTFSGYLLYQD

SEQ ID NO: 292299 - DNA, 2382 bp, Artificial Sequence
  derived and/or modified sequence
atgcttatccaatcagagaagaagacacagctttcgaagaccgaaagcgtgaaggaatctgaaagcctgatggaatttgcccagcctgagatccagcctcaggaatttctgaatagacgctatatgaccgaagttgactacagtaacaaacagggcgaagagcagccctgggaggcggactacgcacggaaacctaatctacctaaacggtgggacatgctcactgagccggacgggcaggaaaagaagcaggagagttttaagagctgggaagcctctggtaaacatcaggaagtttctaagccagccgtctccttggagcaaaggaagcaggacacttcaaagctgaggtcaactctgcccgaggaacagaaaaagcaggagatttctaagagtaaaccgtcacctagccagtggaagcaagacacaccaaagagcaaggcaggctacgtacaggaggagcagaagaaacaggagacccccaagctctggccagtacaactgcaaaaggaacaggatcctaagaaacagacccccaagtcctggacaccatccatgcagagtgagcagaatacgacaaagagctggacaaccccaatgtgtgaggagcaggacagtaagcagcccgaaacccccaaatcctgggagaataatgtagaatctcagaagcacagcttgacctcacaatcgcagatttctcccaagagttggggggtggccacagcctcactcatcccgaacgatcagctgctgcctagaaagctgaacaccgagccgaaggacgtgcctaaaccggttcaccaacccgtagggagttccagcacactccccaaagaccccgtacttcgcaaggagaaattgcaggatctgatgacacagatccagggaacatgcaattttatgcaggaaagcgtacttgacttcgataagcctagcagcgcaatccccaccagtcagcccccctccgcaactcccggatcccctgtcgcaagcaaagagcaaaatctgagtagccaaagcgactttctgcaggagcccctccaggctacttcatcccccgtgacttgttctagcaatgcttgccttgtaaccaccgaccaagcctccagtggctccgagacagagtttatgacctctgagacccccgaggccgcaattccccctggaaagcagccttctagtttagcaagccctaatccacccatggctaaaggatcagaacaaggcttccagagccctccagctagcagttctagcgttaccattaacaccgcgccgttccaggccatgcagactgtcttcaacgtgaatgcaccactgcctccaagaaaagagcaggaaattaaggaaagcccgtatagtcccgggtacaaccaatcatttaccacggctagtactcaaaccccaccacagtgtcagttgccctcgatacacgtagaacagactgtacattctcaggaaaccgccaactatcacccggacggtaccatccaggtgagcaatggttccttagccttctaccctgcccagacgaatgttttccctagaccgacacagcctttcgtgaatagtaggggttccgttcgagggtgcactcgtggaggccgcttaattactaactcttaccggagcccaggaggctacaaagggttcgacacttacaggggattacccagcatcagcaatggcaactactctcagctgcaattccaggccagggagtacagtggcgcaccgtactcccagagagataatttccagcagtgctataagcgcgggggcacctcgggaggcccgagggccaacagcagagctggctggtcggactcgtctcaggtttcgagccccgaacgggataacgagacatttaacagcggggatagcggacagggcgacagcaggtctatgaccccagtcgatgtacctgtcactaaccccgctgctacaattctgcccgtccatgtatacccactgccacagcagatgcgggtggcctttagtgctgccagaacatccaacctcgcccccggtaccctcgatcagcccattgtgttcgacctgctgttaaacaaccttggggagaccttcgatctgcagctgggtagattcaactgccccgtgaacgggacatacgtttttatttttcatatgttaaagttagctgtgaacgtacctttgtacgtaaatctgatgaaaaatgaggaagtccttgttagcgcatatgctaacgacggagcacctgatcatgagacagcctccaaccacgccatcctccagctcttccagggcgaccagatttggcttcgcctgcaccgtggagccatttacggatctagttggaaatacagtactttcagcggttatttactgtatcaggattag

SEQ ID NO: 292300 - DNA, 2382 bp, Artificial Sequence
  derived and/or modified sequence
atgctgatccagagcgagaagaagacccagctgagcaagacagagagcgtgaaggagagcgagagcctgatggagtttgcccagcctgagatccagccccaggagttcctgaacagacgctacatgacagaggtggactacagcaacaagcagggcgaggagcagccctgggaggccgactatgccaggaagcccaacctgcccaagcgctgggacatgctgacagagccagatggccaggagaagaagcaggagagcttcaagtcctgggaggccagcggcaagcaccaggaggtgtccaagccagctgtgtccctggagcagaggaagcaggacaccagcaagctgcggagcaccctgcctgaggagcagaagaagcaggagatcagcaagagcaagcccagccccagccagtggaagcaggacacccccaagagcaaggccggctacgtgcaggaggagcagaagaagcaggagacccccaagctgtggcctgtgcagctgcagaaggagcaggaccccaagaagcagacccccaagtcctggacccccagcatgcagagcgagcagaacaccaccaagtcctggaccacccccatgtgtgaggagcaggacagcaagcagcctgagacccccaagtcctgggagaacaacgtggagagccagaagcacagcctgaccagccagagccagatcagccccaagtcctggggcgtggccacagccagcctcatccccaatgaccagctgctgcccaggaagctgaacacagagcccaaggatgtgcccaagcctgtgcaccagcctgtgggcagcagcagcaccctgcccaaggaccctgtgctgaggaaggagaagctgcaggacctgatgacccagatccagggcacctgcaacttcatgcaggagagcgtgctggactttgacaagcccagcagcgccatccccaccagccagccccccagcgccaccccaggcagccctgtggccagcaaggagcagaacctgagcagccagagcgacttcctgcaggagcccctgcaggccaccagcagccctgtgacctgcagcagcaatgcctgcctggtgaccacagaccaggccagcagcggcagcgagacagagttcatgaccagcgagaccccagaggccgccatccccccaggcaagcagcccagcagcctggccagccccaacccccccatggccaagggcagcgagcagggcttccagagccccccagccagcagcagctctgtgaccatcaacacagcccccttccaggccatgcagaccgtcttcaacgtgaatgcccccctgccccccaggaaggagcaggagatcaaggagagcccctacagccctggctacaaccagagcttcaccacagccagcacccagaccccaccccagtgccagctgcccagcatccacgtggagcagacagtgcacagccaggagacagccaactaccacccagatggcaccatccaggtgtccaatggcagcctggccttctacccagcccagaccaacgtgttcccccggcccacccagccctttgtgaacagccggggctctgtgcggggctgcacccggggcggccgcctcatcaccaacagctaccgcagccctgggggctacaagggctttgacacctaccggggcctgcccagcatcagcaatggaaactacagccagctgcagttccaggcccgggagtacagcggggccccctacagccagagggacaacttccagcagtgctacaagagaggaggcaccagcggcggcccccgggccaacagcagagctggctggagcgacagcagccaggtgagcagccctgagcgggacaatgagaccttcaacagcggggacagcggccagggcgacagccgctccatgacccctgtggatgtgcctgtgaccaacccagctgccaccatcctgcctgtgcacgtgtaccccctgccccagcagatgagggtggccttctctgctgcccggaccagcaacctggcccctggcaccctggaccagcccatcgtgtttgacctgctgctgaacaacctgggggagacctttgacctgcagctgggccgcttcaactgccctgtgaatggcacctacgtgttcatcttccacatgctgaagctggccgtgaatgtgcccctgtatgtgaacctgatgaagaatgaggaggtgctggtgtctgcctatgccaatgatggagccccagaccatgaaacagccagcaaccacgccatcctgcagctgttccagggcgaccagatctggctgcggctgcacagaggagccatctacggcagctcctggaagtacagcaccttcagcggctacctgctgtaccaggactag

SEQ ID NO: 292301 - DNA, 2382 bp, Artificial Sequence
  derived and/or modified sequence
atgctgatccagagcgagaagaagacccagctgagcaagaccgagagtgtgaaagaatctgagagcctcatggagtttgcccaacccgagatccagccacaggaattcctgaatagaagatatatgacagaggtggattacagcaataagcagggagaggaacagccttgggaagcagactatgccagaaagccaaacctgcccaaaagatgggacatgctaactgagcccgacggtcaggagaaaaaacaggagtcattcaaaagctgggaagcctcaggcaagcatcaagaggtaagcaaaccggccgtaagtttagagcagcggaaacaggacacgagtaagctgagatcaacactccctgaagaacaaaagaagcaggaaatcagtaaatcaaaaccgtctccatcacagtggaaacaagatacacctaaaagtaaggcaggttacgtgcaagaggaacaaaaaaaacaggagacgcctaaattatggccagttcagctgcagaaggagcaggatcccaaaaagcagacacccaagagttggaccccgagtatgcagtcagagcagaacactacaaaatcgtggaccaccccaatgtgtgaggagcaagattccaagcagccggagacacctaaatcatgggagaacaacgtcgagagccagaaacattcactgaccagtcagagccagatcagccctaaatcttggggagtagccacggcgagcctaatccctaacgaccagttgttgcctcggaagcttaataccgagcccaaagacgtgcctaagcccgtgcaccagccggtgggttcaagcagcacgctgccaaaggacccggtgctacggaaagagaaactccaagacctgatgacccagattcagggcacttgcaactttatgcaggaaagcgtattggacttcgacaaaccatcgtccgccatccccacaagtcaaccccctagtgctacccccggctcacctgtagcctccaaggagcagaatctgagtagccagtctgacttcttgcaggaacctctgcaggctactagcagccccgttacgtgttcctcaaacgcttgtttagttactacagaccaggcaagttctggctccgagaccgaatttatgaccagtgagacgcctgaggctgctatcccacccggcaaacaacccagtagcctagcgtctcccaacccacctatggctaagggaagcgagcagggctttcagtccccacccgcctcttcatcaagtgttacgattaacaccgcaccctttcaagctatgcaaacggtatttaacgtgaatgcccctttaccacctaggaaagaacaggaaatcaaggagagcccatattcacccggctacaaccaatcgttcaccaccgcctctactcagacaccaccacagtgccaactcccttccatccatgtggaacaaactgttcacagccaggagactgcaaattatcatcccgacggtacaattcaggtatctaacggttctctcgctttctaccctgctcaaacaaatgtgtttccacgcccaactcagcccttcgtaaattctcgagggtccgtcagggggtgcactcggggaggtcgcctaattacaaattcttatcggagccccgggggctataaaggatttgatacctataggggactgccgtctatctcaaatggcaactattcacagctacaattccaggccagggagtactcgggggccccttactcccagagggacaattttcagcagtgctacaagagaggtggaacatctggcgggccacgcgccaattcccgggctggttggagcgactcctctcaggtgtctagcccggagagggacaacgagacgtttaactctggggatagtgggcaaggcgattctaggagtatgacgccagtggatgtgcctgttacaaatcctgcggctacaattctgcccgtccacgtatatcccctgccccagcaaatgagggttgcattttctgccgcgaggacgagtaatctggccccaggaactttggaccaacccatagtatttgatttacttctgaataacctcggagagacttttgacttgcagttgggccggtttaattgcccagtgaacggaacttacgtcttcatattccacatgttaaaactggcggtgaatgtccccctgtacgtgaatctgatgaaaaacgaagaggtgcttgtctcagcatatgcgaacgacggagccccagaccacgagacggcgtccaatcacgccattctgcagctcttccagggggaccagatctggctgcgcctccatagaggggcgatttacggctcatcgtggaagtactccacattcagcggctacctactttaccaagactag

SEQ ID NO: 292302 - DNA, 2382 bp, Artificial Sequence
  derived and/or modified sequence
atgctgattcagagtgaaaagaaaacacagctttctaaaaccgaaagcgtgaaagaaagcgaaagcctcatggaatttgctcagcccgagatccagccccaggagtttctgaaccgcaggtatatgactgaagtggattactctaacaagcaaggggaagagcaaccgtgggaggcggactacgccagaaagccgaatctgcccaagcgctgggacatgcttacggagcctgatgggcaggagaagaagcaagagagtttcaaaagctgggaagcctccggaaaacaccaggaggtcagcaaacctgccgtctctctcgaacagcgcaagcaggacacttccaaactgaggtccaccctccccgaggaacaaaaaaagcaagaaataagcaagtccaagccatcaccttcacagtggaagcaagatacaccaaagagcaaagcaggctatgtgcaagaagaacagaaaaagcaggaaacccccaagctgtggcctgttcagcttcagaaggagcaggaccctaaaaaacaaacaccaaaatcttggacaccctccatgcagtccgagcaaaacactaccaagtcatggacaacccctatgtgcgaggagcaggacagcaagcagcctgaaactcccaagagttgggagaacaacgtcgagtctcaaaaacacagcctgacctcccagtctcagatctcccctaaatcatggggagtggccaccgcaagtttgattccaaatgaccagctgctgcccagaaagctcaacaccgaaccaaaagatgttcctaagcccgtgcaccagccagttggaagctcatctacactcccaaaggatcccgtgctccgaaaagagaaactgcaggacctgatgacgcagatacagggaacctgtaatttcatgcaggagtccgtcttggatttcgataaaccttctagcgcgatccccactagccaaccaccatccgccacccccggatcacccgttgccagcaaagagcagaacctcagctctcagtccgactttcttcaggaaccactccaggcgacatcaagccctgtaacttgtagcagtaatgcctgtctggttaccaccgatcaggctagctctggaagtgaaacagaatttatgacgagcgaaacccccgaagccgcaatccccccaggtaagcagccctcgtctctggcatctccaaatcccccaatggccaagggcagtgagcagggcttccagtcccctcctgcgtcttctagttccgttaccattaacacagcccctttccaggccatgcagactgtattcaacgttaatgctcccctgccccctaggaaggaacaggaaatcaaggagtctccctacagccccggatacaatcagtcattcaccaccgcctcgacccagacacctccccaatgtcagctcccctctatccacgtggagcaaaccgtgcattcccaagagacggccaactaccacccagatggcacaattcaggtgagcaatgggtctctcgcgttttatcccgctcagaccaatgtttttcctcgacccactcagccatttgtcaatagtagaggtagcgttcgcggatgtaccaggggaggcaggctcatcaccaacagctatcggtctccaggcggatataaaggctttgacacctatagggggctgccttcaatatctaatgggaactacagccaattgcagttccaggcacgggagtactcaggtgctccatattctcaaagagacaatttccagcagtgctacaagcgtggtggcactagcgggggacctcgagcaaactccagagctggctggtcagactccagccaagtgtcctcaccagaaagagacaacgaaaccttcaacagcggcgacagcgggcagggagatagccgctccatgacaccagtcgatgttcctgtcactaaccccgcagcaacgatacttcccgtgcatgtttaccctctacctcaacagatgcgggttgccttttcggctgcgaggacttccaatttggcccctggcaccctggatcaacccatagtctttgatctgctgcttaataatttgggagagacattcgatcttcaacttggcagatttaactgtcctgttaatggtacgtatgtgtttatctttcacatgctgaagctggctgttaacgttccgctgtacgttaacttgatgaagaatgaggaggtgctggtgtcagcctatgctaacgatggggctcctgaccacgagactgcctctaatcacgctattctccagcttttccaaggagatcagatttggttacgcctgcacaggggggcaatatacggatctagctggaagtactccacattttctggctatctcctctaccaggactag

SEQ ID NO: 292303 - DNA, 4397 bp, Artificial Sequence
  derived and/or modified sequence
gtcggtgcctgcagggctctccgtggccgctcgggagaggtgctcttcgctcaggctcccccggagacttgagggggtgcgcgctggcgtgcatggggcctgttctgtccttggtttggggatgctcctaaggggggagaaagggatacctcgggtgcttggaggtcgagagacggatacgtaagtgcgcaagggccactgattagggcacgggaagggctcgctagaatgagctcttaaactggttgggtgtaagcggttttgggctagtctaaaccaaacaactgagaataaacgcggggttcctgcaggttgagagagtacctgtctgcaaatgtccagtagtgatggattgccttgtaggccccagagcaatcggggaagttagcattcttgttcaagaagctgctggttcacttagagctataaaagaatgttgtgagtttggattttcttccaaacgttcaggattgaggttagggctggtggtgagggatcatgtaaagaggtttgagtggctcagccttaggtcccggtgtggaaagcttattcttttggtgtcatcacgtggccgtgggaattatttagaatgtgatctgccctcatgagaagaaaggagctctgaagccgttgcagttcttcctccctatgtggaaaatcgaatttctggaaacatcctccgtattgggagattttgcctatgtaaaggctatccttattggctagcggcactaattactttaaaagtaggatggaagtacaagtatctcaagcatcattgggtttcgagctcacttctgtggaaaagagtttaagggagtggtctagactttccagggaagttattgcctggctgtgtccctctagtcctaattttatacttaactttcccccacctccttcagcctcatctgtttcaatggtgcaactcttttcatccccttttggttaccagtcaccttcaggccattcagaggaggaaagagaggggaatatgaagtcagccaagccccaagtgaaccacagtcagcatggggaaagccagcgggccttgagccccctgcagtctactctgagttctgctgcatctccttcccaagcgtatgagacctatattgaaaatggactcatatgccttaaacacaaaattagaaacatcgagaaaaagaagctcaaactggaggattataaggatcgcctgaaaagtggagagcatcttaatccagaccagttggaagctgtagagaaatatgaagaagtgctacataatttggaatttgccaaggagcttcaaaaaaccttttctgggttgagcctagatctactaaaagcgcaaaagaaggcccagagaagggagcacatgctaaaacttgaggctgagaagaaaaagcttcgaactatacttcaagttcagtatgtattgcagaacttgacacaggagcacgtacaaaaagacttcaaagggggtttgaatggtgcagtgtatttgccttcaaaagaacttgactacctcattaagttttcaaaactgacctgccctgaaagaaatgaaagtctgagacaaacacttgaaggatctactgtctaaattgctgaactcaggctattttgaaagtatcccagttcccaaaaatgccaaggaaaaggaagtaccactggaggaagaaatgctaatacaatcagagaaaaaaacacaattatcgaagactgaatctgtcaaagagtcagagtctctaatggaatttgcccagccagagatacaaccacaagagtttcttaacagacgctatatgacagaagtagattattcaaacaaacaaggcgaagagcaaccttgggaagcagattatgctagaaaaccaaatctcccaaaacgttgggatatgcttactgaaccagatggtcaagagaagaaacaggagtcctttaagtcctgggaggcttctggtaagcaccaggaggtatccaagcctgcagtttccttagaacagaggaaacaagacacctcaaaactcaggtctactctgccggaagagcagaagaagcaggagatctccaaatccaagccatctcctagccagtggaagcaagatacacctaaatccaaagcagggtatgttcaagaggaacaaaagaaacaggagacaccaaagctgtggccagttcagctgcagaaagaacaagatccaaagaagcaaactccaaagtcttggacaccttccatgcagagcgaacagaacaccaccaagtcatggaccactcccatgtgtgaagaacaggattcaaaacagccagagactccaaaatcctgggaaaacaatgttgagagtcaaaaacactctttaacatcacagtcacagatttctccaaagtcctggggagtagctacagcaagcctcataccaaatgaccagctgctgcccaggaagttgaacacagaacccaaagatgtgcctaagcctgtgcatcagcctgtaggttcttcctctacccttccgaaggatccagtattgaggaaagaaaaactgcaggatctgatgactcagattcaaggaacttgtaactttatgcaagagtctgttcttgactttgacaaaccttcaagtgcaattccaacgtcacaaccgccttcagctactccaggtagccccgtagcatctaaagaacaaaatctgtccagtcaaagtgattttcttcaagagccgttacaggctacttcttctccagttacttgtagctcaaatgcttgcttggttactaccgatcaggcttcttctggatctgaaacagagtttatgacctcagagactcctgaggcagcaattcccccaggcaagcaaccgtcttcactagcttctccaaatcctcccatggcaaagggctctgaacagggcttccagtcacctccagcaagtagtagttcagtaaccattaacacagcaccctttcaagccatgcagacagtatttaacgttaatgcacctctgcctccacgaaaagaacaagaaataaaagaatccccttattcacctggctacaatcaaagttttaccacagcaagtacacaaacaccaccccagtgccaactgccatctatacatgtagaacaaactgtccattctcaagagactgcaaattatcatcctgatggaactattcaagtaagcaatggtagccttgccttttacccagcacagacgaatgtgtttcccagacctactcagccatttgtcaatagccggggatctgttagaggatgtactcgtggtgggagattaataaccaattcctatcggtcccctggtggttataaaggttttgatacttatagaggactcccttcaatttccaatggaaattatagccagctgcagttccaagctagagagtattctggagcaccttattcccaaagggataatttccagcagtgttataagcgaggagggacatctggtggtccacgagcaaattcgagagcagggtggagtgattcttctcaggtgagcagcccagaaagagacaacgaaacctttaacagtggtgactctggacaaggagactcccgtagcatgacccctgtggatgtgccagtgacaaatccagcagccaccatactgccagtacacgtctaccctctgcctcagcagatgcgagttgccttctcagcagccagaacctctaatctggcccctggaactttagaccaacctattgtgtttgatcttcttctgaacaacttaggagaaacttttgatcttcagcttggtagatttaattgcccagtgaatggcacttacgttttcatttttcacatgctaaagctggcagtgaatgtgccactgtatgtcaacctcatgaagaatgaagaggtcttggtatcagcctatgccaatgatggtgctccagaccatgaaactgctagcaatcatgcaattcttcagctcttccagggagaccagatatggttacgtctgcacaggggagcaatttatggaagtagctggaaatattctacgttttcaggctatcttctttatcaagattgaaagtcagtacagtattgacaataaaaggatggtgttctaattagtgggattgaaggaaaagtagtctttgccctcatgactgattggtttaggaaaatgtttttgttcctagagggaggaggtccttacttttttgttttccttcctgaggtgaaaaatcaagctgaatgacaattagcactaatctggcactttataaattgtgatgtagcctcgctagtcaagctgtgaatgtatattgtttgcacttaatccttaactgtattaacgttcagcttactaaactgactgcctcaagtccaggcaagttacaatgccttgttgtgcctcaataaaaaagttacatgc

SEQ ID NO: 292304 - DNA, 2382 bp, Artificial Sequence
  derived and/or modified sequence
atgctgatccagagcgagaagaagacccagctgagcaagaccgagagcgtgaaggagagcgagagcctgatggagttcgcccagcccgagatccagccccaggagttcctgaacagaagatacatgaccgaggtggactacagcaacaagcagggcgaggagcagccctgggaggccgactacgccagaaagcccaacctgcccaagagatgggacatgctgaccgagcccgacggccaggagaagaagcaggagagcttcaagagctgggaggccagcggcaagcaccaggaggtgagcaagcccgccgtgagcctggagcagagaaagcaggacaccagcaagctgagaagcaccctgcccgaggagcagaagaagcaggagatcagcaagagcaagcccagccccagccagtggaagcaggacacccccaagagcaaggccggctacgtgcaggaggagcagaagaagcaggagacccccaagctgtggcccgtgcagctgcagaaggagcaggaccccaagaagcagacccccaagagctggacccccagcatgcagagcgagcagaacaccaccaagagctggaccacccccatgtgcgaggagcaggacagcaagcagcccgagacccccaagagctgggagaacaacgtggagagccagaagcacagcctgaccagccagagccagatcagccccaagagctggggcgtggccaccgccagcctgatccccaacgaccagctgctgcccagaaagctgaacaccgagcccaaggacgtgcccaagcccgtgcaccagcccgtgggcagcagcagcaccctgcccaaggaccccgtgctgagaaaggagaagctgcaggacctgatgacccagatccagggcacctgcaacttcatgcaggagagcgtgctggacttcgacaagcccagcagcgccatccccaccagccagccccccagcgccacccccggcagccccgtggccagcaaggagcagaacctgagcagccagagcgacttcctgcaggagcccctgcaggccaccagcagccccgtgacctgcagcagcaacgcctgcctggtgaccaccgaccaggccagcagcggcagcgagaccgagttcatgaccagcgagacccccgaggccgccatcccccccggcaagcagcccagcagcctggccagccccaacccccccatggccaagggcagcgagcagggcttccagagcccccccgccagcagcagcagcgtgaccatcaacaccgcccccttccaggccatgcagaccgtgttcaacgtgaacgcccccctgccccccagaaaggagcaggagatcaaggagagcccctacagccccggctacaaccagagcttcaccaccgccagcacccagacccccccccagtgccagctgcccagcatccacgtggagcagaccgtgcacagccaggagaccgccaactaccaccccgacggcaccatccaggtgagcaacggcagcctggccttctaccccgcccagaccaacgtgttccccagacccacccagcccttcgtgaacagcagaggcagcgtgagaggctgcaccagaggcggcagactgatcaccaacagctacagaagccccggcggctacaagggcttcgacacctacagaggcctgcccagcatcagcaacggcaactacagccagctgcagttccaggccagagagtacagcggcgccccctacagccagagagacaacttccagcagtgctacaagagaggcggcaccagcggcggccccagagccaacagcagagccggctggagcgacagcagccaggtgagcagccccgagagagacaacgagaccttcaacagcggcgacagcggccagggcgacagcagaagcatgacccccgtggacgtgcccgtgaccaaccccgccgccaccatcctgcccgtgcacgtgtaccccctgccccagcagatgagagtggccttcagcgccgccagaaccagcaacctggcccccggcaccctggaccagcccatcgtgttcgacctgctgctgaacaacctgggcgagaccttcgacctgcagctgggcagattcaactgccccgtgaacggcacctacgtgttcatcttccacatgctgaagctggccgtgaacgtgcccctgtacgtgaacctgatgaagaacgaggaggtgctggtgagcgcctacgccaacgacggcgcccccgaccacgagaccgccagcaaccacgccatcctgcagctgttccagggcgaccagatctggctgagactgcacagaggcgccatctacggcagcagctggaagtacagcaccttcagcggctacctgctgtaccaggactag

SEQ ID NO: 292305 - DNA, 1566 bp, Artificial Sequence
  derived and/or modified sequence
atggagcagagcagcctgtacttctgggacctgctggagggcagcgagaaggccgtggtgggcaccacctacaagcacctgaaggacctgctgagcaagctgctgaacagcggctacttcgagagcatccccgtgcccaagaacgccaaggagaaggaggtgcccctggaggaggagatgctgatccagagcgagaagaagacccagctgagcaagaccgagagcgtgaaggagagcgagagcctgatggagttcgcccagcccgagatccagccccaggagttcctgaacagaagatacatgaccgaggtggactacagcaacaagcagggcgaggagcagccctgggaggccgactacgccagaaagcccaacctgcccaagagatgggacatgctgaccgagcccgacggccaggagaagaagcaggagagcttcaagagctgggaggccagcggcaagcaccaggaggtgagcaagcccgccgtgagcctggagcagagaaagcaggacaccagcaagctgagaagcaccctgcccgaggagcagaagaagcaggagatcagcaagagcaagcccagccccagccagtggaagcaggacacccccaagagcaaggccggctacgtgcaggaggagcagaagaagcaggagacccccaagctgtggcccgtgcagctgcagaaggagcaggaccccaagaagcagacccccaagagctggacccccagcatgcagagcgagcagaacaccaccaagagctggaccacccccatgtgcgaggagcaggacagcaagcagcccgagacccccaagagctgggagaacaacgtggagagccagaagcacagcctgaccagccagagccagatcagccccaagagctggggcgtggccaccgccagcctgatccccaacgaccagctgctgcccagaaagctgaacaccgagcccaaggacgtgcccaagcccgtgcaccagcccgtgggcagcagcagcaccctgcccaaggaccccgtgctgagaaaggagaagctgcaggacctgatgacccagatccagggcacctgcaacttcatgcaggagagcgtgctggacttcgacaagcccagcagcgccatccccaccagccagccccccagcgccacccccggcagccccgtggccagcaaggagcagaacctgagcagccagagcgacttcctgcaggagcccctgcaggccgccatcccccccggcaagcagcccagcagcctggccagccccaacccccccatggccaagggcagcgagcagggcttccagagcccccccgccagcagcagcagcgtgaccatcaacaccgcccccttccaggccatgcagaccgtgttcaacgtgaacgcccccctgccccccagaaaggagcaggagatcaaggagagcccctacagccccggctacaaccagagcttcaccaccgccagcacccagacccccccccagtgccagctgcccagcatccacgtggagcagaccgtgcacagccaggagaccgcccccggcaaccaccacagcaccttctag

SEQ ID NO: 292306 - DNA, 1566 bp, Artificial Sequence
  derived and/or modified sequence
atggagcaaagttcactgtacttctgggacctgctagaagggtccgagaaggcggtagtcggtaccacctataaacaccttaaggacctgctgtcaaagctgctgaacagtgggtacttcgagtctataccggtgcccaaaaacgcaaaagagaaggaggtccctctcgaggaagagatgttgattcaatccgagaagaagacgcagctgagtaagaccgaaagcgtaaaggagtctgagagcttgatggagtttgcccaacctgagattcagcctcaagagttcctgaacagaaggtatatgacggaggtagattatagtaacaagcagggagaagaacagccgtgggaagcggactatgccaggaagcccaacctgcccaagcgctgggacatgctgacagaacctgatggccaggaaaagaaacaggaaagctttaaatcatgggaggcgtccgggaagcatcaggaggtaagtaagcccgctgtgtctctggaacaacgcaagcaagatactagtaaactgcgcagtactttgccagaagagcagaagaaacaggagatctccaagtcgaagcctagccccagccagtggaagcaggatacaccaaaatctaaggccggatatgtgcaggaggagcagaagaagcaggaaacaccgaagttgtggcccgtccaactgcagaaggaacaagacccaaaaaagcaaactcctaagtcatggacgccaagcatgcaatccgagcaaaacacaacgaagagctggacaacccctatgtgtgaggagcaggattcgaagcagcccgagacgcccaaaagctgggagaataatgtggaatctcagaagcattcattgacctctcagtctcaaattagccccaaatcttggggcgtcgccactgcaagtctcattcccaacgaccagttacttccaagaaaattaaatacagaacccaaagatgtgccgaagccagtgcatcagcctgttggttcctcctccactctgcccaaagacccagtcctccggaaagagaagttgcaagacttgatgacacaaatccagggaacatgcaactttatgcaagagagtgtgttggatttcgacaaaccatcatcagcgataccaactagtcagcctccttctgccacccctggttccccagtggcaagcaaggaacagaatctgtctagtcagtccgatttcctccaagaacccctccaagcagcgattccaccgggcaagcagcccagctccctcgcctcccctaaccctcctatggcaaagggcagcgagcagggatttcagagtccccctgcatcatcaagcagcgtgactattaatactgctccgttccaagcaatgcaaaccgtttttaacgttaacgcgcccttgccgccacgcaaagagcaggagataaaggaatcgccctattctcctggctataatcagtcttttaccacagcatcaacgcagacaccaccccaatgccaacttcccagcatccacgttgagcagacggttcactctcaagagaccgcgccaggcaaccatcacagcaccttctag

SEQ ID NO: 292307 - DNA, 1566 bp, Artificial Sequence
  derived and/or modified sequence
atggagcagagcagcctgtacttctgggacctgctggagggcagcgagaaggctgtggtgggcaccacctacaagcacctgaaggacctgctgagcaagctgctgaacagcggctactttgagagcatccctgtgcccaagaatgccaaggagaaggaggtgcccctggaggaggagatgctgatccagagcgagaagaagacccagctgagcaagacagaatctgtgaaggagagcgagagcctgatggagtttgcccagcctgagatccagccccaggagttcctgaacagacgctacatgacagaggtggactacagcaacaagcagggcgaggagcagccctgggaggccgactatgccaggaagcccaacctgcccaagcgctgggacatgctgacagagccagatggccaggagaagaagcaggagagcttcaagtcctgggaggccagcggcaagcaccaggaggtgtccaagccagctgtgtccctggagcagaggaagcaggacaccagcaagctgcggagcaccctgcctgaggagcagaagaagcaggagatcagcaagagcaagcccagccccagccagtggaagcaggacacccccaagagcaaggccggctacgtgcaggaggagcagaagaagcaggagacccccaagctgtggcctgtgcagctgcagaaggagcaggaccccaagaagcagacccccaagtcctggacccccagcatgcagagcgagcagaacaccaccaagtcctggaccacccccatgtgtgaggagcaggacagcaagcagcctgagacccccaagtcctgggagaacaacgtggagagccagaagcacagcctgaccagccagagccagatcagccccaagtcctggggcgtggccacagccagcctcatccccaatgaccagctgctgcccaggaagctgaacacagagcccaaggatgtgcccaagcctgtgcaccagcctgtgggcagcagcagcaccctgcccaaggaccctgtgctgaggaaggagaagctgcaggacctgatgacccagatccagggcacctgcaacttcatgcaggagagcgtgctggactttgacaagcccagcagcgccatccccaccagccagcccccatctgccaccccaggcagccctgtggccagcaaggagcagaacctgagcagccagagcgacttcctgcaggagcccctgcaggccgccatccccccaggcaagcagcccagcagcctggccagccccaacccccccatggccaagggcagcgagcagggcttccagagccccccagccagcagcagctctgtgaccatcaacacagcccccttccaggccatgcagaccgtcttcaacgtgaatgcccccctgccccccaggaaggagcaggagatcaaggagagcccctacagccctggctacaaccagagcttcaccacagccagcacccagaccccaccccagtgccagctgcccagcatccacgtggagcagacagtgcacagccaggagacagcccctggcaaccaccacagcaccttctag

SEQ ID NO: 292308 - DNA, 1566 bp, Artificial Sequence
  derived and/or modified sequence
atggagcagagcagcctgtacttctgggacctgctggagggcagcgagaaggcagtcgtgggaacaacttacaagcatttgaaggatctcctttcaaagctcttgaactcaggatactttgagagcatccccgtccccaagaacgcaaaagagaaagaagtgcccctggaagaggagatgctaattcagtctgaaaagaagacccaactctctaagaccgagagtgtgaaagagtcagaatccctcatggaatttgcacagccggagattcaaccacaggagtttcttaatcgcagatacatgaccgaagtagattatagcaacaagcagggcgaggaacaaccctgggaagccgactacgcacggaagccaaacttgccaaaaaggtgggatatgcttaccgagccagatgggcaggaaaagaagcaagagtcctttaagtcctgggaggcttctggaaagcaccaggaagtatccaagccagcggttagtctggagcagcggaaacaggatacctctaagctcaggagtacattaccagaggagcagaagaaacaggagatcagcaagtctaagccgagcccatcacagtggaaacaggacacgccgaagtcgaaagctggatatgtgcaggaagagcaaaaaaagcaggagactccaaagctgtggcctgtccagctgcagaaggaacaggacccaaagaagcagactcccaagtcatggacaccctctatgcagagtgagcagaacacaaccaagtcttggacgacaccaatgtgtgaggaacaggattctaaacagccggagaccccgaagtcctgggagaacaacgtggagagccagaagcatagcctgacttctcagagccagatcagccccaagtcatggggcgttgccaccgccagtctgatccccaatgatcagctgctaccccgcaagttaaatactgagccaaaagatgtgcccaagcctgtgcaccaacccgttggcagttctagcaccctgccaaaggatcccgttctgcgaaaagaaaagcttcaggacctgatgactcaaatacaagggacctgcaatttcatgcaggagtctgtcctcgattttgataaacccagtagcgccatcccgacctcacaaccaccctccgcaacaccaggaagtcccgtcgcaagcaaggaacagaacctgagctctcagtctgacttcctccaagagccactgcaggccgcaattccacccgggaaacagccatcttcattggcatctcccaatcccccaatggccaaaggatccgagcaagggtttcagagccctcctgccagttctagcagtgtgacaatcaacacagcgcccttccaagccatgcaaacagtgttcaacgtgaatgctcctctgcctccgcgaaaagaacaagagattaaggagtctccatacagcccgggctacaaccagagtttcactacggcttccactcagacacctcctcagtgtcagctgccttcaatacatgttgaacagacagtccacagccaggaaaccgcccccgggaaccatcattcaacattctag

SEQ ID NO: 292309 - DNA, 1566 bp, Artificial Sequence
  derived and/or modified sequence
atggagcagtcaagtttgtacttctgggatctgcttgaaggaagcgagaaggccgtggtcggcactacatacaaacacctgaaagatctgctatccaaactcttgaactcggggtacttcgagtccattccagtgccgaaaaacgcaaaggaaaaagaggtgcctctagaggaggagatgctgatccagtctgagaagaagacacaactgtccaaaacagagagcgtgaaagaatcggagtcactcatggaattcgcccagcctgagatccagccgcaagaattcttgaataggagatatatgaccgaggtggattatagtaacaagcagggtgaggagcagccatgggaggcggactacgccaggaagcctaacctacccaaacggtgggatatgctcaccgagccggacggtcaagaaaaaaagcaggaatcattcaagtcttgggaggcatcaggaaagcatcaggaggttagtaagcctgccgtctccctggaacagcgtaagcaggacacttcaaagcttcgctcaaccctgccggaggaacagaagaagcaggagatcagtaaaagcaaacctagccccagccagtggaagcaggatacacctaaaagcaaggccggatacgtacaggaagaacagaagaagcaagaaactcctaagttgtggcctgttcaactccagaaagagcaggaccctaagaagcagacaccgaaatcctggaccccaagcatgcagagtgagcagaacactactaagagttggaccacccccatgtgtgaagaacaggacagcaagcagccagaaacccccaaaagctgggagaacaatgtggaatcccagaagcattccctaactagccagtcacagatatctcccaagtcgtggggggtggcaactgcctccctgatccctaacgaccaattactgcccagaaaactcaataccgaacctaaggacgtccctaagcccgtccatcaacccgtgggctcctcctccactctccccaaggatcctgtgttaagaaaagagaagctgcaggatcttatgacgcagatccagggaacctgcaacttcatgcaggaaagcgtgctcgattttgacaagccttcatccgctatcccaacctctcagccacctagcgccacacctgggtccccagtcgcatccaaggagcaaaatctcagctcgcaatcagactttctgcaagagcctcttcaggccgctatcccacccggaaagcaaccctcgtcactggcatcacccaatccgccaatggccaagggcagcgagcagggctttcagtctcctcccgcaagttccagttcagtcacaataaacactgccccattccaagccatgcagaccgtattcaacgtgaatgcccctctgcctcctaggaaagagcaggaaattaaggaatctccatactcacccggttataaccagtccttcacgacagcttccactcagactcctccacagtgtcagctgccctctatccacgtcgaacagaccgtgcactcccaggagactgccccaggaaaccaccattccactttttag

SEQ ID NO: 292310 - DNA, 3139 bp, Artificial Sequence
  derived and/or modified sequence
gtcggtgcctgcagggctctccgtggccgctcgggagaggtgctcttcgctcaggctcccccggagacttgagggggtgcgcgctggcgtgcatggggcctgttctgtccttggtttggggatgctcctaaggggggagaaagggatacctcgggtgcttggaggtcgagagacggatacgtaagtgcgcaagggccactgattagggcacgggaagggctcgctagaatgagctcttaaactggttgggtgtaagcggttttgggctagtctaaaccaaacaactgagaataaacgcggggttcctgcaggttgagagagtacctgtctgcaaatgtccagtagtgatggattgccttgtaggccccagagcaatcggggaagttagcattcttgttcaagaagctgctggttcacttagagctataaaagaatgttgtgagtttggattttcttccaaacgttcaggattgaggttagggctggtggtgagggatcatgtaaagaggtttgagtggctcagccttaggtcccggtgtggaaagcttattcttttggtgtcatcacgtggccgtgggaattatttagaatgtgatctgccctcatgagaagaaaggagctctgaagccgttgcagttcttcctccctatgtggaaaatcgaatttctggaaacatcctccgtattgggagattttgcctatgtaaaggctatccttattggctagcggcactaattactttaaaagtaggatggaagtacaagtatctcaagcatcattgggtttcgagctcacttctgtggaaaagagtttaagggagtggtctagactttccagggaagttattgcctggctgtgtccctctagtcctaattttatacttaactttcccccacctccttcagcctcatctgtttcaatggtgcaactcttttcatccccttttggttaccagtcaccttcaggccattcagaggaggaaagagaggggaatatgaagtcagccaagccccaagtgaaccacagtcagcatggggaaagccagcgggccttgagccccctgcagtctactctgagttctgctgcatctccttcccaagcgtatgagacctatattgaaaatggactcatatgccttaaacacaaaattagaaacatcgagaaaaagaagctcaaactggaggattataaggatcgcctgaaaagtggagagcatcttaatccagaccagttggaagctgtagagaaatatgaagaagtgctacataatttggaatttgccaaggagcttcaaaaaaccttttctgggttgagcctagatctactaaaagcgcaaaagaaggcccagagaagggagcacatgctaaaacttgaggctgagaagaaaaagcttcgaactatacttcaagttcagtatgtattgcagaacttgacacaggagcacgtacaaaaagacttcaaagggggtttgaatggtgcagtgtatttgccttcaaaagaacttgactacctcattaagttttcaaaactgacctgccctgaaagaaatgaaagtctgagtgttgaagaccagatggagcagtcatccttgtacttttgggaccttttggaaggtagtgagaaagcagtggtaggaacgacatacaaacacttgaaggatctactgtctaaattgctgaactcaggctattttgaaagtatcccagttcccaaaaatgccaaggaaaaggaagtaccactggaggaagaaatgctaatacaatcagagaaaaaaacacaattatcgaagactgaatctgtcaaagagtcagagtctctaatggaatttgcccagccagagatacaaccacaagagtttcttaacagacgctatatgacagaagtagattattcaaacaaacaaggcgaagagcaaccttgggaagcagattatgctagaaaaccaaatctcccaaaacgttgggatatgcttactgaaccagatggtcaagagaagaaacaggagtcctttaagtcctgggaggcttctggtaagcaccaggaggtatccaagcctgcagtttccttagaacagaggaaacaagacacctcaaaactcaggtctactctgccggaagagcagaagaagcaggagatctccaaatccaagccatctcctagccagtggaagcaagatacacctaaatccaaagcagggtatgttcaagaggaacaaaagaaacaggagacaccaaagctgtggccagttcagctgcagaaagaacaagatccaaagaagcaaactccaaagtcttggacaccttccatgcagagcgaacagaacaccaccaagtcatggaccactcccatgtgtgaagaacaggattcaaaacagccagagactccaaaatcctgggaaaacaatgttgagagtcaaaaacactctttaacatcacagtcacagatttctccaaagtcctggggagtagctacagcaagcctcataccaaatgaccagctgctgcccaggaagttgaacacagaacccaaagatgtgcctaagcctgtgcatcagcctgtaggttcttcctctacccttccgaaggatccagtattgaggaaagaaaaactgcaggatctgatgactcagattcaaggaacttgtaactttatgcaagagtctgttcttgactttgacaaaccttcaagtgcaattccaacgtcacaaccgccttcagctactccaggtagccccgtagcatctaaagaacaaaatctgtccagtcaaagtgattttcttcaagagccgttacaggcagcaattcccccaggcaagcaaccgtcttcactagcttctccaaatcctcccatggcaaagggctctgaacagggcttccagtcacctccagcaagtagtagttcagtaaccattaacacagcaccctttcaagccatgcagacagtatttaacgttaatgcacctctgcctccacgaaaagaacaagaaataaaagaatccccttattcacctggctacaatcaaagttttaccacagcaagtacacaaacaccaccccagtgccaactgccatctatacatgtagaacaaactgtccattctcaagagactgcccctggcaaccaccattctactttctga

SEQ ID NO: 292311 - DNA, 420 bp, Artificial Sequence
  derived and/or modified sequence
atggaggccgccagacccccccccaccgccggcaagttcgtggtggtgggcggcggcatcgccggcgtgacctgcgccgagcagctggccacccacttccccagcgaggacatcctgctggtgaccgccagccccgtgatcaaggccgtgaccaacttcaagcagatcagcaagatcctggaggagttcgacgtggaggagcagagcagcaccatgctgggcaagagattccccaacatcaaggtgatcgagagcggcgtgaagcagctgaagagcgaggagcactgcatcgtgaccgaggacggcaaccagcacgtgtacaagaagctgtgcctgtgcgccggcgccaagcccaagctgatctgcgagggcaacccctacgtgctgggcatcagagacaccgacagcgcccaggtgtag

SEQ ID NO: 292312 - DNA, 420 bp, Artificial Sequence
  derived and/or modified sequence
atggaagccgccaggccgccacctaccgccggaaagtttgtagtggtgggagggggtatcgctggcgttacgtgcgcggagcaactggccacccacttccctagcgaggacattcttctcgttaccgcctcaccagtgattaaggccgtcaccaacttcaagcaaatctccaaaatattagaggagttcgatgtggaggagcagtcaagtacaatgctgggaaaacggttccccaatataaaggtgatcgagagtggagtaaaacaactgaaaagtgaggagcattgcatcgtcactgaggatggcaatcagcacgtctacaagaagctctgcctgtgcgctggggcaaaacctaagctcatctgcgaaggcaacccgtatgtccttggaatccgcgataccgactcagcccaggtgtag

SEQ ID NO: 292313 - DNA, 420 bp, Artificial Sequence
  derived and/or modified sequence
atggaggccgcccggcccccacccacagctgggaagtttgtggtggtgggcggcggcattgctggggtgacctgtgccgagcagctggccacccacttccccagcgaggacatcctgctggtgacagccagccctgtgatcaaggctgtgaccaacttcaagcagatcagcaagatcctggaggagtttgatgtggaggagcagagcagcaccatgctgggcaagcgcttccccaacatcaaggtgattgaaagtggagtgaagcagctgaagtctgaggagcactgcatcgtgacagaagatggcaaccagcacgtgtacaagaagctgtgcctgtgtgccggggccaagcccaagctgatctgtgagggcaacccctacgtgctgggcatccgggacacagacagcgcccaggtgtag

SEQ ID NO: 292314 - DNA, 420 bp, Artificial Sequence
  derived and/or modified sequence
atggaggccgcccggcccccccccaccgccggcaagttcgtggtggtgggaggcggtatagccggcgtcacttgcgccgaacagttagctactcactttccatctgaggacatcctgttagtaacagccagtccagtaattaaagccgtcacaaatttcaaacagattagcaagatcctcgaggaattcgatgtggaggaacaaagctctaccatgttggggaaacgctttccgaatataaaggtaatcgagagtggtgttaagcagttaaagtcagaagagcattgtattgtgaccgaagatggaaatcaacacgtgtataagaagctatgcctctgtgccggcgcaaagcctaagctcatctgtgagggaaacccttacgttttaggcatcagggatacagactctgcgcaggtctag

SEQ ID NO: 292315 - DNA, 420 bp, Artificial Sequence
  derived and/or modified sequence
atggaagccgcaaggcctcctcctaccgcagggaaattcgttgtcgtgggaggcggtatagccggagtcacatgtgccgaacagctggcgacccatttcccctctgaggatatcctgctcgttaccgcctctcccgtgatcaaagccgtgaccaactttaaacagatctccaaaatcctcgaagagttcgacgtcgaagagcagtcctcaaccatgttaggaaaaaggttccccaacattaaagtgatcgagtccggggtgaaacagctgaaatccgaggaacactgcattgttactgaggatggcaatcagcacgtctacaagaaattgtgtctgtgcgccggagccaaacccaaactcatctgcgagggtaatccgtacgtgctgggcattcgggatacagactcagcccaggtgtag

SEQ ID NO: 292316 - protein, 665 aa, Artificial Sequence
  derived and/or modified sequence
MAHEMIGTQIVTERLVALLESGTEKVLLIDSRPFVEYNTSHILEAININCSKLMKRRLQQDKVLITELIQHSAKHKVDIDCSQKVVVYDQSSQDVASLSSDCFLTVLLGKLEKSFNSVHLLAGGFAEFSRCFPGLCEGKSTLVPTCISQPCLPVANIGPTRILPNLYLGCQRDVLNKELMQQNGIGYVLNASNTCPKPDFIPESHFLRVPVNDSFCEKILPWLDKSVDFIEKAKASNGCVLVHCLAGISRSATIAIAYIMKRMDMSLDEAYRFVKEKRPTISPNFNFLGQLLDYEKKIKNQTGASGPKSKLKLLHLEKPNEPVPAVSEGGQKSETPLSPPCADSATSEAAGQRPVHPASVPSVPSVQPSLLEDSPLVQALSGLHLSADRLEDSNKLKRSFSLDIKSVSYSASMAASLHGFSSSEDALEYYKPSTTLDGTNKLCQFSPVQELSEQTPETSPDKEEASIPKKLQTARPSDSQSKRLHSVRTSSSGTAQRSLLSPLHRSGSVEDNYHTSFLFGLSTSQQHLTKSAGLGLKGWHSDILAPQTSTPSLTSSWYFATESSHFYSASAIYGGSASYSAYSCSQLPTCGDQVYSVRRRQKPSDRADSRRSWHEESPFEKQFKRRSCQMEFGESIMSENRSREELGKVGSQSSFSGSMEIIEVS

SEQ ID NO: 292317 - protein, 143 aa, Artificial Sequence
  derived and/or modified sequence
MAHEMIGTQIVTERLVALLESGTEKVLLIDSRPFVEYNTSHILEAININCSKLMKRRLQQDKVLITELIQHSAKHKVDIDCSQKVVVYDQSSQDVASLSSDCFLTVLLGKLEKSFNSVHLLAGADAAEWDWLCVKCQQYLSKA

SEQ ID NO: 292318 - protein, 25 aa, Artificial Sequence
  derived and/or modified sequence
MAHEMIGTQIVTERLVALLESGTEK

SEQ ID NO: 292319 - DNA, 1998 bp, Artificial Sequence
  derived and/or modified sequence
atggcccacgagatgatcgggacccagatcgtgacagagagactcgtggcccttctggagtccggaacagaaaaagtgctgttaattgactctcggccctttgtggagtacaatactagtcatatccttgaggcaatcaacataaattgttccaagctgatgaagcgtagacttcagcaggacaaagtcctcatcactgagctgatccagcatagcgcaaaacacaaagtagacatagattgctcccaaaaggttgtcgtctacgaccaatcatcccaagatgtggcttctctctcttcagactgctttctaacagtcctgctgggaaaactcgagaaatcgtttaactctgtgcatttgctagctggagggtttgcggagttttcccggtgcttcccaggcctctgcgagggcaagagcacactggtgcccacgtgcattagccagccttgcctcccagttgccaatatcgggcccacaaggatcttgcctaatctctaccttggttgccaacgcgatgtgttaaacaaggagttgatgcagcaaaatggtattgggtacgtcctgaatgcctctaatacctgccccaagcccgactttattcccgagtcccatttcctgcgcgtgcccgtcaatgattcattttgcgagaagatcctcccttggctggataagagcgtcgattttattgagaaagccaaagcctccaatggctgcgtgctggtccactgcctagctggcatctctagatctgccaccattgcaatagcatatatcatgaagagaatggacatgtcattggatgaagcttacaggtttgtgaaggaaaagcgacctaccatctcccctaattttaactttctgggccaactgctagactacgaaaaaaagatcaagaatcagacgggtgccagcgggcccaaaagtaagttgaaactgctgcacctggaaaagccaaatgaaccagtcccagctgtgagtgagggcggccaaaaaagtgaaacacccctgtctccaccatgtgcggactccgctactagcgaagctgctggtcaaagacccgtgcatccagcatccgtcccctcagtgccttcagtgcaaccctccctccttgaggattcccccctggtgcaagctctcagcggccttcacttgtcggccgatagactagaagatagcaacaagctgaagcgatccttttccttagatatcaagagcgtctcctactcagccagcatggcggcctccctacatggattctcgtcatcagaggacgccctggaatactacaagcctagcacgactctcgatggcacaaacaagctctgccagtttagtcctgtgcaagagctctcagaacagacgccagagacttctcctgataaagaggaggcttcgatcccaaagaagttacagacagcgaggcccagcgactcacagtccaagcggttgcattctgtccgtactagttcaagcggaaccgcgcagcggagcttgttatcccctctgcataggagcgggtctgttgaagacaattatcacacttcattcttatttggcttgtcaaccagccaacaacacctgaccaagtccgccggactgggtttaaagggatggcacagtgacattttagctcctcagacgagtacaccttccctaacctcctcttggtactttgccacggagagctcgcacttttactccgcctctgccatatacgggggtagcgcatcttactctgcctattcatgctctcaactccccacgtgtggggaccaagtgtatagcgtgaggaggagacagaaacctagcgatcgggctgactctcgccgatcctggcacgaagagagcccatttgagaagcagtttaagcggcggtcttgccagatggagtttggtgagtctatcatgtcggaaaaccgctctcgggaggagctcggcaaagtaggatcccaatcctcattcagcggctccatggaaatcatcgaggtgagttag

SEQ ID NO: 292320 - DNA, 1998 bp, Artificial Sequence
  derived and/or modified sequence
atggcccacgagatgattggcacccagatcgtgacagagcggctggtggccctgctggagagcggcacagagaaggtgctgctgattgacagccggccctttgtggagtacaacaccagccacatcctggaggccatcaacatcaactgcagcaagctgatgaagaggcggctgcagcaggacaaggtgctgatcacagagctgatccagcacagcgccaagcacaaggtggacatcgactgcagccagaaggtggtggtgtatgaccagagcagccaggatgtggccagcctgagcagtgactgcttcctgactgtgctgctgggcaagctggagaagagcttcaacagcgtgcacctgctggccggcggctttgctgagttcagccgctgcttccctggcctgtgtgagggcaagagcaccctggtgcccacctgcatcagccagccctgcctgcctgtggccaacatcggccccacccgcatcctgcccaacctgtacctgggctgccagagagatgtgctgaacaaggagctgatgcagcagaatggaattggctacgtgctgaatgccagcaacacctgccccaagccagacttcatccctgagagccacttcctgcgggtgcctgtgaatgacagcttctgtgagaagatcctgccctggctggacaagtctgtggacttcatcgagaaggccaaggccagcaatggctgtgtgctggtgcactgcctggccggcatcagccgcagcgccaccatcgccatcgcctacatcatgaagaggatggacatgagcctggatgaggcctacagatttgtgaaggagaagaggcccaccatcagccccaacttcaacttcctgggccagctgctggactatgagaagaagatcaagaaccagacaggagccagcggccccaagagcaagctgaagctgctgcacctggagaagcccaatgaacctgtgcctgctgtgtctgagggcggccagaagtctgagacccccctgagccccccctgtgccgacagcgccaccagcgaggccgccggccagaggcctgtgcacccagcctctgtgcccagcgtgcccagcgtgcagcccagcctgctggaggacagccccctggtgcaggccctgagcggcctgcacctgtctgctgaccggctggaggacagcaacaagctgaagaggagcttcagcctggacatcaagtctgtgtcctacagcgcctccatggccgccagcctgcacggcttcagcagcagtgaagatgccctggagtactacaagcccagcaccaccctggatggcaccaacaagctgtgccagttcagccctgtgcaggagctgtctgagcagaccccagagaccagcccagacaaggaggaggccagcatccccaagaagctgcagacagcccggcccagcgacagccagagcaagaggctgcacagcgtgaggaccagcagcagcggcacagcccagaggagcctgctgagccccctgcacaggagcggctctgtggaggacaactaccacaccagcttcctgtttggcctgagcaccagccagcagcacctgaccaagtctgctggcctgggcctgaagggctggcacagcgacatcctggccccccagaccagcacccccagcctgaccagctcctggtactttgccacagagagcagccacttctacagcgccagcgccatctatggaggcagcgccagctacagcgcctacagctgcagccagctgcccacctgtggggaccaggtgtacagcgtgagaagacggcagaagcccagcgacagagctgacagccgccgctcctggcatgaggagagcccctttgagaagcagttcaagagaagaagctgccagatggagtttggagagagcatcatgtctgaaaatagaagccgggaggagctgggcaaggtgggcagccagagcagcttcagcggctccatggagatcatcgaggtgtcctag

SEQ ID NO: 292321 - DNA, 1998 bp, Artificial Sequence
  derived and/or modified sequence
atggcccacgagatgatcggcacccagatcgtgaccgagcggctggttgctctcctggaaagcggtaccgagaaggtcctgttaatcgacagcagaccattcgtagaatataacacaagtcatatcctggaggctatcaacattaactgttcgaaactgatgaagcggaggttacaacaagacaaagtgcttatcacggaactcattcagcacagtgctaagcacaaggtagacatagattgctcacagaaagtggtagtgtacgaccagtctagccaggacgtggcaagtctctcttccgactgtttcctcaccgtgttgctggggaaactggaaaaatccttcaacagcgtgcacctgcttgcagggggatttgccgaatttagccgatgctttccagggctgtgtgaggggaaaagtaccctcgtgcccacctgtatttctcagccatgtcttcctgtcgcaaacatcgggcctacgagaatcctgcccaatctctatttgggatgccagagggacgtactcaacaaggagctgatgcagcagaacggtattgggtatgtacttaacgccagcaacacgtgtcccaagccagactttattccggaatcccatttcttgagagtgccagtgaatgattctttttgcgagaagatcttgccctggctggataaatctgttgattttatcgaaaaagctaaagccagcaatgggtgcgtgctcgttcactgtttggccggcatttcacgatccgccacaatcgcaattgcttatattatgaaacgtatggatatgtcgctcgatgaagcttaccggttcgtgaaggaaaaaagacctacgatttcacctaattttaactttttgggtcagttgttggactatgagaagaagataaaaaatcagaccggcgcctccgggccgaaaagcaagcttaaattgttgcatctcgagaagccgaacgagcctgtccccgccgtatccgaaggcggacaaaaatctgaaacccctctgtcgccgccttgcgccgactccgccacatctgaggccgcaggccagcgcccagtacacccagcctctgtaccttcagtgccttctgtccagccatcgttgctggaagattcccccctggtccaggccctatcaggcctccaccttagtgctgaccgcctggaggatagtaataagctgaagcggagcttctcactggacataaagtcagtctcttattcagcctctatggccgcaagcctccatggttttagctctagtgaggacgccctggaatactacaaaccatccaccacactcgacggaaccaacaagctgtgtcaattcagtccggtgcaagaactgagcgaacagaccccagaaacgtcccctgacaaggaagaggcaagtatacccaaaaaactgcagaccgcacgtccaagtgattcccaatctaaacggctccattccgtgagaacttcatcttcgggtactgctcaacggagccttctgtccccacttcacaggagcggttccgtggaggacaattatcacacatctttcctattcggccttagcacctcccagcagcatcttacaaagtcagcgggactgggactaaagggttggcactcagatatcctcgctccacagacttcaaccccatccctcactagctcttggtattttgctaccgagtccagccacttctatagcgcttctgccatttatgggggctctgcctcctattcagcatacagctgctcccaactgccaacatgtggcgatcaagtctattctgttagaagaaggcagaaaccttccgatcgtgccgacagccgccggtcatggcatgaggagtcaccatttgaaaagcagtttaagagaaggtcctgtcagatggagtttggggagtctatcatgtccgagaatcggagccgggaagaactgggcaaagtgggaagccagtcaagcttttcagggtccatggaaattatcgaagtatcctag

SEQ ID NO: 292322 - DNA, 1998 bp, Artificial Sequence
  derived and/or modified sequence
atggctcacgagatgattggtacgcagattgtgaccgagcgcctggtcgcactgctggagagcggaacagagaaggtccttctgatagatagtcggccattcgtggaatacaacacaagccacatacttgaagccatcaatatcaactgtagcaagctgatgaagaggcggcttcagcaggacaaggtgctgatcaccgaactgatacagcactcagccaagcataaagtcgacatcgactgttcccagaaagtcgtggtgtacgatcagtcatctcaggacgttgctagcctttcaagcgactgtttcctgaccgtgctccttggcaagctagaaaaatctttcaatagtgtgcatctgttagccggagggttcgccgagtttagcaggtgttttccgggtctgtgtgagggtaaatctacattagtccctacatgtattagccaaccatgtctccctgtggcaaacatcggccctactaggatcctaccaaacctttacctcgggtgccagagagatgttctcaataaggaattgatgcaacagaacggaatcggctatgtgctgaacgcctcaaatacgtgccccaaacccgacttcattccggagagccatttcttaagagtgccagtgaatgacagtttttgcgagaagatcttaccttggctcgacaagtcggttgattttatcgaaaaggccaaagcctctaacgggtgtgttttggtgcactgtctggcgggaattagtcggagtgccacaatcgccatcgcttacatcatgaagagaatggacatgtccttggatgaggcttacaggtttgtgaaggagaaacgtcccacaatctctccaaactttaattttttgggtcagttactggactatgagaaaaaaatcaagaaccagactggtgcatccggccctaagtcgaaactgaaactgctgcacctggaaaaaccgaacgagccggtacctgccgtcagtgagggagggcagaaaagcgagactccactgtcacctccatgtgctgatagcgccacaagtgaggctgcaggccaaaggcctgtgcacccagctagcgtcccatcggtgccttcagtccagccatcacttttagaggacagtccccttgtgcaggctctgtccgggcttcacttgagcgctgaccgacttgaagatagcaataagttaaagcggtctttctcactcgacataaagtctgtatcctactctgctagtatggccgcttctttacatggctttagttcctcagaggatgccctggaatattacaagccttcaacaacacttgacggcaccaacaaactttgccagttttcacccgtacaggagttatctgagcagacccccgaaacgtccccagataaggaggaagcatccataccaaaaaagctgcagactgctcgtccaagcgactcacagtccaaacgattgcacagcgtccgcacctcctcctccggtactgctcagaggtctctgctttccccactgcacaggagtggctcggtagaagacaactaccacacaagctttttgtttggactatcgaccagccagcagcatctgaccaagtcagccggattgggcctgaagggatggcacagtgatatcctggcccctcagacatctacaccaagcctgacatctagttggtactttgcgacggagtcaagccacttctactcagcctctgcaatttatggaggttcggcgtcttattctgcctatagctgctctcagctacctacttgcggagatcaggtttattctgttcgcagaaggcagaaaccttcggacagagcagactctcggagaagctggcacgaagagtcacccttcgagaaacaatttaagcgccgatcatgccagatggaattcggcgaatcaattatgagcgagaatcggtctcgtgaggagctcggcaaggtcggaagtcaatcttcgttctcaggatccatggaaattatcgaggtgagctag

SEQ ID NO: 292323 - DNA, 1998 bp, Artificial Sequence
  derived and/or modified sequence
atggcccacgagatgatcggcacccagatcgtgaccgagagactggtggccctgctggagagcggcaccgagaaggtgctgctgatcgacagcagacccttcgtggagtacaacaccagccacatcctggaggccatcaacatcaactgcagcaagctgatgaagagaagactgcagcaggacaaggtgctgatcaccgagctgatccagcacagcgccaagcacaaggtggacatcgactgcagccagaaggtggtggtgtacgaccagagcagccaggacgtggccagcctgagcagcgactgcttcctgaccgtgctgctgggcaagctggagaagagcttcaacagcgtgcacctgctggccggcggcttcgccgagttcagcagatgcttccccggcctgtgcgagggcaagagcaccctggtgcccacctgcatcagccagccctgcctgcccgtggccaacatcggccccaccagaatcctgcccaacctgtacctgggctgccagagagacgtgctgaacaaggagctgatgcagcagaacggcatcggctacgtgctgaacgccagcaacacctgccccaagcccgacttcatccccgagagccacttcctgagagtgcccgtgaacgacagcttctgcgagaagatcctgccctggctggacaagagcgtggacttcatcgagaaggccaaggccagcaacggctgcgtgctggtgcactgcctggccggcatcagcagaagcgccaccatcgccatcgcctacatcatgaagagaatggacatgagcctggacgaggcctacagattcgtgaaggagaagagacccaccatcagccccaacttcaacttcctgggccagctgctggactacgagaagaagatcaagaaccagaccggcgccagcggccccaagagcaagctgaagctgctgcacctggagaagcccaacgagcccgtgcccgccgtgagcgagggcggccagaagagcgagacccccctgagccccccctgcgccgacagcgccaccagcgaggccgccggccagagacccgtgcaccccgccagcgtgcccagcgtgcccagcgtgcagcccagcctgctggaggacagccccctggtgcaggccctgagcggcctgcacctgagcgccgacagactggaggacagcaacaagctgaagagaagcttcagcctggacatcaagagcgtgagctacagcgccagcatggccgccagcctgcacggcttcagcagcagcgaggacgccctggagtactacaagcccagcaccaccctggacggcaccaacaagctgtgccagttcagccccgtgcaggagctgagcgagcagacccccgagaccagccccgacaaggaggaggccagcatccccaagaagctgcagaccgccagacccagcgacagccagagcaagagactgcacagcgtgagaaccagcagcagcggcaccgcccagagaagcctgctgagccccctgcacagaagcggcagcgtggaggacaactaccacaccagcttcctgttcggcctgagcaccagccagcagcacctgaccaagagcgccggcctgggcctgaagggctggcacagcgacatcctggccccccagaccagcacccccagcctgaccagcagctggtacttcgccaccgagagcagccacttctacagcgccagcgccatctacggcggcagcgccagctacagcgcctacagctgcagccagctgcccacctgcggcgaccaggtgtacagcgtgagaagaagacagaagcccagcgacagagccgacagcagaagaagctggcacgaggagagccccttcgagaagcagttcaagagaagaagctgccagatggagttcggcgagagcatcatgagcgagaacagaagcagagaggagctgggcaaggtgggcagccagagcagcttcagcggcagcatggagatcatcgaggtgagctag

SEQ ID NO: 292324 - DNA, 78 bp, Artificial Sequence
  derived and/or modified sequence
atggcccacgagatgatcggcacccagatcgtgaccgagagactggtggccctgctggagagcggcaccgagaagtag

SEQ ID NO: 292325 - DNA, 432 bp, Artificial Sequence
  derived and/or modified sequence
atggcacacgagatgatcggtactcaaatcgtcacggagcgcctggtagccttgctcgagagcggaactgaaaaagttctgctgatcgatagtcgaccatttgtcgagtacaataccagtcacattctcgaagcaatcaatatcaattgttcaaagctgatgaagaggaggctccagcaggataaagtgctgataaccgaacttattcagcactccgccaagcataaagtagatattgattgcagccagaaggtcgtcgtctacgatcagagttcgcaggatgtggcctccctcagttccgactgttttttgactgtacttttggggaagttggaaaaatcattcaatagcgtgcaccttcttgccggtgccgatgcagccgaatgggattggctgtgcgtgaagtgccagcagtatctgtccaaagcttag

SEQ ID NO: 292326 - DNA, 78 bp, Artificial Sequence
  derived and/or modified sequence
atggcgcacgagatgatcgggactcagatagtaacagaaaggctggtcgctctgctggagtctggtactgagaagtag

SEQ ID NO: 292327 - DNA, 432 bp, Artificial Sequence
  derived and/or modified sequence
atggcccacgagatgattggcacccagatcgtgacagagcggctggtggccctgctggagagcggcacagagaaggtgctgctgattgacagccggccctttgtggagtacaacaccagccacatcctggaggccatcaacatcaactgcagcaagctgatgaagaggcggctgcagcaggacaaggtgctgatcacagagctgatccagcacagcgccaagcacaaggtggacatcgactgcagccagaaggtggtggtgtatgaccagagcagccaggatgtggccagcctgagcagtgactgcttcctgactgtgctgctgggcaagctggagaagagcttcaacagcgtgcacctgctggccggggctgatgctgctgagtgggactggctgtgtgtgaagtgccagcagtacctgagcaaggcctag

SEQ ID NO: 292328 - DNA, 78 bp, Artificial Sequence
  derived and/or modified sequence
atggcccacgagatgattggcacccagatcgtgacagagcggctggtggccctgctggagagcggcacagagaagtag

SEQ ID NO: 292329 - DNA, 3568 bp, Artificial Sequence
  derived and/or modified sequence
ggaagagaaagagtgaagaaaagttgcgagcgtctcctctcttcctaagcctcccgccccaacccacccctcagagaaggagaagataatatactgaaaagaagaggaggaggagagcgacgggacgggacgcgagcgggagcgcagccgccctctcggctccgcggcggcgcctcgcaagtccgggaggcgaggggggcccgaggggagacgccgtgacaactttcgtttccctctgagggaattgggaggtcggcggccccaaaagctttcagtccagtgtaaagctgttggagcgcgggagcaaaggtaaagaatgatgtaatgcgctggctgctccaaagcatcttttgttgtggaatggttattccagtcatctctttatgaatcaaatgtgaggggctgctttgtggacggagtcctttgcaagagcacatcaacgggaaagagaaagagacattcacttggagggctcttgctgaaaatgggtttaactctccttttgccagtcaccaccagcctgacctcatacacttttagtacaatggagtggctgagcctttgagcacaccaccattacatcatcgtggcaaattaaagaaggaggtgggaaaagaggacttattgttgtcatggcccatgagatgattggaactcaaattgttactgagaggttggtggctctgctggaaagtggaacggaaaaagtgctgctaattgatagccggccatttgtggaatacaatacatcccacattttggaagccattaatatcaactgctccaagcttatgaagcgaaggttgcaacaggacaaagtgttaattacagagctcatccagcattcagcgaaacataaggttgacattgattgcagtcagaaggttgtagtttacgatcaaagctcccaagatgttgcctctctctcttcagactgttttctcactgtacttctgggtaaactggagaagagcttcaactctgttcacctgcttgcaggtgggtttgctgagttctctcgttgtttccctggcctctgtgaaggaaaatccactctagtccctacctgcatttctcagccttgcttacctgttgccaacattgggccaacccgaattcttcccaatctttatcttggctgccagcgagatgtcctcaacaaggagctgatgcagcagaatgggattggttatgtgttaaatgccagcaatacctgtccaaagcctgactttatccccgagtctcatttcctgcgtgtgcctgtgaatgacagcttttgtgagaaaattttgccgtggttggacaaatcagtagatttcattgagaaagcaaaagcctccaatggatgtgttctagtgcactgtttagctgggatctcccgctccgccaccatcgctatcgcctacatcatgaagaggatggacatgtctttagatgaagcttacagatttgtgaaagaaaaaagacctactatatctccaaacttcaattttctgggccaactcctggactatgagaagaagattaagaaccagactggagcatcagggccaaagagcaaactcaagctgctgcacctggagaagccaaatgaacctgtccctgctgtctcagagggtggacagaaaagcgagacgcccctcagtccaccctgtgccgactctgctacctcagaggcagcaggacaaaggcccgtgcatcccgccagcgtgcccagcgtgcccagcgtgcagccgtcgctgttagaggacagcccgctggtacaggcgctcagtgggctgcacctgtccgcagacaggctggaagacagcaataagctcaagcgttccttctctctggatatcaaatcagtttcatattcagccagcatggcagcatccttacatggcttctcctcatcagaagatgctttggaatactacaaaccttccactactctggatgggaccaacaagctatgccagttctcccctgttcaggaactatcggagcagactcccgaaaccagtcctgataaggaggaagccagcatccccaagaagctgcagaccgccaggccttcagacagccagagcaagcgattgcattcggtcagaaccagcagcagtggcaccgcccagaggtcccttttatctccactgcatcgaagtgggagcgtggaggacaattaccacaccagcttccttttcggcctttccaccagccagcagcacctcacgaagtctgctggcctgggccttaagggctggcactcggatatcttggccccccagacctctaccccttccctgaccagcagctggtattttgccacagagtcctcacacttctactctgcctcagccatctacggaggcagtgccagttactctgcctacagctgcagccagctgcccacttgcggagaccaagtctattctgtgcgcaggcggcagaagccaagtgacagagctgactcgcggcggagctggcatgaagagagcccctttgaaaagcagtttaaacgcagaagctgccaaatggaatttggagagagcatcatgtcagagaacaggtcacgggaagagctggggaaagtgggcagtcagtctagcttttcgggcagcatggaaatcattgaggtctcctgagaagaaagacacttgtgacttctatagacaatttttttttcttgttcacaaaaaaattccctgtaaatctgaaatatatatatgtacatacatatatatttttggaaaatggagctatggtgtaaaagcaacaggtggatcaacccagttgttactctcttaacatctgcatttgagagatcagctaatacttctctcaacaaaaatggaagggcagatgctagaatcccccctagacggaggaaaaccattttattcagtgaattacacatcctcttgttcttaaaaaagcaagtgtctttggtgttggaggacaaaatcccctaccattttcacgttgtgctactaagagatctcaaatattagtctttgtccggacccttccatagtacaccttagcgctgagactgagccagcttgggggtcaggtaggtagaccctgttagggacagagcctagtggtaaatccaagagaaatgatcctatccaaagctgattcacaaacccacgctcacctgacagccgagggacacgagcatcactctgctggacggaccattaggggccttgccaaggtctaccttagagcaaacccagtacctcagacaggaaagtcggggctttgaccactaccatatctggtagcccattttctaggcattgtgaataggtaggtagctagtcacacttttcagaccaattcaaactgtctatgcacaaaattcccgtgggcctagatggagataatttttttttcttctcagctttatgaagagaagggaaactgtctaggattcagctgaaccaccaggaacctggcaacatcacgatttaagctaaggttgggaggctaacgagtctacctccctctttgtaaatcaaagaattgtttaaaatgggattgtcaatcctttaaataaagatgaacttggtttcaa

SEQ ID NO: 292330 - DNA, 432 bp, Artificial Sequence
  derived and/or modified sequence
atggcccacgagatgatcggcacccagatcgtgaccgagcggctggtcgcactgttagagtcagggacagaaaaagtactactgatcgactctaggcctttcgttgagtacaacacatcacatatcctggaagctatcaatattaactgttccaagctgatgaaaaggcgacttcagcaggataaggtcctgatcaccgagctcatccagcattccgctaagcacaaggtagacatcgactgttcacagaaagtggttgtgtacgatcagtcctctcaagacgtggcttcgttaagctctgactgctttctcacagtcttgttggggaaacttgaaaaatcttttaatagcgtgcacctgctcgccggtgctgacgccgccgaatgggattggctttgcgtgaaatgccagcagtacctgtccaaagcctag

SEQ ID NO: 292331 - DNA, 78 bp, Artificial Sequence
  derived and/or modified sequence
atggcccacgagatgatcggcacccagatcgtgaccgagcggctggtggccctgctcgagtccgggaccgagaagtag

SEQ ID NO: 292332 - DNA, 432 bp, Artificial Sequence
  derived and/or modified sequence
atggcacatgaaatgataggaacgcaaattgtaacagagcgcctggtggccctgctagagtctggcaccgaaaaggtgttgctaattgacagccggcctttcgtagagtataacacctcccatattctggaggccattaatattaactgctcaaaattaatgaaaaggagattacagcaagataaggtacttattactgagttgatccagcatagtgccaagcataaagtcgacattgattgtagtcaaaaggtggttgtttacgaccagagttctcaagacgtggccagcctcagttctgattgcttcctgacagttcttctcggtaagttagaaaaatccttcaacagcgtgcatttattggctggcgcagatgccgcagagtgggactggctgtgcgtgaaatgtcaacagtatctgagcaaggcatag

SEQ ID NO: 292333 - DNA, 78 bp, Artificial Sequence
  derived and/or modified sequence
atggctcacgaaatgatcggtactcagatcgtgactgaacggttggtggcactgctggaatcgggcactgagaagtag

SEQ ID NO: 292334 - DNA, 566 bp, Artificial Sequence
  derived and/or modified sequence
aaaactctctgaagtttttatttacccagcgctctggctcccacttctgttttaaaagattataagtaaatactctgctctttcaagtgaaccaaacctatcaaacctgtttagaaaataaaccaggctttcagtccagtgtaaagctgttggagcgcgggagcaaaggtaaagaatgatgtaatgcgctggctgctccaaagcatcttttgttgtggaatggttattccagtcatctctttatgaatcaaatgtgaggggctgctttgtggacggagtcctttgcaagagcacatcaacgggaaagagaaagagacattcacttggagggctcttgctgaaaatgggtttaactctccttttgccagtcaccaccagcctgacctcatacacttttagtacaatggagtggctgagcctttgagcacaccaccattacatcatcgtggcaaattaaagaaggaggtgggaaaagaggacttattgttgtcatggcccatgagatgattggaactcaaattgttactgagaggttggtggctctgctggaaagtggaacggaaaaa

SEQ ID NO: 292335 - DNA, 432 bp, Artificial Sequence
  derived and/or modified sequence
atggcccacgagatgatcggcacccagatcgtgaccgagagactggtggccctgctggagagcggcaccgagaaggtgctgctgatcgacagcagacccttcgtggagtacaacaccagccacatcctggaggccatcaacatcaactgcagcaagctgatgaagagaagactgcagcaggacaaggtgctgatcaccgagctgatccagcacagcgccaagcacaaggtggacatcgactgcagccagaaggtggtggtgtacgaccagagcagccaggacgtggccagcctgagcagcgactgcttcctgaccgtgctgctgggcaagctggagaagagcttcaacagcgtgcacctgctggccggcgccgacgccgccgagtgggactggctgtgcgtgaagtgccagcagtacctgagcaaggcctag

SEQ ID NO: 292336 - protein, 281 aa, Artificial Sequence
  derived and/or modified sequence
MMSDASDMLAAALEQMDGIIAGSKALEYSNGIFDCQSPTSPFMGSLRALHLVEDLRGLLEMMETDEKEGLRCQIPDSTAETLVEWLQSQMTNGHLPGNGDVYQERLARLENDKESLVLQVSVLTDQVEAQGEKIRDLEFCLEEHREKVNATEEMLQQELLSRTSLETQKLDLMAEISNLKLKLTAVEKDRLDYEDKFRDTEGLIQEINDLRLKVSEMDSERLQYEKKLKSTKDELASLKEQLEEKESEVKRLQEKLVCKMKGEGVEIVDRDENFKKKLKEK

SEQ ID NO: 292337 - DNA, 513 bp, Artificial Sequence
  derived and/or modified sequence
atgatgagcgacgccagcgacatgctggccgccgccctggagcagatggacggcatcatcgccggcagcaaggccctggagtacagcaacggcatcttcgactgccagagccccaccagccccttcatgggcagcctgagagccctgcacctggtggaggacctgagaggcctgctggagatgatggagaccgacgagaaggagggcctgagatgccagatccccgacagcaccgccgagaccctggtggagtggctgcagagccagatgaccaacggccacctgcccggcaacggcgacgtgtaccaggagagactggccagactggagaacgacaaggagagcctggtgctgcaggtgagcgtgctgaccgaccaggtggaggcccagggcgagaagatcagagacctggagttctgcctggaggagcacagagagaaggtgaacgccaccgaggagatgctgcagcaggtgtgcgccgaggccagaaccaagatgggcttcccctgctag

SEQ ID NO: 292338 - DNA, 852 bp, Artificial Sequence
  derived and/or modified sequence
atgatgagcgacgccagcgacatgctggccgccgccctggagcagatggacggcatcatcgccggcagcaaggccctggagtacagcaacggcatcttcgactgccagagccccaccagccccttcatgggcagcctgagagccctgcacctggtggaggacctgagaggcctgctggagatgatggagaccgacgagaaggagggcctgagatgccagatccccgacagcaccgccgagaccctggtggagtggctgcagagccagatgaccaacggccacctgcccggcaacggcgacgtgtaccaggagagactggccagactggagaacgacaaggagagcctggtgctgcaggccatggtgagcgtgctgaccgaccaggtggaggcccagggcgagaagatcagagacctggagttctgcctggaggagcacagagagaaggtgaacgccaccgaggagatgctgcagcaggagctgctgagcagaaccagcctggagacccagaagctggacctgatggccgagatcagcaacctgaagctgaagctgaccgccgtggagaaggacagactggactacgaggacaagttcagagacaccgagggcctgatccaggagatcaacgacctgagactgaaggtgagcgagatggacagcgagagactgcagtacgagaagaagctgaagagcaccaaggacgagctggccagcctgaaggagcagctggaggagaaggagagcgaggtgaagagactgcaggagaagctggtgtgcaagatgaagggcgagggcgtggagatcgtggacagagacgagaacttcaagaagaagctgaaggagaagtag

SEQ ID NO: 292339 - DNA, 846 bp, Artificial Sequence
  derived and/or modified sequence
atgatgagcgacgccagcgacatgctggccgccgccctggagcagatggacggcatcatcgccggcagcaaggccctggagtacagcaacggcatcttcgactgccagagccccaccagccccttcatgggcagcctgagagccctgcacctggtggaggacctgagaggcctgctggagatgatggagaccgacgagaaggagggcctgagatgccagatccccgacagcaccgccgagaccctggtggagtggctgcagagccagatgaccaacggccacctgcccggcaacggcgacgtgtaccaggagagactggccagactggagaacgacaaggagagcctggtgctgcaggtgagcgtgctgaccgaccaggtggaggcccagggcgagaagatcagagacctggagttctgcctggaggagcacagagagaaggtgaacgccaccgaggagatgctgcagcaggagctgctgagcagaaccagcctggagacccagaagctggacctgatggccgagatcagcaacctgaagctgaagctgaccgccgtggagaaggacagactggactacgaggacaagttcagagacaccgagggcctgatccaggagatcaacgacctgagactgaaggtgagcgagatggacagcgagagactgcagtacgagaagaagctgaagagcaccaaggacgagctggccagcctgaaggagcagctggaggagaaggagagcgaggtgaagagactgcaggagaagctggtgtgcaagatgaagggcgagggcgtggagatcgtggacagagacgagaacttcaagaagaagctgaaggagaagtag

SEQ ID NO: 292340 - DNA, 513 bp, Artificial Sequence
  derived and/or modified sequence
atgatgtcagatgcttctgatatgctagctgcggctctcgaacaaatggacggtataatcgcaggatccaaggctttggaatacagcaatgggattttcgattgccagtccccaacgtcaccatttatggggagtcttcgagcactccacctggtggaagacctgcggggactgctcgagatgatggagaccgacgaaaaggaaggcctcaggtgtcagatacctgactctactgccgaaacacttgttgagtggcttcagtcgcagatgacgaatggacacctgccaggcaacggtgatgtctaccaggagagactggcgcgacttgagaacgataaagaatctctggtgctacaagtgagcgtgcttaccgaccaagtggaagcccagggagagaagatccgggacttggagttctgtctggaggaacatcgtgagaaagttaatgcaaccgaagaaatgctccagcaagtgtgcgcagaagctcggacgaaaatggggttcccgtgctag

SEQ ID NO: 292341 - DNA, 852 bp, Artificial Sequence
  derived and/or modified sequence
atgatgagcgacgctagtgacatgctggctgcagccctcgagcagatggacggcattattgcaggaagtaaggccctcgaatatagcaacggcatttttgattgtcagtcgcctacatcaccgtttatgggcagcctgcgcgctctgcacctggtggaggacctaaggggtttgctggagatgatggaaaccgatgagaaagagggcctcaggtgtcagattcctgattcgacggccgaaactttggtggagtggctgcagagccagatgacaaacgggcatctgccagggaacggagatgtgtaccaagagaggctggctaggttagagaatgataaggagtcactggtccttcaggcaatggtctcagtgctaacagatcaggtggaggcgcaaggagagaaaatccgtgaccttgaattttgcctggaagagcatcgggagaaggttaatgccaccgaagagatgctgcagcaggagttgctgtcgcgtacctcacttgaaacccagaaattggacttgatggctgaaatctcaaatctaaagttaaagctcactgccgtcgaaaaagatcgccttgattatgaggataaatttcgcgatactgagggactgatccaagagattaatgatctgcggttgaaggtgtctgaaatggatagcgaaaggcttcaatatgagaaaaagctcaagtcaaccaaggatgaattggcatccctgaaagagcagttggaggaaaaggaatccgaggtgaaacggctgcaggagaaattggtgtgcaaaatgaaaggcgaaggcgttgaaattgtagaccgcgacgagaatttcaagaagaagctcaaggagaagtag

SEQ ID NO: 292342 - DNA, 846 bp, Artificial Sequence
  derived and/or modified sequence
atgatgtccgatgcaagtgatatgttggccgcagcgctggagcagatggatgggatcatagcaggaagtaaagctctggagtatagcaacggtatcttcgactgccagagcccgacctcccctttcatgggctcattgcgggctttgcacctggtggaggatcttcgcggactcctggaaatgatggaaaccgatgagaaagagggcctacggtgccagatccccgacagcacagccgaaacccttgtagaatggcttcagtcacagatgaccaacggtcaccttcccggtaatggagatgtgtaccaggaacggttggctcgactcgaaaatgataaggagtcactggtactgcaagtctctgttctgacagatcaggttgaggcgcagggcgaaaagatccgtgaccttgagttctgtttagaggaacacagggaaaaagtcaacgccacagaggaaatgctgcaacaggaactgctgtctcggacatccctggagacccagaagctggacttaatggcggagatctccaacctgaagctgaaacttacagcggtggaaaaggacagacttgactatgaggataaattccgcgacacagaggggcttatacaggagatcaacgacctgcggctcaaggtgtcggagatggactctgaacggctgcagtatgaaaagaagctgaagtcaacaaaagatgaattagcgagcctgaaggagcagcttgaagagaaggagagcgaggtgaaaagacttcaagagaaactggtctgcaagatgaagggagaaggcgtggagattgtggaccgggatgagaacttcaagaaaaagctgaaggagaaatag

SEQ ID NO: 292343 - DNA, 513 bp, Artificial Sequence
  derived and/or modified sequence
atgatgtctgatgccagtgacatgctggccgccgccctggagcagatggatggcatcatcgccggcagcaaggccctggagtacagcaatggcatctttgactgccagagccccaccagccccttcatgggcagcctgcgggccctgcacctggtggaggacctgcggggcctgctggagatgatggagacagatgagaaggagggcctgcgctgccagatcccagacagcacagctgagaccctggtggagtggctgcagagccagatgaccaacggccacctgcctggaaatggagatgtgtaccaggagcggctggcccggctggagaatgacaaggagagcctggtgctgcaggtgtctgtgctgacagaccaggtggaggcccagggcgagaagatccgggacctggagttctgcctggaggagcaccgggagaaggtgaatgccacagaggagatgctgcagcaggtgtgtgccgaggcccggaccaagatgggcttcccctgctag

SEQ ID NO: 292344 - DNA, 852 bp, Artificial Sequence
  derived and/or modified sequence
atgatgtctgatgccagtgacatgctggccgccgccctggagcagatggatggcatcatcgccggcagcaaggccctggagtacagcaatggcatctttgactgccagagccccaccagccccttcatgggcagcctgcgggccctgcacctggtggaggacctgcggggcctgctggagatgatggagacagatgagaaggagggcctgcgctgccagatcccagacagcacagctgagaccctggtggagtggctgcagagccagatgaccaacggccacctgcctggaaatggagatgtgtaccaggagcggctggcccggctggagaatgacaaggagagcctggtgctgcaggccatggtgtctgtgctgacagaccaggtggaggcccagggcgagaagatccgggacctggagttctgcctggaggagcaccgggagaaggtgaatgccacagaggagatgctgcagcaggagctgctgagcaggaccagcctggagacccagaagctggacctgatggccgagatcagcaacctgaagctgaagctgacagctgtggagaaggaccggctggactatgaggacaagttccgggacacagagggcctcatccaggagatcaatgacctgcggctgaaggtgtctgagatggattctgagcggctgcagtatgagaagaagctgaagagcaccaaggatgagctggccagcctgaaggagcagctggaggagaaggagagcgaggtgaagaggctgcaggagaagctggtgtgcaagatgaagggggagggcgtggagatcgtggacagagatgagaacttcaagaagaagctgaaggagaagtag

SEQ ID NO: 292345 - DNA, 846 bp, Artificial Sequence
  derived and/or modified sequence
atgatgtctgatgccagtgacatgctggccgccgccctggagcagatggatggcatcatcgccggcagcaaggccctggagtacagcaatggcatctttgactgccagagccccaccagccccttcatgggcagcctgcgggccctgcacctggtggaggacctgcggggcctgctggagatgatggagacagatgagaaggagggcctgcgctgccagatcccagacagcacagctgagaccctggtggagtggctgcagagccagatgaccaacggccacctgcctggaaatggagatgtgtaccaggagcggctggcccggctggagaatgacaaggagagcctggtgctgcaggtgtctgtgctgacagaccaggtggaggcccagggcgagaagatccgggacctggagttctgcctggaggagcaccgggagaaggtgaatgccacagaggagatgctgcagcaggagctgctgagcaggaccagcctggagacccagaagctggacctgatggccgagatcagcaacctgaagctgaagctgacagctgtggagaaggaccggctggactatgaggacaagttccgggacacagagggcctcatccaggagatcaatgacctgcggctgaaggtgtctgagatggattctgagcggctgcagtatgagaagaagctgaagagcaccaaggatgagctggccagcctgaaggagcagctggaggagaaggagagcgaggtgaagaggctgcaggagaagctggtgtgcaagatgaagggggagggcgtggagatcgtggacagagatgagaacttcaagaagaagctgaaggagaagtag

SEQ ID NO: 292346 - DNA, 513 bp, Artificial Sequence
  derived and/or modified sequence
atgatgagcgacgccagcgacatgctggccgccgccctggagcagatggatggaatcatagctgggtccaaggcactagaatactccaacggcatctttgactgccagtcacccacatcacccttcatgggctccttacgcgcactgcatctcgtcgaagacttgaggggactcttagaaatgatggaaactgacgaaaaagagggcttgcgttgccagatcccagacagcactgccgagaccctagtggagtggctgcaatctcagatgacaaacggacatctgccaggtaacggcgacgtctatcaggaaaggctggcgcgcctagaaaatgacaaagagtctctagtgttgcaggttagtgtgctcaccgatcaggttgaggcccagggggagaaaattagggacctagaattctgcctggaagaacaccgtgaaaaggtcaatgccaccgaggagatgctgcagcaggtgtgcgccgaggccagaaccaagatgggcttcccatgttag

SEQ ID NO: 292347 - DNA, 852 bp, Artificial Sequence
  derived and/or modified sequence
atgatgagcgacgccagcgacatgctggccgccgccctggagcagatggacggcataattgcaggaagcaaagcactggagtactcaaacggcatctttgactgtcagagtcctacctcccctttcatgggcagcctccgggcactgcatctggtcgaagatttgcgaggactgctcgaaatgatggaaaccgacgagaaagaaggactccgctgccaaataccagacagtaccgcagagacgctggtggaatggcttcagagccaaatgaccaatggtcacctaccaggcaacggcgacgtctatcaagagagactggcgaggctggaaaatgacaaggaaagtctggtcctccaggctatggttagcgtcctaaccgaccaggtggaggctcagggagaaaagatacgcgacttggagttctgcctcgaggagcatagagaaaaggttaatgcaaccgaggagatgctgcagcaggagttactgagccgtacaagtctggagacgcagaagctggatcttatggctgagatttcaaatctaaagcttaaactgaccgcagttgaaaaagatcggttggattatgaggataaatttagagatacagaaggcctgattcaggagatcaatgatctgcggctaaaagtatcagaaatggactcagagcgcctgcagtacgaaaagaagttaaaaagcaccaaagatgaactggcttctttgaaagagcagctcgaggagaaagagtctgaggtgaagaggttacaggagaagctggtatgcaagatgaagggagagggcgtcgaaattgtggatcgtgatgagaacttcaaaaaaaaactaaaggagaaatag

SEQ ID NO: 292348 - DNA, 846 bp, Artificial Sequence
  derived and/or modified sequence
atgatgagcgacgccagcgacatgctggccgccgccctggagcagatggatggtatcatagctggcagtaaggctctggagtactcaaatgggattttcgattgccaaagccctactagcccattcatggggtcactgagggccctgcatctggtcgaggatttgagaggacttctggagatgatggaaacagacgagaaagagggactgagatgccagattccagactctaccgccgagacactcgtcgaatggttacaatcacagatgactaacggtcacctacccggtaatggagacgtctaccaggaaagactggcacggcttgagaacgataaagaatccctggttctgcaagttagcgtactaacagaccaagtggaggctcagggcgaaaagatcagggatttggagttttgtctggaagagcaccgggaaaaagttaacgcaaccgaggagatgttgcagcaggagctcctgagtcgcactagcctggagacccagaagctggatcttatggccgaaatctcaaacctcaaactgaagctgactgccgtggagaaggacaggttagactatgaggataaatttagagacactgaaggcttaatccaggagatcaacgacttaaggctgaaggtctctgaaatggactccgaacggctgcagtatgagaagaaattgaagagtacaaaagatgagctcgcctctctcaaggagcagctggaggagaaagaatcagaagtaaagcgtctgcaggaaaagttggtttgtaagatgaaaggcgagggagtggaaatcgtggacagggacgagaacttcaaaaagaaattgaaggaaaaatag

SEQ ID NO: 292349 - DNA, 875 bp, Artificial Sequence
  derived and/or modified sequence
gtgtagtgcaggcagggtggggaaaggacggggaaggactcgtgtgctgcgagctggcggccgggccggagtgctggggctttgaactccgagaggaggtggaccagaacttttggaactagtgccggcggctctccaccccccagtataaaagaacgtgtggatcactttgctgagtacatccaagatttgaagaactgaaataaatcagctttaaacctgctttttaaaaatatctgggttggaatttgcccctgacaaataataaaatgatgagtgatgcaagtgacatgttggctgcagcgttggagcagatggatggtatcatagcaggttctaaggctctggaatattccaatgggatttttgattgccaatctcccacctctccattcatgggaagtttgcgagctctgcaccttgtggaagacctgcgtggattgttagagatgatggaaacagatgagaaagaaggcttgagatgccagatcccagattcaacagcagaaacgcttgttgaatggcttcagagtcaaatgacaaatggacacctaccagggaacggagatgtgtatcaagaaaggctggcacgtttagaaaatgataaagaatccctcgttcttcaggtaagtgtgttaacagaccaggtggaggctcagggagagaagattcgagatttggagttttgtcttgaagagcacagagagaaggtgaatgccacagaagaaatgctgcagcaggtatgtgcagaggccagaaccaagatgggatttccctgctgaactatgtgagatgctgcatttctatgttgtgtttgctctgatgcagcagtaagtttcttgattcatttagaccagcacattaaaaaaaaaaaa

SEQ ID NO: 292350 - DNA, 609 bp, Artificial Sequence
  derived and/or modified sequence
tgtgtgcattgaaacagcagccttaaggtctttaaacggggaaatacatttttcttgcttcagagattcaattttacttgcccgagaagcttgtgtggtgtgattttcatcgctaaaagcaacagcagccacatggctgacaacaccaccacttaacaattcaaagctcggtcaccgttttcaggagtctcttccaaatctttctgaagtgcttttgaagttctacattccccgtctaagggaacacccagcagtcccaggataaaagggcagaaggtataaaagaacgtgtggatcactttgctgagtacatccaagatttgaagaactgaaataaatcagctttaaacctgctttttaaaaatacaaatggacacctaccagggaacggagatgtgtatcaagaaaggctggcacgtttagaaaatgataaagaatccctcgttcttcaggtaagtgtgttaacagaccaggtggaggctcagggagagaagattcgagatttggagttttgtcttgaagagcacagagagaaggtgaatgccacagaagaaatgctgcagcaggagcttctaagtaggacatccttagaaactcagaagttggatc

SEQ ID NO: 292351 - DNA, 1191 bp, Artificial Sequence
  derived and/or modified sequence
ggcagtgggagggggaggtacctggaactgggagtgatgtcagctcccagctcggtgcctgcccggattcctgacatggtgtagtgcaggcagggtggggaaaggacggggaaggactcgtgtgctgcgagctggcggccgggccggagtgctggggctttgaactccgagaggaggtggaccagaacttttggaactagtgccggcggctctccaccccccagtataaaagaacgtgtggatcactttgctgagtacatccaagatttgaagaactgaaataaatcagctttaaacctgctttttaaaaatatctgggttggaatttgcccctgacaaataataaaatgatgagtgatgcaagtgacatgttggctgcagcgttggagcagatggatggtatcatagcaggttctaaggctctggaatattccaatgggatttttgattgccaatctcccacctctccattcatgggaagtttgcgagctctgcaccttgtggaagacctgcgtggattgttagagatgatggaaacagatgagaaagaaggcttgagatgccagatcccagattcaacagcagaaacgcttgttgaatggcttcagagtcaaatgacaaatggacacctaccagggaacggagatgtgtatcaagaaaggctggcacgtttagaaaatgataaagaatccctcgttcttcaggtaagtgtgttaacagaccaggtggaggctcagggagagaagattcgagatttggagttttgtcttgaagagcacagagagaaggtgaatgccacagaagaaatgctgcagcaggagcttctaagtaggacatccttagaaactcagaagttggatctgatggctgaaatatctaacttgaagttgaaactgacagctgtagagaaggacagattggattatgaagataagttcagagacacagaggggctgattcaggagatcaatgatttgaggttaaaagttagtgaaatggacagtgagagacttcagtatgaaaaaaagcttaaatcaaccaaagatgaactggcatctttaaaagaacaactagaagaaaaggaatctgaagtaaaaaggctacaagaaaaattggtttgcaagatgaaaggagaaggggttgaaattgttgatagagatgaaaattttaaaaagaagctcaaagaaaaaa

SEQ ID NO: 292352 - DNA, 513 bp, Artificial Sequence
  derived and/or modified sequence
atgatgagtgatgccagtgacatgctcgccgctgcactggagcagatggatgggattatcgcgggatccaaggcactagagtatagcaacggaatctttgactgtcagtcacccacatcaccattcatgggcagcctaagagcattgcacctggtcgaggatctccgtggactcctcgaaatgatggagaccgatgagaaggagggcctgagatgccaaatacccgacagcaccgcagagactcttgtggagtggttgcagagccagatgaccaacgggcacctgccagggaatggagatgtctatcaggaaagactggcgcgtcttgaaaatgacaaggagtccctggtgctgcaggtcagcgttctcacggaccaagtggaagctcagggcgaaaagatcagggacttggagttctgtctcgaggagcaccgcgagaaggtgaatgctacagaggagatgctgcaacaagtgtgcgctgaagctcggacaaagatggggttcccatgttag

SEQ ID NO: 292353 - DNA, 852 bp, Artificial Sequence
  derived and/or modified sequence
atgatgagtgatgcctctgatatgttggctgccgctctcgagcaaatggacggaatcattgcgggatcgaaggccctggagtactcgaatggcatatttgactgccagagccctacttccccatttatgggctctctgcgcgctctacatttggttgaggacctgagagggctgctagagatgatggagaccgacgaaaaagagggactgagatgtcagatacccgactccacagccgaaacgttagtagagtggctccaatcccagatgaccaatggtcatcttcccggaaatggagacgtctatcaggagcgattggcccgactcgaaaatgataaagaaagtttagtgctgcaggccatggtttctgtacttactgatcaggttgaggcacaaggagaaaagatccgggacctagagttttgcttggaggaacaccgggagaaggtcaatgccactgaggagatgctacaacaggagcttctcagccgaactagcttagaaacgcagaaactggacctcatggccgagatatctaatctgaagcttaagttgacggccgtcgaaaaggaccggcttgactacgaggacaagtttcgcgacaccgaggggttaatccaggagatcaacgatctgcggctcaaagtgagcgaaatggatagcgaacgtctccagtatgagaagaaacttaagagtactaaggatgaacttgcctcattgaaggaacagctcgaggaaaaagagtcagaagtgaagcgactgcaggagaagctagtgtgcaaaatgaagggcgagggcgtggaaatcgtagaccgggacgaaaattttaagaaaaaacttaaggagaaatag

SEQ ID NO: 292354 - DNA, 846 bp, Artificial Sequence
  derived and/or modified sequence
atgatgagcgacgcgagcgacatgctcgcagctgccctcgagcaaatggacggcatcatcgccggtagcaaagctttggagtattccaacggcatcttcgattgccagtccccaactagcccattcatgggaagccttagggccttacacctggtagaggacctcagaggcctcctagagatgatggagactgacgagaaggaggggttacggtgccagattccggactctacagctgaaaccctggttgagtggctacagagtcagatgacaaacgggcatctgccgggtaacggcgacgtctaccaggagaggctggctcgcctggaaaatgacaaggagtccctcgtccttcaggtgtctgttttgacagatcaggtagaggcacagggggagaagattagagaccttgaattttgtttggaagaacatagggagaaggtgaatgctaccgaggaaatgctgcaacaggaactgttatcccgaactagtttagagactcagaagctcgacctgatggcagagatttccaatttaaagctcaagctcacagctgtcgaaaaggaccgtctggattacgaagacaaatttcgggatactgaagggctgattcaggaaatcaatgacctgcgacttaaggtctccgagatggatagtgaacgccttcagtacgaaaagaaactgaagtccactaaagatgagttggcttcattaaaggaacaattggaggagaaggagtcagaggttaagcggttgcaggagaagctggtctgtaaaatgaaaggcgaaggggtcgagatcgttgacagggatgaaaactttaagaagaagcttaaggagaaatag

SEQ ID NO: 292355 - DNA, 417 bp, Artificial Sequence
  derived and/or modified sequence
atggaaaggttcttgaactccaaagccaggaggctgggttcatgttcccacccagcgttctatctgctctgtgtacccgatgaagatacctcgtgttctaccatttatctaccactgaagcgccgggctgatccagatcagctcttctctgacctgcttggcggaacacagcggttatggagtaataggtttggaaatgaggagtcctttccaggcagggtacgggccctggtggataccttctgctggatcgccagagctccccctttgggtaatcctcttcggctggaagagagaattgcttggcggatccagcgccttaagagcggacagacagccctgatcgagaagaagaagcagaagattgaggaggatgtgaggcaccaatgtcaacagactacatgcgatcgctgctag

SEQ ID NO: 292356 - protein, 407 aa, Artificial Sequence
  derived and/or modified sequence
MVLAAPLLLGFLLLALELRPRGEAAEGPAAAAAAAAAAAAAGVGGERSSRPAPSVAPEPDGCPVCVWRQHSRELRLESIKSQILSKLRLKEAPNISREVVKQLLPKAPPLQQILDLHDFQGDALQPEDFLEEDEYHATTETVISMAQETDPAVQTDGSPLCCHFHFSPKVMFTKVLKAQLWVYLRPVPRPATVYLQILRLKPLTGEGTAGGGGGGRRHIRIRSLKIELHSRSGHWQSIDFKQVLHSWFRQPQSNWGIEINAFDPSGTDLAVTSLGPGAEGLHPFMELRVLENTKRSRRNLGLDCDEHSSESRCCRYPLTVDFEAFGWDWIIAPKRYKANYCSGQCEYMFMQKYPHTHLVQQANPRGSAGPCCTPTKMSPINMLYFNDKQQIIYGKIPGMVVDRCGCS

SEQ ID NO: 292357 - protein, 380 aa, Artificial Sequence
  derived and/or modified sequence
  misc_feature (1)..(1): Xaa can be any naturally occurring amino acid
XAAAAAAAAAAAAAGVGGERSSRPAPSVAPEPDGCPVCVWRQHSRELRLESIKSQILSKLRLKEAPNISREVVKQLLPKAPPLQQILDLHDFQGDALQPEDFLEEDEYHATTETVISMAQETDPAVQTDGSPLCCHFHFSPKVMFTKVLKAQLWVYLRPVPRPATVYLQILRLKPLTGEGTAGGGGGGRRHIRIRSLKIELHSRSGHWQSIDFKQVLHSWFRQPQSNWGIEINAFDPSGTDLAVTSLGPGAEGLHPFMELRVLENTKRSRRNLGLDCDEHSSESRCCRYPLTVDFEAFGWDWIIAPKRYKANYCSGQCEYMFMQKYPHTHLVQQANPRGSAGPCCTPTKMSPINMLYFNDKQQIIYGKIPGMVVDRCGCS

SEQ ID NO: 292358 - DNA, 1224 bp, Artificial Sequence
  derived and/or modified sequence
atggtgctggcagcaccccttctgttgggattcctgctgctggccctcgagctcaggcccaggggcgaagccgcagaaggccccgccgctgcagcggccgcagccgccgccgccgctgccgccggtgtcggaggcgaacggtcctctcgtccagcacctagtgtcgctccagagcctgacgggtgccccgtgtgtgtttggagacagcacagtcgtgagctcaggcttgaaagcattaagagccagatcctttccaagttacgcctgaaagaagcaccgaatatctccagggaggtcgtgaagcagctcctccccaaggcacctcctcttcaacagatcctggaccttcacgatttccagggagacgcattgcagccagaggattttctcgaggaagacgaataccatgcaactacagaaactgttatatccatggcgcaggagacggatccagctgtacagaccgacggtagccctctgtgctgtcattttcacttcagcccgaaagtcatgttcacaaaagtgctgaaggcacagctttgggtgtacctgcgtcccgtgcccaggcctgctacagtgtatttgcagatcttgagactgaagccattgacaggagagggcaccgctggcggagggggggggggaagaagacacatacgtattcgaagtctgaagattgagctgcactcccgaagcggccactggcagtctatcgacttcaagcaggtactgcactcttggtttcgccagccgcaatccaattggggcatagaaatcaatgcatttgacccgagcggaacagacctggccgtgaccagcctgggacctggagcagagggcctccatccttttatggagcttagggttctggaaaacaccaaacggtcacgccggaacctcggactggactgtgatgagcattctagcgagagcaggtgttgccgttaccccctgaccgtggactttgaagcttttgggtgggactggattattgctcctaaacgttataaggccaactactgttcaggtcaatgtgagtacatgttcatgcagaagtatccgcacacacacctggtgcagcaggcaaaccctcgcggatcagccggcccatgctgtacaccgacaaaaatgtcaccgatcaacatgctgtacttcaatgacaagcagcaaatcatatatggaaaaatccctggaatggtcgtcgacagatgtggttgcagctag

SEQ ID NO: 292359 - DNA, 1143 bp, Artificial Sequence
  derived and/or modified sequence
taggccgcggctgcagccgccgccgctgcggccgccgcagccggagtcggcggtgaacggagttctcgtccagcaccatccgtagcccctgagcccgatggatgccctgtgtgcgtgtggagacaacactcccgggaactcaggctggagtcaatcaagagccaaatcctgtccaagctaagacttaaagaggcccctaatatcagcagagaagtggtaaagcagctcctgccaaaagccccaccccttcagcagatcctcgaccttcacgacttccagggagatgccctgcagccagaagactttctcgaggaggacgagtaccatgccactacggagactgttatttcaatggcgcaggaaaccgatcctgccgtacagaccgacgggagccccctttgttgccattttcatttctcccccaaggttatgtttactaaggtgctgaaggcccagctctgggtttatctgcgtcctgttccacggcccgccacagtgtacctgcaaatactacgcttgaaaccattaactggcgaaggcactgcaggcgggggaggagggggtagacgacacatcaggatacgatccctgaaaattgaactgcacagcaggtctggccactggcagtccattgactttaaacaggtgctgcattcctggttccgccaaccacaaagcaattggggtattgaaatcaacgcgttcgaccccagtggaactgatttggccgtaacctccctaggccctggcgctgagggcttacacccctttatggagctgcgcgtcctggagaacacaaaacggtcaagacggaaccttggcctggactgtgatgagcactcatcagagtcacggtgttgtagatatcccctgaccgtggatttcgaggcttttggttgggactggatcatcgctccgaagaggtacaaagccaactattgttcgggccaatgtgaatacatgtttatgcagaaatacccccacacgcaccttgtgcaacaagctaaccctcggggtagcgctggtccttgttgtacccccacaaaaatgagtcccattaacatgctgtacttcaatgataagcagcagatcatatatggcaagatccccggaatggtcgtcgacaggtgcggttgcagttag

SEQ ID NO: 292360 - DNA, 3731 bp, Artificial Sequence
  derived and/or modified sequence
tccccgccccccagtcctccctcccctcccctccagcatggtgctcgcggccccgctgctgctgggcttcctgctcctcgccctggagctgcggccccggggggaggcggccgagggccccgcggcggcggcggcggcggcggcggcggcggcagcggcgggggtcgggggggagcgctccagccggccagccccgtccgtggcgcccgagccggacggctgccccgtgtgcgtttggcggcagcacagccgcgagctgcgcctagagagcatcaagtcgcagatcttgagcaaactgcggctcaaggaggcgcccaacatcagccgcgaggtggtgaagcagctgctgcccaaggcgccgccgctgcagcagatcctggacctacacgacttccagggcgacgcgctgcagcccgaggacttcctggaggaggacgagtaccacgccaccaccgagaccgtcattagcatggcccaggagacggacccagcagtacagacagatggcagccctctctgctgccattttcacttcagccccaaggtgatgttcacaaaggtactgaaggcccagctgtgggtgtacctacggcctgtaccccgcccagccacagtctacctgcagatcttgcgactaaaacccctaactggggaagggaccgcagggggagggggcggaggccggcgtcacatccgtatccgctcactgaagattgagctgcactcacgctcaggccattggcagagcatcgacttcaagcaagtgctacacagctggttccgccagccacagagcaactggggcatcgagatcaacgcctttgatcccagtggcacagacctggctgtcacctccctggggccgggagccgaggggctgcatccattcatggagcttcgagtcctagagaacacaaaacgttcccggcggaacctgggtctggactgcgacgagcactcaagcgagtcccgctgctgccgatatcccctcacagtggactttgaggctttcggctgggactggatcatcgcacctaagcgctacaaggccaactactgctccggccagtgcgagtacatgttcatgcaaaaatatccgcatacccatttggtgcagcaggccaatccaagaggctctgctgggccctgttgtacccccaccaagatgtccccaatcaacatgctctacttcaatgacaagcagcagattatctacggcaagatccctggcatggtggtggatcgctgtggctgctcttaaggtgggggatagaggatgcctcccccacagaccctaccccaagacccctagccctgcccccatccccccaagccctagagctccctccactcttcccgcgaacatcacaccgttccccgaccaagccgtgtgcaatacaacagagggaggcaggtgggaattgagggtgaggggtttgggggaaaggggaagcaggggcatagtcagggtggggagtgtttgaagtttgcagatgagaaggtttgacaaaaagacagagagatgtagagacagtgatagagacagaggaacaaaaagagcagcagtgagaaggcaaagagagaggcagaagagacagacgaggcagagacaaaacactgagaaagagactgaaatggagtaataaatgaaagccccacaccaagcctcctttcttccactggcaaggtgaggggcttggtatagtttggggagatcccctgactattcagtaggagaagaaatcaaaaatccattcttttctccttctctccctccaacagtggccaggggaaggggaagtgagggcaggggcaaaaagatttgggaatttttatttatttatttattgtgacttttcatttttttggtatttggctttactggaataggagggcccctgcccactgtgccccgtttatcccttattccccaaaccctgctctccccaacacctactcacttaagcacttgtataaagcctccagggttgggaatgggagtaaagggcaagagggcggacacatgaagtttagtttctaacccatcatcaccctaactcaaccttttctgagccaaatggcttgaattgaagccagttgtcatggaaatagtaagaggttagggtttaagagctggggatgcgggggtgggagagagaaccctcaacatccaggatctatataatgagagctactttaaaccctcaggtccaccctcatgatgctgagttatttagccagagggtgcagcctgcttatgcccaaattccctcagccaagagagagaccaaagagcctctggaatggccctgctcccagcctctatcttcaggtcaattagagagagtatagagaccccagagtcccctgggtctggaaagcgttaggagaggtcaagaaaggagcagtaaggaggctgaaggttacagggcatttgaatccaaatcactgctctgggctagggaatagagccagcagaccaaggtgggaaggattctggaagggggacattttagtctcctaaccccaaagctcagggtggaagaggggagaacaaggaagcagagtgtataattattttttccttttatttttggaatctaacagtacctggcagcagggaggggaaagtacagtggggaaaagcatctgacaaggccagttagaacagaggatgggaaggatggagactcccgggcttggaaggctaggaagcaggcagagactggttgccatttcaagtcactagctaggcccattcattcctcccacaaccctgacccattctcctctggactcactgtgcctcagtttcttcccctcaatggaatgagaaatgacagcacccgccacagccaagagatgaattctgagcacttaccacgggcactttatggacataaaatacctctcgctgtgggacagataaccagggcaccagagtagtggtgaagagatgtgaggcttaagaggagtcacaggcttcagagtacaagttcccctctgcctcccagctggacagtgcctagaagccaaggagttgagaatctcctgatccacaccctatccttacttcaccaccaggcctcttggctccaggcaagagcttagaggatgtcaggagaggtgggggtaagaatcttcagcaaaactgtcactctaagtagagccagcagttacgggtctgataaaaacagtactgaactaaagtaaagcccaagctggtgagcaaaactggatggctcattcttcccaagagcatgactctcccccttggccagttggtggaaggggcaaaggtatgtgaccacccttgagaaggtgatgttggtgagctttaacatcttattcctattcttatagtgagaaagtgaaacaagatctttcagtagaggaatgggcagggctgttaggctcttcagcttgccttcacccatatagcagctatgctaaccccaagcctctctggccctgttcttcatccttccttctgccccaatcctgaaggacaagacacacccggccatcaacaccactcacatttccttggtggaaggaaaggaacagagaagtgaagaacagatacctccctccaaggtcaaatgcctcgtgatcttggcagagtagggattgggcaataagcatcaggtatcttccctctacagattctagagagctggggcattaaatatgggggacacttagaatacagctccttaaataccaccaaa

SEQ ID NO: 292361 - DNA, 1258 bp, Artificial Sequence
  derived and/or modified sequence
ccgcggcggcggcggcggcggcggcggcggcggcagcggcgggggtcgggggggagcgctccagccggccagccccgtccgtggcgcccgagccggacggctgccccgtgtgcgtttggcggcagcacagccgcgagctgcgcctagagagcatcaagtcgcagatcttgagcaaactgcggctcaaggaggcgcccaacatcagccgcgaggtggtgaagcagctgctgcccaaggcgccgccgctgcagcagatcctggacctacacgacttccagggcgacgcgctgcagcccgaggacttcctggaggaggacgagtaccacgccaccaccgagaccgtcattagcatggcccaggagacggacccagcagtacagacagatggcagccctctctgctgccattttcacttcagccccaaggtgatgttcacaaaggtactgaaggcccagctgtgggtgtacctacggcctgtaccccgcccagccacagtctacctgcagatcttgcgactaaaacccctaactggggaagggaccgcagggggagggggcggaggccggcgtcacatccgtatccgctcactgaagattgagctgcactcacgctcaggccattggcagagcatcgacttcaagcaagtgctacacagctggttccgccagccacagagcaactggggcatcgagatcaacgcctttgatcccagtggcacagacctggctgtcacctccctggggccgggagccgaggggctgcatccattcatggagcttcgagtcctagagaacacaaaacgttcccggcggaacctgggtctggactgcgacgagcactcaagcgagtcccgctgctgccgatatcccctcacagtggactttgaggctttcggctgggactggatcatcgcacctaagcgctacaaggccaactactgctccggccagtgcgagtacatgttcatgcaaaaatatccgcatacccatttggtgcagcaggccaatccaagaggctctgctgggccctgttgtacccccaccaagatgtccccaatcaacatgctctacttcaatgacaagcagcagattatctacggcaagatccctggcatggtggtggatcgctgtggctgctcttaagtgggtcactacaagctgctggagcaaagacttggtgggtgggtaacttaacctcttcacagaggataaaaaatgcttgtgagtatgacagaagggaataaacaggcttaaagggt

SEQ ID NO: 292362 - DNA, 1224 bp, Artificial Sequence
  derived and/or modified sequence
atggtgctggccgcccccctgctgctgggcttcctgctgctggccctggagctgcggcccagaggagaggccgctgagggccctgctgctgctgctgctgctgctgctgctgctgctgctgctggggtgggcggggagaggagcagcaggcctgcccccagcgtggcccctgagccagatggctgccctgtgtgtgtgtggaggcagcacagccgggagctgcggctggagagcatcaagagccagatcctgagcaagctgcggctgaaggaggcccccaacatcagccgggaggtggtgaagcagctgctgcccaaggccccacccctgcagcagatcctggacctgcatgacttccagggagatgccctgcagcctgaggacttcctggaggaggatgagtaccacgccaccacagaaacagtcatctccatggcccaggagacagatcctgctgtgcagacagatggcagccccctgtgctgccacttccacttcagccccaaggtgatgttcaccaaggtgctgaaggcccagctgtgggtgtacctgcggcctgtgcccaggcctgccaccgtgtacctgcagatcctgcggctgaagcccctgaccggggagggcacagctgggggcggcggcggcggccgccgccacatccgcatccgcagcctgaagattgagctgcacagccgcagcggccactggcagagcattgacttcaagcaggtgctgcacagctggttccggcagccccagagcaactggggcatcgagatcaatgcctttgaccccagcggcacagacctggccgtgaccagcctgggccctggagctgagggcctgcaccccttcatggagctgcgggtgctggagaacaccaagaggagcagaagaaacctgggcctggactgtgatgagcacagcagcgagagccgctgctgccgctaccccctgactgtggactttgaggccttcggctgggactggatcatcgcccccaagcgctacaaggccaactactgcagcggccagtgtgagtacatgttcatgcagaagtacccccacacccacctggtgcagcaggccaacccccggggcagcgctggcccctgctgcacccccaccaagatgagccccatcaacatgctgtacttcaatgacaagcagcagatcatctacggcaagatccctggcatggtggtggacagatgtggctgcagctag

SEQ ID NO: 292363 - DNA, 1143 bp, Artificial Sequence
  derived and/or modified sequence
tgagctgctgctgctgctgctgctgctgctgctgctgctgctggggtgggcggggagaggagcagcaggcctgcccccagcgtggcccctgagccagatggctgccctgtgtgtgtgtggaggcagcacagccgggagctgcggctggagagcatcaagagccagatcctgagcaagctgcggctgaaggaggcccccaacatcagccgggaggtggtgaagcagctgctgcccaaggccccacccctgcagcagatcctggacctgcatgacttccagggagatgccctgcagcctgaggacttcctggaggaggatgagtaccacgccaccacagagaccgtcatctccatggcccaggagacagatcctgctgtgcagacagatggcagccccctgtgctgccacttccacttcagccccaaggtgatgttcaccaaggtgctgaaggcccagctgtgggtgtacctgcggcctgtgcccaggcctgccaccgtgtacctgcagatcctgcggctgaagcccctgactggagagggcacagctgggggcggcggcggcggcagaagacacatccgcatccgcagcctgaagattgagctgcacagccgcagcggccactggcagagcattgacttcaagcaggtgctgcacagctggttccggcagccccagagcaactggggcatcgagatcaatgcctttgaccccagcggcacagacctggccgtgaccagcctgggccctggagctgagggcctgcaccccttcatggagctgcgggtgctggagaacaccaagaggagcagaagaaacctgggcctggactgtgatgagcacagcagcgagagccgctgctgccgctaccccctgactgtggactttgaggccttcggctgggactggatcatcgcccccaagcgctacaaggccaactactgcagcggccagtgtgagtacatgttcatgcagaagtacccccacacccacctggtgcagcaggccaacccccggggcagcgctggcccctgctgcacccccaccaagatgagccccatcaacatgctgtacttcaatgacaagcagcagatcatctacggcaagatccctggcatggtggtggacagatgtggctgcagctag

SEQ ID NO: 292364 - DNA, 1224 bp, Artificial Sequence
  derived and/or modified sequence
atggtgctggccgcccccctgctgctgggcttcctgctgctggccctagagctccgacctcggggggaggctgccgagggcccagctgctgccgctgcagctgccgccgctgctgcggcggccggcgtgggcggggagcgttcatcaaggcccgcgccaagtgttgcaccggagcctgatggctgccccgtctgtgtgtggaggcagcactcacgggaactacgcctggaatctattaaatcacagattttgtcaaagcttaggttaaaagaggctcccaacattagccgcgaggtcgtgaagcaactcctgccaaaggctcccccactccagcagatactggaccttcacgattttcagggggacgctttgcagccagaggatttcctcgaggaagatgaataccacgccaccaccgagactgtcattagcatggcacaggaaacagacccagcagttcaaacagacggcagtccgctatgctgtcatttccatttctcccccaaagtaatgttcacaaaagtacttaaggcccagttgtgggtgtacctgaggcccgtcccccgtcctgcaacagtgtatcttcagatcctcagactgaagccgcttacaggcgaggggacagctggcggagggggcggtggacgccgtcatattcgtattcggagcctcaaaattgaactacatagtcgctcgggacactggcagtcaatcgatttcaagcaggtcctccattcttggttcagacaaccccagtcgaactggggcattgagatcaacgctttcgatccaagtggaacggacctggcagtgacatccctgggtcctggggccgagggtctccatcccttcatggaactccgggtactggagaatacaaagagaagtaggagaaaccttgggctggactgcgacgaacactcctcagagtcccggtgctgccggtacccactgacggtcgactttgaagcctttgggtgggactggattatcgctccgaagcgatacaaggccaactattgctcggggcaatgtgaatacatgtttatgcagaagtacccccatacccacctagtgcagcaagccaatccaagaggctcagctggaccttgctgcacgcctacgaagatgtctccaatcaatatgctgtatttcaacgacaagcaacagattatttacggcaagattccagggatggtggtggaccgctgtggttgcagctag

SEQ ID NO: 292365 - DNA, 1143 bp, Artificial Sequence
  derived and/or modified sequence
tgagccgccgccgccgccgccgccgccgccgccgccgccgccggcgtcggcggcgaaagatcaagccgaccggcacccagcgtcgcccccgaacccgatggttgccctgtatgtgtttggcgacagcacagccgagaattgaggcttgaatccattaaatcccagatactctctaagctcaggctgaaggaagccccgaatatctcaagagaggtagtaaaacagctactccccaaggccccacctctgcagcagatcctggacctgcacgatttccagggcgacgcgctgcaaccggaggactttctagaagaagatgagtatcatgcaaccacggaaaccgtgatttccatggcacaggagaccgatcccgccgtgcagacagatggcagccccctatgctgccacttccatttttcccctaaagtaatgtttacaaaggtgcttaaggcccagttgtgggtctacctgcgtcccgtaccccgcccagcaaccgtgtaccttcaaattttgagactaaagcccctaaccggcgaggggaccgctgggggcgggggaggggggcgtcgtcatatccgtatccgtagcttaaaaatcgaattacactcacggtcaggacactggcaaagtatcgacttcaagcaggtgctacactcctggttcaggcaacctcagagcaactggggcatcgaaatcaatgccttcgatccttctgggacagacctcgcagtgacttccctgggacctggggccgagggtctccatccgttcatggaactccgagtcctggagaacaccaagcggtcgcggcgtaacctgggcctagactgcgacgagcactcctccgaatcgcggtgttgtaggtatccactgaccgtggattttgaagcctttgggtgggactggatcatcgccccaaagcgatacaaggctaattactgctcagggcagtgcgaatacatgttcatgcagaagtatcctcacacacatctggtgcagcaggcaaaccctagaggctctgctggtccctgttgcaccccaactaagatgtcacctatcaacatgctgtacttcaacgacaaacagcagattatatatggcaagatcccaggaatggtcgtggataggtgtgggtgtagctag

SEQ ID NO: 292366 - DNA, 1224 bp, Artificial Sequence
  derived and/or modified sequence
atggtgctcgccgctccgctgttacttggctttctgctcctggctttggagctgcgccctcggggtgaagcagcggaggggcctgctgccgctgcggctgcagccgcagcggctgcagccgcaggcgtgggtggcgagagatcatcgcggccagcgccatcagtggccccagaacctgacggctgtcccgtgtgtgtttggaggcagcactcacgcgaactccgactggaatcgattaagtcacagattctgagcaagctgaggctgaaggaggccccaaacatctcaagagaggtggtcaaacagcttctccctaaggctcctccacttcagcagatcttggacctccacgatttccaaggcgatgcactgcagccagaggacttccttgaagaagacgagtaccatgcaaccacagagactgtcatatcaatggctcaagaaaccgatcctgccgtgcagacagacggatcccccctttgctgccatttccatttctctcctaaagtaatgtttactaaagtcttaaaggcccaactgtgggtgtatctcaggccagtgcccaggccagccaccgtttacctccagattcttcgcttgaagccactcacgggtgaaggtacagctggcggaggtggcggaggtcggaggcacatacggatcaggtcgctgaagattgagctccatagccggtccgggcactggcaatccattgattttaaacaggtgctgcatagctggtttcgccaaccacaatcgaactggggcatcgagatcaacgcattcgaccctagtggtaccgacctcgcagttacatctctgggccctggtgctgaggggttacatccctttatggaacttcgggtgttggaaaacactaaacgctccagaagaaacctgggcctcgactgcgatgagcatagctctgaatcaaggtgttgcaggtatcctctgacagtggattttgaggcttttggctgggattggattattgcacccaagcggtataaagctaactactgtagcggtcagtgcgagtacatgtttatgcagaaatatccacacacacatctcgttcagcaggccaatcctagaggttcggctggtccatgctgcactcccacaaaaatgagccccatcaacatgttatactttaatgacaaacagcagatcatctacggcaaaatcccgggaatggtggtcgacaggtgcgggtgctcctag

SEQ ID NO: 292367 - DNA, 1143 bp, Artificial Sequence
  derived and/or modified sequence
taggccgctgctgcagctgcagctgccgcagcagcagctgccggagttggcggtgaaagatcctcccgtcccgcaccatccgtcgccccagaaccagacggatgcccagtctgcgtctggcggcaacactccagagaattacgtctggagagcataaagtctcagatcttgtcaaagctaaggctcaaagaagcgcctaacataagtcgagaagtcgtcaaacagttattgcctaaggcaccccctttacagcaaattctggatttacacgatttccaaggcgatgccttgcagcccgaggacttcctggaagaggacgagtatcatgcgactaccgaaaccgtgatcagcatggcccaggaaaccgaccctgctgtgcaaacggatggatcgcctttatgttgccactttcacttttcccccaaggtgatgtttaccaaagttttgaaagctcagttgtgggtgtaccttcggcctgttccaagaccggctactgtgtatctgcagattttgcggctgaaaccactgacaggggaaggtactgccggtgggggaggaggaggcaggcgccacatccgcattcgatccctgaagatcgagctgcattccaggtcaggacactggcagtccatcgatttcaagcaggtcctgcacagctggtttagacagcctcagagcaattgggggatcgaaataaatgcctttgatccctccggaactgacctcgctgtgacctccctgggccctggtgccgagggcctgcatcctttcatggagcttcgagtgcttgaaaacacgaagagatctaggcgaaatctgggattagactgcgacgaacactcatccgagtccaggtgctgtcggtaccccttgactgtggatttcgaggcctttggatgggactggataatcgccccaaaaagatacaaggctaattactgttctggccagtgcgagtatatgttcatgcagaagtacccccacactcaccttgtgcaacaggccaatcccaggggctctgccggtccctgctgtactccaacaaaaatgtctcctatcaacatgttatacttcaacgataaacagcaaatcatctatggcaagatcccgggaatggtagtcgaccgctgcggctgttcatag

SEQ ID NO: 292368 - DNA, 1224 bp, Artificial Sequence
  derived and/or modified sequence
atggtgctggccgcccccctgctgctgggcttcctgctgctggccctggagctgagacccagaggcgaggccgccgagggccccgccgccgccgccgccgccgccgccgccgccgccgccgccggcgtgggcggcgagagaagcagcagacccgcccccagcgtggcccccgagcccgacggctgccccgtgtgcgtgtggagacagcacagcagagagctgagactggagagcatcaagagccagatcctgagcaagctgagactgaaggaggcccccaacatcagcagagaggtggtgaagcagctgctgcccaaggccccccccctgcagcagatcctggacctgcacgacttccagggcgacgccctgcagcccgaggacttcctggaggaggacgagtaccacgccaccaccgagaccgtgatcagcatggcccaggagaccgaccccgccgtgcagaccgacggcagccccctgtgctgccacttccacttcagccccaaggtgatgttcaccaaggtgctgaaggcccagctgtgggtgtacctgagacccgtgcccagacccgccaccgtgtacctgcagatcctgagactgaagcccctgaccggcgagggcaccgccggcggcggcggcggcggcagaagacacatcagaatcagaagcctgaagatcgagctgcacagcagaagcggccactggcagagcatcgacttcaagcaggtgctgcacagctggttcagacagccccagagcaactggggcatcgagatcaacgccttcgaccccagcggcaccgacctggccgtgaccagcctgggccccggcgccgagggcctgcaccccttcatggagctgagagtgctggagaacaccaagagaagcagaagaaacctgggcctggactgcgacgagcacagcagcgagagcagatgctgcagataccccctgaccgtggacttcgaggccttcggctgggactggatcatcgcccccaagagatacaaggccaactactgcagcggccagtgcgagtacatgttcatgcagaagtacccccacacccacctggtgcagcaggccaaccccagaggcagcgccggcccctgctgcacccccaccaagatgagccccatcaacatgctgtacttcaacgacaagcagcagatcatctacggcaagatccccggcatggtggtggacagatgcggctgcagctag

SEQ ID NO: 292369 - DNA, 1143 bp, Artificial Sequence
  derived and/or modified sequence
tgagccgccgccgccgccgccgccgccgccgccgccgccgccggcgtgggcggcgagagaagcagcagacccgcccccagcgtggcccccgagcccgacggctgccccgtgtgcgtgtggagacagcacagcagagagctgagactggagagcatcaagagccagatcctgagcaagctgagactgaaggaggcccccaacatcagcagagaggtggtgaagcagctgctgcccaaggccccccccctgcagcagatcctggacctgcacgacttccagggcgacgccctgcagcccgaggacttcctggaggaggacgagtaccacgccaccaccgagaccgtgatcagcatggcccaggagaccgaccccgccgtgcagaccgacggcagccccctgtgctgccacttccacttcagccccaaggtgatgttcaccaaggtgctgaaggcccagctgtgggtgtacctgagacccgtgcccagacccgccaccgtgtacctgcagatcctgagactgaagcccctgaccggcgagggcaccgccggcggcggcggcggcggcagaagacacatcagaatcagaagcctgaagatcgagctgcacagcagaagcggccactggcagagcatcgacttcaagcaggtgctgcacagctggttcagacagccccagagcaactggggcatcgagatcaacgccttcgaccccagcggcaccgacctggccgtgaccagcctgggccccggcgccgagggcctgcaccccttcatggagctgagagtgctggagaacaccaagagaagcagaagaaacctgggcctggactgcgacgagcacagcagcgagagcagatgctgcagataccccctgaccgtggacttcgaggccttcggctgggactggatcatcgcccccaagagatacaaggccaactactgcagcggccagtgcgagtacatgttcatgcagaagtacccccacacccacctggtgcagcaggccaaccccagaggcagcgccggcccctgctgcacccccaccaagatgagccccatcaacatgctgtacttcaacgacaagcagcagatcatctacggcaagatccccggcatggtggtggacagatgcggctgcagctag

SEQ ID NO: 292370 - protein, 622 aa, Artificial Sequence
  derived and/or modified sequence
MRLLRRRHMPLRLAMVGCAFVLFLFLLHRDVSSREEATEKPWLKSLVSRKDHVLDLMLEAMNNLRDSMPKLQIRAPEAQQTLFSINQSCLPGFYTPAELKPFWERPPQDPNAPGADGKAFQKSKWTPLETQEKEEGYKKHCFNAFASDRISLQRSLGPDTRPPECVDQKFRRCPPLATTSVIIVFHNEAWSTLLRTVYSVLHTTPAILLKEIILVDDASTEEHLKEKLEQYVKQLQVVRVVRQEERKGLITARLLGASVAQAEVLTFLDAHCECFHGWLEPLLARIAEDKTVVVSPDIVTIDLNTFEFAKPVQRGRVHSRGNFDWSLTFGWETLPPHEKQRRKDETYPIKSPTFAGGLFSISKSYFEHIGTYDNQMEIWGGENVEMSFRVWQCGGQLEIIPCSVVGHVFRTKSPHTFPKGTSVIARNQVRLAEVWMDSYKKIFYRRNLQAAKMAQEKSFGDISERLQLREQLHCHNFSWYLHNVYPEMFVPDLTPTFYGAIKNLGTNQCLDVGENNRGGKPLIMYSCHGLGGNQYFEYTTQRDLRHNIAKQLCLHVSKGALGLGSCHFTGKNSQVPKDEEWELAQDQLIRNSGSGTCLTSQDKKPAMAPCNPSDPHQLWLFV

SEQ ID NO: 292371 - protein, 603 aa, Artificial Sequence
  derived and/or modified sequence
MRLLRRRHMPLRLAMVGCAFVLFLFLLVSRKDHVLDLMLEAMNNLRDSMPKLQIRAPEAQQTLFSINQSCLPGFYTPAELKPFWERPPQDPNAPGADGKAFQKSKWTPLETQEKEEGYKKHCFNAFASDRISLQRSLGPDTRPPECVDQKFRRCPPLATTSVIIVFHNEAWSTLLRTVYSVLHTTPAILLKEIILVDDASTEEHLKEKLEQYVKQLQVVRVVRQEERKGLITARLLGASVAQAEVLTFLDAHCECFHGWLEPLLARIAEDKTVVVSPDIVTIDLNTFEFAKPVQRGRVHSRGNFDWSLTFGWETLPPHEKQRRKDETYPIKSPTFAGGLFSISKSYFEHIGTYDNQMEIWGGENVEMSFRVWQCGGQLEIIPCSVVGHVFRTKSPHTFPKGTSVIARNQVRLAEVWMDSYKKIFYRRNLQAAKMAQEKSFGDISERLQLREQLHCHNFSWYLHNVYPEMFVPDLTPTFYGAIKNLGTNQCLDVGENNRGGKPLIMYSCHGLGGNQYFEYTTQRDLRHNIAKQLCLHVSKGALGLGSCHFTGKNSQVPKDEEWELAQDQLIRNSGSGTCLTSQDKKPAMAPCNPSDPHQLWLFV

SEQ ID NO: 292372 - DNA, 1869 bp, Artificial Sequence
  derived and/or modified sequence
atgagactgctgagaagaagacacatgcccctgagactggccatggtgggctgcgccttcgtgctgttcctgttcctgctgcacagagacgtgagcagcagagaggaggccaccgagaagccctggctgaagagcctggtgagcagaaaggaccacgtgctggacctgatgctggaggccatgaacaacctgagagacagcatgcccaagctgcagatcagagcccccgaggcccagcagaccctgttcagcatcaaccagagctgcctgcccggcttctacacccccgccgagctgaagcccttctgggagagacccccccaggaccccaacgcccccggcgccgacggcaaggccttccagaagagcaagtggacccccctggagacccaggagaaggaggagggctacaagaagcactgcttcaacgccttcgccagcgacagaatcagcctgcagagaagcctgggccccgacaccagaccccccgagtgcgtggaccagaagttcagaagatgcccccccctggccaccaccagcgtgatcatcgtgttccacaacgaggcctggagcaccctgctgagaaccgtgtacagcgtgctgcacaccacccccgccatcctgctgaaggagatcatcctggtggacgacgccagcaccgaggagcacctgaaggagaagctggagcagtacgtgaagcagctgcaggtggtgagagtggtgagacaggaggagagaaagggcctgatcaccgccagactgctgggcgccagcgtggcccaggccgaggtgctgaccttcctggacgcccactgcgagtgcttccacggctggctggagcccctgctggccagaatcgccgaggacaagaccgtggtggtgagccccgacatcgtgaccatcgacctgaacaccttcgagttcgccaagcccgtgcagagaggcagagtgcacagcagaggcaacttcgactggagcctgaccttcggctgggagaccctgcccccccacgagaagcagagaagaaaggacgagacctaccccatcaagagccccaccttcgccggcggcctgttcagcatcagcaagagctacttcgagcacatcggcacctacgacaaccagatggagatctggggcggcgagaacgtggagatgagcttcagagtgtggcagtgcggcggccagctggagatcatcccctgcagcgtggtgggccacgtgttcagaaccaagagcccccacaccttccccaagggcaccagcgtgatcgccagaaaccaggtgagactggccgaggtgtggatggacagctacaagaagatcttctacagaagaaacctgcaggccgccaagatggcccaggagaagagcttcggcgacatcagcgagagactgcagctgagagagcagctgcactgccacaacttcagctggtacctgcacaacgtgtaccccgagatgttcgtgcccgacctgacccccaccttctacggcgccatcaagaacctgggcaccaaccagtgcctggacgtgggcgagaacaacagaggcggcaagcccctgatcatgtacagctgccacggcctgggcggcaaccagtacttcgagtacaccacccagagagacctgagacacaacatcgccaagcagctgtgcctgcacgtgagcaagggcgccctgggcctgggcagctgccacttcaccggcaagaacagccaggtgcccaaggacgaggagtgggagctggcccaggaccagctgatcagaaacagcggcagcggcacctgcctgaccagccaggacaagaagcccgccatggccccctgcaaccccagcgacccccaccagctgtggctgttcgtgtag

SEQ ID NO: 292373 - DNA, 1812 bp, Artificial Sequence
  derived and/or modified sequence
atgagactgctgagaagaagacacatgcccctgagactggccatggtgggctgcgccttcgtgctgttcctgttcctgctggtgagcagaaaggaccacgtgctggacctgatgctggaggccatgaacaacctgagagacagcatgcccaagctgcagatcagagcccccgaggcccagcagaccctgttcagcatcaaccagagctgcctgcccggcttctacacccccgccgagctgaagcccttctgggagagacccccccaggaccccaacgcccccggcgccgacggcaaggccttccagaagagcaagtggacccccctggagacccaggagaaggaggagggctacaagaagcactgcttcaacgccttcgccagcgacagaatcagcctgcagagaagcctgggccccgacaccagaccccccgagtgcgtggaccagaagttcagaagatgcccccccctggccaccaccagcgtgatcatcgtgttccacaacgaggcctggagcaccctgctgagaaccgtgtacagcgtgctgcacaccacccccgccatcctgctgaaggagatcatcctggtggacgacgccagcaccgaggagcacctgaaggagaagctggagcagtacgtgaagcagctgcaggtggtgagagtggtgagacaggaggagagaaagggcctgatcaccgccagactgctgggcgccagcgtggcccaggccgaggtgctgaccttcctggacgcccactgcgagtgcttccacggctggctggagcccctgctggccagaatcgccgaggacaagaccgtggtggtgagccccgacatcgtgaccatcgacctgaacaccttcgagttcgccaagcccgtgcagagaggcagagtgcacagcagaggcaacttcgactggagcctgaccttcggctgggagaccctgcccccccacgagaagcagagaagaaaggacgagacctaccccatcaagagccccaccttcgccggcggcctgttcagcatcagcaagagctacttcgagcacatcggcacctacgacaaccagatggagatctggggcggcgagaacgtggagatgagcttcagagtgtggcagtgcggcggccagctggagatcatcccctgcagcgtggtgggccacgtgttcagaaccaagagcccccacaccttccccaagggcaccagcgtgatcgccagaaaccaggtgagactggccgaggtgtggatggacagctacaagaagatcttctacagaagaaacctgcaggccgccaagatggcccaggagaagagcttcggcgacatcagcgagagactgcagctgagagagcagctgcactgccacaacttcagctggtacctgcacaacgtgtaccccgagatgttcgtgcccgacctgacccccaccttctacggcgccatcaagaacctgggcaccaaccagtgcctggacgtgggcgagaacaacagaggcggcaagcccctgatcatgtacagctgccacggcctgggcggcaaccagtacttcgagtacaccacccagagagacctgagacacaacatcgccaagcagctgtgcctgcacgtgagcaagggcgccctgggcctgggcagctgccacttcaccggcaagaacagccaggtgcccaaggacgaggagtgggagctggcccaggaccagctgatcagaaacagcggcagcggcacctgcctgaccagccaggacaagaagcccgccatggccccctgcaaccccagcgacccccaccagctgtggctgttcgtgtag

SEQ ID NO: 292374 - DNA, 1869 bp, Artificial Sequence
  derived and/or modified sequence
atgcggctgttacggcgccgccacatgcccctccgcttggccatggtggggtgcgcgtttgtgctgtttctcttcctcctgcatagagatgtgtcttcgagggaggaagcaaccgagaaaccatggttaaagtccttggtgtctcggaaagatcacgtcctggacctgatgcttgaggccatgaacaaccttagagactcaatgccaaaactccaaattagagcaccagaagcccagcagactctcttctccatcaaccaaagctgtcttcccggcttttatactcctgccgagctgaagccattctgggagagacctccccaggatcctaatgcccccggagccgacgggaaagcctttcagaaatcgaaatggactcctctcgaaactcaggaaaaagaggaagggtataaaaagcactgcttcaatgccttcgccagtgatcggataagccttcagcggtcgctcgggcccgatacacgtccaccagaatgcgtggaccagaagtttaggagatgtccgccactcgcaacgacatcggtgatcattgtgtttcacaacgaggcatggtcgacattgctacggacggtgtatagcgtgctgcacaccacacccgccattcttctgaaggagattatcttggtagatgacgccagcacggaagagcacctgaaagaaaagcttgagcagtatgtcaagcagcttcaagtcgtgcgggtcgtgcgtcaggaggagaggaaaggtctcatcactgccagactcctgggggcctccgtggcacaggccgaagtcctcactttccttgacgcccactgtgaatgtttccacgggtggcttgaaccgctgctcgcacggatagcggaagataaaacagtcgtggtcagtccagatatcgtgacgatcgaccttaacacatttgagtttgcgaaacccgtacagcgaggaagggtgcactcccgcggtaatttcgattggtccctaacctttggatgggaaacgttaccaccccatgagaaacagcggcggaaagacgaaacctacccaattaagagtccaactttcgccgggggtttgttttctatctccaagtcctacttcgagcacatcggtacgtacgataatcagatggagatttggggaggggagaatgtggagatgtcatttcgtgtctggcaatgcggtggccagcttgagatcatcccttgtagcgtggttggccatgtgtttaggaccaagagtccccacaccttccccaagggaacatcagttatcgctcggaaccaggtgcggctggcagaggtctggatggattcctacaaaaaaattttctacagacgaaatctgcaggccgcaaagatggctcaggagaagtcttttggcgacatcagcgaacgattgcagctcagggaacagctccattgccataatttcagctggtacctccataatgtctacccagaaatgttcgtgcccgatcttacaccaacattttatggtgctatcaaaaacctgggcacaaatcagtgcctcgacgttggggaaaacaacagaggcggcaagccattgattatgtatagttgccatgggctgggagggaatcaatactttgagtatactactcaaagggacttaaggcacaacatcgcgaagcagctgtgcctccatgtgtctaagggtgccttaggactcggatcctgtcattttacaggcaagaatagccaggtccctaaggacgaagagtgggagttagctcaggatcagctgatccgcaatagcggttcaggcacatgcctgacttcccaggataagaaacctgccatggctccttgcaatccctccgaccctcaccagctgtggctgttcgtctag

SEQ ID NO: 292375 - DNA, 1869 bp, Artificial Sequence
  derived and/or modified sequence
atgcgcctgttgcgcagaagacacatgccgctgaggctggccatggtgggatgtgcctttgtattgtttctgttcctgttacatcgcgatgtgtcctcaagggaagaagctaccgaaaagccatggctgaagtcacttgtaagtcgcaaggaccacgtgcttgacctgatgttggaagctatgaataatctaagggactctatgcccaagttgcagatcagagcgcctgaggcccagcaaactctgttcagcatcaatcagtcgtgcctgccagggttttatacacctgccgaactcaagcccttttgggaaagaccaccgcaagatccaaatgcaccaggggctgatgggaaggctttccagaagagcaagtggactcccctcgaaacccaggaaaaagaggaggggtataaaaagcactgcttcaacgccttcgcatcggacagaatcagtctccagcgaagtctcggtcctgacacacgacccccagagtgcgtcgatcagaaattcagacggtgcccccccctagcaaccacttcagtgattattgtgtttcacaatgaggcctggtctaccttactgagaaccgtctatagcgtcctccataccacccctgccatcctgcttaaagagattatcctggtcgacgacgcctccaccgaggaacatctgaaagagaaactggagcaatacgtgaagcagttgcaggtggtccgcgtggtccgccaggaggagcggaaggggctgataactgctaggctgctgggggcctctgtcgcacaggcagaggttctgacctttctggatgcacattgcgagtgtttccatggctggcttgagccactcttggcaagaatagctgaggacaagactgtagttgtttccccagacatagtaactatcgacctgaacaccttcgagttcgcaaaacctgtccaacgcggacgggtccactcaagaggaaactttgattggagtctaacgttcggttgggaaacactcccaccacacgaaaagcagagacgcaaggatgaaacctacccaattaaatcccccaccttcgctggcggtctcttttctattagtaagagctatttcgaacacattgggacatacgacaatcagatggagatctgggggggggagaatgtggaaatgtcgtttcgtgtgtggcagtgcgggggtcagctcgaaatcataccttgtagcgtcgtgggacatgtattcaggaccaagtctccgcacacctttcctaagggcacctcagtcatagcccggaaccaagtccggctggcagaagtctggatggactcttacaaaaagatcttttacaggcgtaatcttcaggccgctaagatggctcaggaaaaatctttcggggacatcagcgaacgcctgcagttgagagaacagctgcactgtcacaacttttcatggtacttgcataatgtttacccggaaatgtttgtgcccgatctgacaccaacgttctatggagccatcaaaaatctgggcacaaatcagtgcctcgatgtgggcgaaaacaataggggaggcaagcccctcatcatgtatagttgtcacggtctgggggggaaccagtactttgaatacaccacccagagggatctccgacacaatattgccaagcagttgtgtctccatgtctccaagggggctcttggccttggtagttgtcacttcaccggtaagaattcacaggtgccaaaagatgaggagtgggagctagcccaagatcagctgataagaaactcaggtagtgggacatgcctgacctcccaagacaaaaagccggcgatggccccctgcaacccctctgatccccaccaattgtggctgttcgtgtag

SEQ ID NO: 292376 - DNA, 1812 bp, Artificial Sequence
  derived and/or modified sequence
atgcggttgctcaggagaaggcatatgcccttgcggctggctatggtgggctgtgcatttgtgctgttcctcttcctgctggtaagccggaaagatcatgttctggacctcatgctggaggcaatgaacaatctgcgtgacagcatgcctaagctgcaaatcagagctcccgaggctcagcagaccttattctctattaaccaatcctgcctgcccggcttctacacaccagcagagctcaagccattctgggagaggccgcctcaggatcccaatgcaccaggagcagatggtaaagcctttcagaagagcaagtggacacccctggagacccaagaaaaggaagaagggtataagaaacattgcttcaacgcattcgccagtgatagaatcagcctccagcggtctctagggccagatactcgcccaccagaatgtgtagatcagaaattccggaggtgcccccccctagcaactacatccgtgataattgtgttccacaacgaagcgtggtcaactctgcttcgtaccgtgtactcagtgctacacaccacccccgctatcctgttgaaagagattatcctggttgatgacgcaagcaccgaagaacacctgaaggagaaattggaacagtatgtcaaacaactgcaggtggtgcgagttgtgcgacaggaggagagaaaaggccttataacagcacgcctgttgggagcgtccgtcgctcaggcagaggtgctcactttcctggatgcgcattgtgagtgttttcacggctggctggagcccctgcttgcccggattgctgaggataagaccgtggttgtgtccccagacattgtcacaattgacctcaatacctttgaattcgctaaaccagtccagaggggcagggtccactcaaggggcaattttgattggtccctgacttttggatgggaaacactgcccccacacgagaaacaacgacgtaaggatgaaacctaccctatcaagagcccaacatttgctggaggcctgttctcaatttcaaaatcttattttgagcatattggcacctatgataatcagatggaaatatgggggggggaaaacgtcgagatgtcctttcgggtgtggcagtgcggtggacaacttgaaatcattccatgttctgtggtgggtcacgtgttccgcacgaaatcccctcacacttttcctaaaggcacgagtgttattgcccgcaatcaagttcgtctcgccgaagtctggatggactcctacaaaaaaatcttctaccgccgcaacttgcaagccgccaagatggctcaggagaaaagttttggggatatctctgagaggttgcagttaagagaacaactgcactgccacaacttcagttggtatctccacaatgtgtaccctgagatgtttgtgccagaccttaccccgaccttttacggtgcaattaaaaaccttgggacgaatcaatgtctggatgtaggcgagaataaccgtggaggtaagccactgattatgtactcttgtcacggcttgggagggaatcagtacttcgaatacactacacaacgcgacttacgccataatatcgccaagcaactgtgtctgcatgtgtctaagggagccctggggctgggatcctgtcacttcacaggaaaaaattcccaggtacccaaggacgaggaatgggaacttgctcaggaccagctcatacgcaattctggctccggaacctgccttacatcccaggataagaaaccggcaatggccccttgtaacccctcagatcctcaccaattgtggctgtttgtgtag

SEQ ID NO: 292377 - DNA, 1869 bp, Artificial Sequence
  derived and/or modified sequence
atgaggctgctgcggcggcggcacatgcccctgcggctggccatggtgggctgtgcctttgtgctcttcctgttcctgctgcacagagatgtgagcagccgggaggaggccacagagaagccctggctgaagagcctggtgtccaggaaggaccacgtgctggacctgatgctggaggccatgaacaacctgcgggacagcatgcccaagctgcagatccgggcccctgaggcccagcagaccctcttcagcatcaaccagagctgcctgcccggcttctacaccccagctgagctgaagcccttctgggagcggcccccccaggaccccaatgcccctggagcagatggcaaggccttccagaagagcaagtggacccccctggagacccaggagaaggaggagggctacaagaagcactgcttcaatgcctttgccagtgaccgcatcagcctgcagaggagcctgggccctgacacccggcccccagaatgtgtggaccagaagttccgccgctgcccccccctggccaccaccagcgtcatcatcgtgttccacaatgaggcctggagcaccctgctgaggacagtgtacagcgtgctgcacaccaccccagccatcctgctgaaggagatcatcctggtggatgatgccagcacagaggagcacctgaaggagaagctggagcagtatgtgaagcagctgcaggtggtgcgggtggtgcggcaggaggagaggaagggcctcatcacagcccggctgctgggcgcctctgtggcccaggccgaggtgctgaccttcctggatgcccactgtgagtgcttccacggctggctggagcccctgctggccagaattgctgaggacaagacagtggtggtgtccccagacatcgtgaccatcgacctgaacacctttgaatttgccaagcctgtgcagaggggccgggtgcacagccggggcaactttgactggagcctgaccttcggctgggagaccctgccccctcatgagaagcagaggaggaaggatgagacctaccccatcaagagccccacctttgctgggggcctcttcagcatcagcaagagctactttgagcacatcggcacctatgacaaccagatggagatctggggcggggagaatgtggagatgtccttccgggtgtggcagtgtggcggccagctggagatcatcccctgcagcgtggtgggccacgtgttccgcaccaagagcccccacaccttccccaagggcaccagcgtcatcgccaggaaccaggtgcggctggccgaggtgtggatggacagctacaagaagatcttctacagaagaaacctgcaggccgccaagatggcccaggagaagagctttggagacatcagcgagcggctgcagctgcgggagcagctgcactgccacaacttctcctggtacctgcacaacgtgtacccagagatgtttgtgcctgacctgacccccaccttctacggggccatcaagaacctgggcaccaaccagtgcctggatgtgggggagaacaacagaggaggcaagcccctcatcatgtacagctgccacggcctgggcggcaaccagtactttgagtacaccacccagagggacctgcggcacaacatcgccaagcagctgtgcctgcacgtgtccaagggggccctgggcctgggcagctgccacttcaccgggaagaacagccaggtgcccaaggatgaggagtgggagctggcccaggaccagctgatccggaacagcggcagcggcacctgcctgaccagccaggacaagaagccagccatggccccctgcaaccccagcgacccccaccagctgtggctgtttgtgtag

SEQ ID NO: 292378 - DNA, 1812 bp, Artificial Sequence
  derived and/or modified sequence
atgaggctgctgcggcggcggcacatgcccctgcggctggccatggtgggctgtgcctttgtgctcttcctgttcctgctggtgtccaggaaggaccacgtgctggacctgatgctggaggccatgaacaacctgcgggacagcatgcccaagctgcagatccgggcccctgaggcccagcagaccctcttcagcatcaaccagagctgcctgcccggcttctacaccccagctgagctgaagcccttctgggagaggcctccccaggaccccaatgcccctggagcagatggcaaggccttccagaagagcaagtggacccccctggagacccaggagaaggaggagggctacaagaagcactgcttcaatgcctttgccagtgaccgcatcagcctgcagaggagcctgggccctgacacccggcccccagaatgtgtggaccagaagttccgccgctgcccccccctggccaccaccagcgtcatcatcgtgttccacaatgaggcctggagcaccctgctgaggacagtgtacagcgtgctgcacaccaccccagccatcctgctgaaggagatcatcctggtggatgatgccagcacagaggagcacctgaaggagaagctggagcagtatgtgaagcagctgcaggtggtgcgggtggtgcggcaggaggagaggaagggcctcatcacagcccggctgctgggcgcctctgtggcccaggccgaggtgctgaccttcctggatgcccactgtgagtgcttccacggctggctggagcccctgctggccagaattgctgaggacaagacagtggtggtgtccccagacatcgtgaccatcgacctgaacacctttgaatttgccaagcctgtgcagaggggccgggtgcacagccggggcaactttgactggagcctgaccttcggctgggagaccctgccccctcatgagaagcagaggaggaaggatgagacctaccccatcaagagccccacctttgctgggggcctcttcagcatcagcaagagctactttgagcacatcggcacctatgacaaccagatggagatctggggcggagaaaatgtggagatgtccttccgggtgtggcagtgtggcggccagctggagatcatcccctgcagcgtggtgggccacgtgttccgcaccaagagcccccacaccttccccaagggcacctctgtgattgccaggaaccaggtgcggctggccgaggtgtggatggacagctacaagaagatcttctacagaagaaacctgcaggccgccaagatggcccaggagaagagctttggagacatcagcgagcggctgcagctgcgggagcagctgcactgccacaacttctcctggtacctgcacaacgtgtacccagagatgtttgtgcctgacctgacccccaccttctatggagccatcaagaacctgggcaccaaccagtgcctggatgtgggggagaacaacagaggaggcaagcccctcatcatgtacagctgccacggcctgggcggcaaccagtactttgagtacaccacccagagggacctgcggcacaacatcgccaagcagctgtgcctgcacgtgtccaaaggagccctgggcctgggcagctgccacttcaccgggaagaacagccaggtgcccaaggatgaggagtgggagctggcccaggaccagctgatcagaaattctggcagcggcacctgcctgaccagccaggacaagaagccagccatggccccctgcaaccccagcgacccccaccagctgtggctgtttgtgtag

SEQ ID NO: 292379 - DNA, 1869 bp, Artificial Sequence
  derived and/or modified sequence
atgcggctgctgcggcggcggcacatgcccctgcggctggccatggtcgggtgcgcctttgtgctgttcctgtttctcctgcatcgcgatgtgtcctcccgggaggaagccaccgaaaaaccgtggttaaagtccttggtgtctcgcaaagaccacgtattggaccttatgttagaagctatgaataatctgcgggacagtatgccgaagctccagatacgggcccccgaagcccagcagactctgtttagcatcaatcagtcatgccttcccgggttctacacgccggccgagctgaagccattttgggaaaggccgccacaggaccctaatgcgcctggcgccgacggtaaagcttttcagaagtctaaatggacgcctttagagacccaagagaaggaagaaggatataagaaacactgctttaacgcatttgcctccgaccggatctcactacaacggtctttgggtcccgacacgaggcctccagagtgtgtggaccagaaattccggcgatgtcctcctctggccacgacgtccgtgattatcgtgtttcacaatgaagcctggtccaccctgttgaggacggtgtattcagttctgcacaccacacctgctatcctcctgaaggagatcattctggtagatgacgccagcacggaagagcacctgaaggaaaagctcgaacaatacgttaagcaactacaggttgtgagggtggttaggcaggaagaacgtaagggccttatcacagcccggctgttaggcgcgagcgtcgcccaggcagaggttttaaccttcctagacgcccactgtgagtgcttccatggctggctcgagcctcttctggccagaattgcagaggataagactgttgtggtgtccccggatatcgtgacgatcgacttgaataccttcgagtttgccaagcccgtacagagaggcagggtgcattcgaggggcaacttcgactggtcactgaccttcgggtgggaaacactgcctcctcatgaaaaacagcggaggaaagacgaaacatatccaatcaaatcacctactttcgctggcgggctgttttccatctccaaatcttacttcgagcatattggcacatatgacaaccagatggagatttggggcggagagaacgtggagatgagctttcgagtgtggcagtgtgggggtcagcttgagattatcccatgtagcgtagtggggcacgtgttccgaacaaagtcaccccatacgtttcctaaaggaacgagcgtcattgctcgtaatcaggtccgattggccgaggtttggatggactcttacaaaaagattttttaccgtcgtaatctgcaggctgctaagatggctcaagagaaaagctttggggacataagcgagcgcctgcagctgcgcgaacagctgcattgccacaattttagttggtatctccataatgtttacccggaaatgtttgtgcccgatctaacccctaccttttacggcgccattaagaatttggggaccaaccagtgcctggacgttggcgagaataacagaggaggcaagcctttgattatgtattcctgccacggtctgggcggaaaccagtatttcgagtacaccacccagagagatttgcgtcacaacatcgccaaacaactgtgcctccatgtttctaagggcgcactcggccttgggagctgccatttcactgggaagaatagccaagtccccaaagacgaggaatgggagctggcccaagaccagctgattcgaaattccggttcaggaacttgcctgacctcgcaggataaaaagcccgctatggcaccctgcaatccttccgacccacatcagctgtggttgtttgtgtag

SEQ ID NO: 292380 - DNA, 1869 bp, Artificial Sequence
  derived and/or modified sequence
atgcggctgctgcggcggcggcacatgcccctgcggctggccatggtcggctgcgcatttgtcctgttcttgttcctgctacaccgggacgtgtcctcgcgggaggaagccaccgaaaaaccctggctcaaaagcttggtctcaagaaaggaccatgtcctagacctcatgttagaagcgatgaacaatctccgtgactctatgcctaaactgcagattagggctcccgaagctcagcaaacactatttagtatcaatcagtcgtgcctgcccggattttatacccccgccgagctgaaacctttctgggaaagaccccctcaggatcccaacgcccctggcgcggatgggaaggcctttcagaaatccaagtggaccccgctcgagacacaggaaaaggaggagggttataagaagcactgctttaacgcattcgcatcggatcgcattagcttacagaggtcacttggacccgatacacgacctcctgaatgtgtggaccagaaatttcgacgatgtccgcctctcgcaacaacaagcgtgattatcgtgtttcacaacgaggcctggagtacgctcctaaggaccgtgtacagcgttctgcatactacccctgctatcttgctcaaagaaataatcctcgttgatgatgcgtctaccgaggaacatttgaaagagaaattggaacagtacgtcaaacaactgcaggtggtgcgggttgtgcggcaagaggaaaggaaaggccttatcaccgctcgtctgctgggagcctctgtcgcccaagcagaagtcctcacgtttttggatgcgcactgtgaatgtttccatggttggctggaaccactccttgcccgcattgccgaggataagacagtggtggtgtctcctgatatcgtgacaatcgacctaaatacatttgaattcgcgaagcctgtccaaagggggagggttcactcaagaggcaattttgactggtctttgaccttcggctgggaaaccctacccccacacgagaagcagagaaggaaggacgaaacatatccaatcaagtcgccaaccttcgctggcggactgtttagcatttctaagtcatatttcgagcatattggaacatacgacaatcaaatggagatttggggcggagagaacgtagaaatgtcatttcgagtttggcagtgtggaggccagctcgaaatcatcccttgcagtgtggttgggcatgtgttccgcaccaaatccccccatactttccccaagggtacctccgttattgctcgcaaccaggtccgacttgccgaagtctggatggactcatataagaaaatcttctatcgccggaacctccaggctgctaagatggctcaggaaaagtcgttcggcgacatatctgagcggctccagctcagggagcagttgcactgtcacaacttttcttggtatctgcacaacgtgtaccctgagatgttcgtgcctgatctgactcctacattttatggcgccattaagaacctggggacaaatcagtgcctagacgtgggagagaacaacagaggggggaaacccctgatcatgtattcttgtcatgggctcggagggaaccagtacttcgaatacaccacgcaaagagacctgcggcacaatatagcgaagcaactgtgcttgcatgtttcgaaaggcgcacttggcttgggctcctgccacttcactggaaaaaattcacaggtacccaaggacgaagagtgggagctggcgcaggaccagctcattcgtaacagtggctccggtacctgtttgacaagccaggataagaaacccgctatggctccttgcaaccccagtgacccccaccagctgtggttgttcgtgtag

SEQ ID NO: 292381 - DNA, 1812 bp, Artificial Sequence
  derived and/or modified sequence
atgcggctgctgcggcggcggcacatgcccctgcggctggccatggttggctgtgcttttgtactctttctgtttctgctcgtaagtagaaaggatcacgtattggatctcatgcttgaggcaatgaataatctgcgtgactcaatgcctaaattacagatccgagcgcctgaggcccagcagacactgtttagtattaatcaatcctgcctgccagggttctatacccctgccgagcttaagccattctgggaaaggccacctcaggaccctaatgctccaggcgccgatggcaaggctttccagaagtcaaagtggacaccactggagacacaggaaaaggaggaaggctacaaaaaacattgcttcaacgcctttgcttctgacaggatttcattgcagagaagtctcggccccgatacgaggcctcccgagtgtgtcgaccagaagtttaggcggtgcccaccactagccactactagcgtgatcatcgtgttccataatgaagcctggtcaaccctgttacgaactgtttactctgtgctgcatacgactccagccatactgttgaaggagatcatcctggtggacgatgcttcaaccgaggagcatttgaaagagaagttggagcagtacgtgaagcagttacaggtcgtacgggtggttcgacaagaagagagaaaggggttgatcaccgcccggctgctgggggccagtgtagcgcaggcagaggtacttacttttttagatgcacactgcgaatgcttccacggatggttggagccactactcgccagaatcgctgaggacaagaccgtggtcgtgtctccagacattgtgacaatcgacctaaataccttcgagttcgccaaacccgtgcagcgagggcgggtgcactctcggggaaacttcgattggagcctcacttttggctgggaaacactccctccgcacgaaaagcagaggaggaaagacgagacataccctatcaaaagccccacttttgccggtggcctcttctcaatttcaaaaagctatttcgagcacattgggacgtacgataatcagatggaaatttggggaggtgagaacgtagaaatgtccttcagagtctggcagtgtggcggtcaactggaaatcatcccttgcagtgtagtggggcacgtgttcagaacgaaaagtccacacacatttcctaaggggacgtctgtgatagctcgcaaccaagttcgcctggctgaagtctggatggactcatataagaagatcttctacagacggaatcttcaggcagccaaaatggcacaggaaaagagctttggagacatcagcgaacgcctgcagctacgagagcagttgcactgtcataatttctcctggtacctgcacaatgtatatcccgaaatgtttgtccccgacctgactccaaccttctacggcgccattaagaatttggggacaaatcagtgtttggacgttggcgaaaataacaggggagggaagcctctgatcatgtactcctgtcacggactgggcggaaaccagtactttgaatataccactcagcgcgatttgagacacaatatcgctaaacagctgtgtctccacgtctctaaaggagccctggggcttggatcatgccactttaccggcaagaactcccaagttcccaaagacgaggagtgggagctggctcaggatcagctcatccgaaactctggaagcggaacatgcctcacttcacaggataaaaagccagccatggccccctgcaacccaagcgacccccatcagctgtggctcttcgtgtag

SEQ ID NO: 292382 - DNA, 1869 bp, Artificial Sequence
  derived and/or modified sequence
atgcgccttctaaggcggaggcacatgccgctgaggctcgccatggtggggtgcgctttcgtgttatttcttttcttacttcatcgggatgtgtccagccgggaggaggccaccgagaaaccctggctcaagagccttgtgtcccgcaaggaccatgtgctggacctcatgctcgaggctatgaataacctgcgcgatagcatgccaaagctccaaatcagagcacccgaggcccagcaaacgctgttttcgattaatcaatcctgtctccctggcttctacactcccgctgaactcaaacctttttgggaacgacctccccaggatcctaatgcacccggtgctgacgggaaagcctttcagaagtcaaaatggactccactggaaacacaggagaaggaggagggatacaagaaacactgtttcaatgcttttgcttctgatcgcatctcgttgcagagatctcttggaccggacacgagaccacctgagtgtgtggatcaaaagtttagacgctgtccgccactcgccaccacatccgttattatcgtgtttcacaatgaggcctggtccaccctgctgcggaccgtgtactcagttttgcatacgactcccgcaatcctgcttaaagaaatcatactggtcgacgatgccagcactgaagaacatctcaaggaaaagctcgagcagtacgtgaaacagttgcaggtggttcgggtggtgcgacaggaagaacgcaaaggcctgatcacggctcgccttctgggggcatccgtcgcccaggccgaggtcctgacctttctggatgctcactgcgagtgtttccatggttggctggagccgctgctggccagaattgccgaggacaaaactgttgtggtgtcgccagatatcgtgacaatcgatctgaacaccttcgagtttgcgaagcccgtgcagcgaggtagggtgcacagtcggggaaattttgactggagtctgacctttggctgggagaccctcccacctcatgagaaacaaagacggaaagacgagacctatccaataaaatctcccacctttgccggtggtctcttttccatctcgaagtcatactttgaacatattggcacatacgacaaccaaatggagatctggggcggagagaacgtggaaatgagtttccgtgtgtggcagtgtgggggtcagctagaaattatcccatgttcagtggtggggcacgtgtttcgcaccaagagccctcataccttcccaaagggcacatcagtcatcgctcggaaccaagtgcgcctagcagaggtatggatggattcatataagaaaatcttctatagacgcaaccttcaggcagctaagatggctcaggaaaagtctttcggagatataagcgagcgcctgcagctccgagagcaactccactgtcataatttctcgtggtacttacataatgtgtatcccgagatgtttgtcccagacctcactcctaccttctacggagctatcaagaatttgggcacaaatcagtgtctcgacgtgggtgagaacaatcgcggtgggaaaccccttattatgtattcttgccatggcctggggggtaatcagtacttcgaatacactactcagcgagacctgcggcacaatatagctaagcagctgtgcctacacgtaagtaaaggcgctctcggccttggatcttgtcatttcaccggcaaaaactcccaagtccccaaggatgaggaatgggagttggctcaagaccagctgatcagaaatagtggatctggcacatgtctcacatcacaggacaagaagccagcaatggcaccatgcaatccatcagatcctcaccagctttggttatttgtctag

SEQ ID NO: 292383 - DNA, 1869 bp, Artificial Sequence
  derived and/or modified sequence
atgcgcctgctgaggagaaggcacatgcctctgaggctggctatggtcgggtgtgcgttcgtgcttttcctatttctgctgcaccgggacgtgagctcacgggaggaagctacggagaagccatggctcaaatcactggtgtcccgaaaagaccatgttctggacctgatgttagaggccatgaataatttgagagattctatgccaaaattgcaaatcagagctcccgaagcacagcagacgcttttcagcatcaatcaatcttgtctacccggtttttacacccccgcagagttaaagccgttttgggaacgcccacctcaggaccccaacgcacccggtgccgacggtaaggcatttcaaaaatctaaatggacaccattggagactcaggagaaagaagaaggctacaagaagcactgctttaacgcctttgccagcgatagaatttcgttacagcggagccttggaccggacaccaggcctcctgaatgcgtcgatcagaagtttcgtagatgccctccccttgccaccacgagtgtgattatcgtgttccacaacgaggcctggtcaacacttctgaggactgtgtatagcgtcctgcatacaacccccgctatattacttaaagaaataatcctggtcgacgatgcttcaacagaggagcacctgaaagagaaactcgaacagtatgtgaaacagttacaggtcgtgagagtcgtacgtcaggaagaacgcaagggacttattaccgctagactcctgggcgcttcggtggcccaagctgaggtgctgaccttccttgatgcacattgcgagtgcttccatggctggctggagccattactggctcggatcgcagaagacaaaaccgttgtggtgagcccagacatcgtgacgattgatctgaatacattcgaatttgccaaaccagtgcagcgagggagagtgcactccagagggaactttgactggagccttactttcggctgggagaccttacctcctcatgaaaaacaacggagaaaagacgagacttatccaataaagagtcctacctttgccggtggcctattttccatcagcaagtcctatttcgagcatattggtacttacgataatcagatggagatttggggaggagagaatgtggaaatgtcgttccgggtgtggcagtgtgggggtcaacttgaaatcatcccttgctcggttgtggggcacgttttcagaaccaagagccctcatactttccccaaaggaacaagcgtcattgcacggaatcaggtacggcttgccgaagtatggatggatagctacaagaagatcttctacagacggaacctccaggccgcaaaaatggcgcaggaaaagtctttcggagacattagcgaacgcctgcagttaagagagcagttgcattgccataatttcagctggtatttgcataacgtctatcctgagatgttcgtccctgatctaaccccaacgttctatggggctatcaagaacttgggaacaaaccagtgtttggacgtgggggagaacaatagagggggaaaaccgttgatcatgtattcctgtcatggacttggtggcaatcagtacttcgaatacacaacccaaagagatttgcgtcacaacatcgctaaacagctctgcctccacgtgagcaaaggcgctctgggcttgggttcatgtcactttactgggaaaaacagccaggtgccaaaagacgaggagtgggaattagcccaggatcagctgatccggaattcaggatcagggacgtgtcttacctcccaggataaaaaaccggctatggccccatgcaacccttccgatcctcaccagctctggctcttcgtctag

SEQ ID NO: 292384 - DNA, 1812 bp, Artificial Sequence
  derived and/or modified sequence
atgagactattacggaggcgccacatgcccctcaggctggcaatggtgggctgtgcgttcgtccttttcctcttcttactcgtgagcagaaaagaccacgtgctcgacctgatgctggaggccatgaacaacctgagagacagtatgccaaagcttcagattagggccccagaagcccaacaaaccctcttctccattaatcagtcctgcctaccgggattctataccccagctgaactgaagcccttctgggaaaggcctccacaagatccaaacgcacccggagcagatggtaaagcatttcagaaatctaagtggacacctctggagacacaggagaaggaggagggctacaaaaagcattgtttcaatgctttcgcctctgatagaatttccctgcagcgtagcctcggacccgatacgagaccacccgagtgcgtggaccaaaagttccggaggtgtccccctttagccactacctccgtgattatcgtttttcacaatgaagcgtggtccacattactgcggacagtttatagcgtgctgcataccactcccgcaattctactcaaagagatcattctcgtcgatgatgcatctactgaagaacatctcaaagagaaactcgagcaatatgtcaaacagctgcaggtggtgagagtcgtgaggcaggaggagcgcaaagggctgatcaccgcacggttgctgggcgcaagcgtggcccaggccgaggtgctgacttttctggatgcccactgcgaatgcttccacggatggctcgagccactgctggcgaggatagctgaggacaaaacagtcgtggtgtcaccagatatcgtaaccatcgatttgaacactttcgaattcgcgaagccagtgcagcggggtagagtgcatagccggggtaatttcgattggagtctgacgtttgggtgggagaccctgccacctcatgagaagcagagaagaaaggacgagacatatcctatcaagagtcccacatttgccggtggactgtttagcatttcgaaaagttacttcgagcacattggaacgtacgacaatcagatggaaatttggggaggtgaaaacgtcgagatgtcttttagggtgtggcaatgcggtgggcaactggaaatcatcccatgcagcgtggtggggcacgtgttccgcactaaaagccctcataccttccccaaaggcacttctgtcattgccaggaatcaagtccgactcgctgaggtttggatggattcatacaaaaagatattttataggcgtaacctccaggctgctaaaatggcacaggagaaatccttcggtgacatcagtgagagacttcagctccgggaacagttgcattgccataattttagttggtatttacacaacgtctaccccgaaatgtttgtacctgatcttacccccacgttttatggcgctatcaagaacttggggacaaaccaatgtttggacgtgggagaaaacaaccgagggggtaagccattgattatgtattcctgccatgggctgggtggtaaccaatatttcgaatacaccacccaaagagatctcaggcacaacatcgccaaacagctatgcctccacgtctcaaaaggcgcacttggtctaggctcctgccatttcacaggaaagaattcacaggtgccaaaggatgaggagtgggagcttgctcaagatcagctgattcgcaacagcggctcaggcacctgcctcacaagtcaagataagaagcccgctatggccccatgtaatccctccgatcctcaccaactctggctgtttgtatag

SEQ ID NO: 292385 - DNA, 4520 bp, Artificial Sequence
  derived and/or modified sequence
ccaggctggtccctcctgccttcgctctctgctggtcgcggtggcctgtagctcctccctcggtaggacccccctccaccttggcgcttacgagatgaatgaggagcccagacctctggaacttggagggttgttcagattcccaggctgacaaaaaggagaaacagcttttacttgcatccagggccaatcatcgcagacccagacgtctgcagagggctgaggccccagcttgtggccaccacaacgtatcaagctatctccagggttgggctcaggactcagagctgacgcagctggggtgccccttggttctggaggatgaggctcctccgcagacgccacatgcccctgcgcctggccatggtgggctgcgcctttgtgctcttcctcttcctcctgcatagggatgtgagcagcagagaggaggccacagagaagccgtggctgaagtccctggtgagccggaaggatcacgtcctggacctcatgctggaggccatgaacaaccttagagattcaatgcccaagctccaaatcagggctccagaagcccagcagactctgttctccataaaccagtcctgcctccctgggttctataccccagctgaactgaagcccttctgggaacggccaccacaggaccccaatgcccctggggcagatggaaaagcatttcagaagagcaagtggacccccctggagacccaggaaaaggaagaaggctataagaagcactgtttcaatgcctttgccagcgaccggatctccctgcagaggtccctggggccagacacccgaccacctgagtgtgtggaccagaagttccggcgctgccccccactggccaccaccagcgtgatcattgtgttccacaacgaagcctggtccacactgctgcgaacagtgtacagcgtcctacacaccacccctgccatcttgctcaaggagatcatactggtggatgatgccagcacagaggagcacctaaaggagaagctggagcagtacgtgaagcagctgcaggtggtgagggtggtgcggcaggaggagcggaaggggctgatcaccgcccggctgctgggggccagcgtggcacaggcggaggtgctcacgttcctggatgcccactgtgagtgcttccacggctggctggagcccctcctggctcgaatcgctgaggacaagacagtggtggtgagcccagacatcgtcaccatcgaccttaatacttttgagttcgccaagcccgtccagaggggcagagtccatagccgaggcaactttgactggagcctgaccttcggctgggaaacacttcctccacatgagaagcagaggcgcaaggatgaaacctaccccatcaaatccccgacgtttgctggtggcctcttctccatctccaagtcctactttgagcacatcggtacctatgataatcagatggagatctggggaggggagaacgtggaaatgtccttccgggtgtggcagtgtgggggccagctggagatcatcccctgctctgtcgtaggccatgtgttccggaccaagagcccccacaccttccccaagggcactagtgtcattgctcgcaatcaagtgcgcctggcagaggtctggatggacagctacaagaagattttctataggagaaatctgcaggcagcaaagatggcccaagagaaatccttcggtgacatttcggaacgactgcagctgagggaacaactgcactgtcacaacttttcctggtacctgcacaatgtctacccagagatgtttgttcctgacctgacgcccaccttctatggtgccatcaagaacctcggcaccaaccaatgcctggatgtgggtgagaacaaccgcggggggaagcccctcatcatgtactcctgccacggccttggcggcaaccagtactttgagtacacaactcagagggaccttcgccacaacatcgcaaagcagctgtgtctacatgtcagcaagggtgctctgggccttgggagctgtcacttcactggcaagaatagccaggtccccaaggacgaggaatgggaattggcccaggatcagctcatcaggaactcaggatctggtacctgcctgacatcccaggacaaaaagccagccatggccccctgcaatcccagtgacccccatcagttgtggctctttgtctaggacccagatcatccccagagagagcccccacaagctcctcaggaaacaggattgctgatgtctgggaacctgatcaccagcttctctggaggccgtaaagatggatttctaaacccactgggtggcaaggcaggaccttcctaatccttgcaacaacattgggcccattttctttccttcacaccgatggaagagaccattaggacatatatttagcctagcgttttcctgttctagaaatagaggctcccaaagtagggaaggcagctgggggagggttcagggcagcaatgctgagttcaagaaaagtacttcaggctgggcacagtggctcatgcctgaaatcctagcactttgggaagacaatgtgggagaatggcttgagcccaggagttcaagaccggcctgagcaacatagtgaggatcccatctctacgcccaccctccccccggcaaaaaaaaaaagctgggtatggtggcttatgcctgtagtcgcagctactcagaaggctgaggtgggaggattgcttgttccccggaggttgaagctacagtgagccttgattgtgtcactgcactccagcctgggcaacaggtaagactctgtctcaaaaaaaaacaaaaaagaagaagaaaagtacttctacagccatgtcctattccttgatcatccaaagcacctgcagagtccagtgaaatgatatattctggctgggcacagtggctcacacctgtaatcctagcactttgggaggccaaggcaggtggatcacctgaggtcagaagtttgaaaccagcctggactacatggtgaaactccatctctactaaaagtacaaaaattagctgggcatgatggcacgcacctgcagtcccagctacttgggaggctgaggcaggagaatcactcgaacccaggaggcagaggttgcagtgagccaagacagcaccattgcaccccagcctgagcaacaagagcgaaactccatctcaggaaaaaaaaaaaaaaaaaaagtatattctaacagacagatcagaggtctaagagatcctcccttgctattattacctgaagtctgtagaactgtttacagatatctccttgacaggtgtcctttatcttactttatctgtacagtaatcctgtgagaaagacaggacagaaaccactgtgcctattttacagatacgaaaactgagacacaggtaaaggggcttgtctgtagtcccatagctagcagatggctggagccaagactgaggctcgttcttcaatgctgagccagggctccttccgctgcaccacaagaacgctagaccactcgccaccagccttctcattccctcttcctccattctaatcatttctagctggctggcctccacagagcataggaaaacagccagggccgggcacggtggctcatgcctgtaatctcaacactctgggaggccgagccgggtggataacctgaggtcaggaattcgagaccagcctggccaacatggtaaaaccccatctctactaaaaatataaaaattagccaggcatggtggcgcacacctgtaatcccagctactcaagaggctgaggcaggagaattgcttaaatctgggaggcggaagttgcagtgagccaagatcgcgccactgaactccagcctaggcaacaagagcaaaactccatctccaaaaaaaagaaaggaaaaacagggccaggtagccattgtggagagagcacacttaggaatcctgggatgttagtgttaaaagaaagctcctggagccagtgattctcaggtttgtcccagaacccttttttctaagccccatataaaaggtagattaaaaaaacaaagtagcatgagtgaaattgagagagggacaggtaatgccttccagcccctaacttctaacaatctggaagcacaacgtgaaaatcacgtagcccaaccctatcattttcatattatgaaactgagtccaggtaagtgaatctgtccaaggtcacccagcaaggtatcagtagccctgagggtaaggactctgataaggctcgggagggtcctggaaagcctgaggcggcaggaagagtgtgcagagttgagcgtgtctggaaggctgatccactgctgggcccacatcaaagcccccatggggagcagacccgactgcacatggctcttttgctggaagaagagcatggctgcgcagaggactaaaatttcatctgggaaggcttcttttgactgtcagtagcaggatgtcaccagatgagggtgctatgggaccacagctgtctttgttcccattgcaactcaaccctgcgg

SEQ ID NO: 292386 - DNA, 4556 bp, Artificial Sequence
  derived and/or modified sequence
aacaggccctgctgtgagggaccacgaggcagtgccaggatgaaagagttggagtaacctaggtgattctgagtgaatcagtcaggaggccttcctggagggggctgaggccccagcttgtggccaccacaacgtatcaagctatctccagggttgggctcaggactcagagctgacgcagctggggtgccccttggttctggaggatgaggctcctccgcagacgccacatgcccctgcgcctggccatggtgggctgcgcctttgtgctcttcctcttcctcctgcatagggatgtgagcagcagagaggaggccacagagaagccgtggctgaagtccctggtgagccggaaggatcacgtcctggacctcatgctggaggccatgaacaaccttagagattcaatgcccaagctccaaatcagggctccagaagcccagcagactctgttctccataaaccagtcctgcctccctgggttctataccccagctgaactgaagcccttctgggaacggccaccacaggaccccaatgcccctggggcagatggaaaagcatttcagaagagcaagtggacccccctggagacccaggaaaaggaagaaggctataagaagcactgtttcaatgcctttgccagcgaccggatctccctgcagaggtccctggggccagacacccgaccacctgagtgtgtggaccagaagttccggcgctgccccccactggccaccaccagcgtgatcattgtgttccacaacgaagcctggtccacactgctgcgaacagtgtacagcgtcctacacaccacccctgccatcttgctcaaggagatcatactggtggatgatgccagcacagaggagcacctaaaggagaagctggagcagtacgtgaagcagctgcaggtggtgagggtggtgcggcaggaggagcggaaggggctgatcaccgcccggctgctgggggccagcgtggcacaggcggaggtgctcacgttcctggatgcccactgtgagtgcttccacggctggctggagcccctcctggctcgaatcgctgaggacaagacagtggtggtgagcccagacatcgtcaccatcgaccttaatacttttgagttcgccaagcccgtccagaggggcagagtccatagccgaggcaactttgactggagcctgaccttcggctgggaaacacttcctccacatgagaagcagaggcgcaaggatgaaacctaccccatcaaatccccgacgtttgctggtggcctcttctccatctccaagtcctactttgagcacatcggtacctatgataatcagatggagatctggggaggggagaacgtggaaatgtccttccgggtgtggcagtgtgggggccagctggagatcatcccctgctctgtcgtaggccatgtgttccggaccaagagcccccacaccttccccaagggcactagtgtcattgctcgcaatcaagtgcgcctggcagaggtctggatggacagctacaagaagattttctataggagaaatctgcaggcagcaaagatggcccaagagaaatccttcggtgacatttcggaacgactgcagctgagggaacaactgcactgtcacaacttttcctggtacctgcacaatgtctacccagagatgtttgttcctgacctgacgcccaccttctatggtgccatcaagaacctcggcaccaaccaatgcctggatgtgggtgagaacaaccgcggggggaagcccctcatcatgtactcctgccacggccttggcggcaaccagtactttgagtacacaactcagagggaccttcgccacaacatcgcaaagcagctgtgtctacatgtcagcaagggtgctctgggccttgggagctgtcacttcactggcaagaatagccaggtccccaaggacgaggaatgggaattggcccaggatcagctcatcaggaactcaggatctggtacctgcctgacatcccaggacaaaaagccagccatggccccctgcaatcccagtgacccccatcagttgtggctctttgtctaggacccagatcatccccagagagagcccccacaagctcctcaggaaacaggattgctgatgtctgggaacctgatcaccagcttctctggaggccgtaaagatggatttctaaacccactgggtggcaaggcaggaccttcctaatccttgcaacaacattgggcccattttctttccttcacaccgatggaagagaccattaggacatatatttagcctagcgttttcctgttctagaaatagaggctcccaaagtagggaaggcagctgggggagggttcagggcagcaatgctgagttcaagaaaagtacttcaggctgggcacagtggctcatgcctgaaatcctagcactttgggaagacaatgtgggagaatggcttgagcccaggagttcaagaccggcctgagcaacatagtgaggatcccatctctacgcccaccctccccccggcaaaaaaaaaaagctgggtatggtggcttatgcctgtagtcgcagctactcagaaggctgaggtgggaggattgcttgttccccggaggttgaagctacagtgagccttgattgtgtcactgcactccagcctgggcaacaggtaagactctgtctcaaaaaaaaacaaaaaagaagaagaaaagtacttctacagccatgtcctattccttgatcatccaaagcacctgcagagtccagtgaaatgatatattctggctgggcacagtggctcacacctgtaatcctagcactttgggaggccaaggcaggtggatcacctgaggtcagaagtttgaaaccagcctggactacatggtgaaactccatctctactaaaagtacaaaaattagctgggcatgatggcacgcacctgcagtcccagctacttgggaggctgaggcaggagaatcactcgaacccaggaggcagaggttgcagtgagccaagacagcaccattgcaccccagcctgagcaacaagagcgaaactccatctcaggaaaaaaaaaaaaaaaaaaagtatattctaacagacagatcagaggtctaagagatcctcccttgctattattacctgaagtctgtagaactgtttacagatatctccttgacaggtgtcctttatcttactttatctgtacagtaatcctgtgagaaagacaggacagaaaccactgtgcctattttacagatacgaaaactgagacacaggtaaaggggcttgtctgtagtcccatagctagcagatggctggagccaagactgaggctcgttcttcaatgctgagccagggctccttccgctgcaccacaagaacgctagaccactcgccaccagccttctcattccctcttcctccattctaatcatttctagctggctggcctccacagagcataggaaaacagccagggccgggcacggtggctcatgcctgtaatctcaacactctgggaggccgagccgggtggataacctgaggtcaggaattcgagaccagcctggccaacatggtaaaaccccatctctactaaaaatataaaaattagccaggcatggtggcgcacacctgtaatcccagctactcaagaggctgaggcaggagaattgcttaaatctgggaggcggaagttgcagtgagccaagatcgcgccactgaactccagcctaggcaacaagagcaaaactccatctccaaaaaaaagaaaggaaaaacagggccaggtagccattgtggagagagcacacttaggaatcctgggatgttagtgttaaaagaaagctcctggagccagtgattctcaggtttgtcccagaacccttttttctaagccccatataaaaggtagattaaaaaaacaaagtagcatgagtgaaattgagagagggacaggtaatgccttccagcccctaacttctaacaatctggaagcacaacgtgaaaatcacgtagcccaaccctatcattttcatattatgaaactgagtccaggtaagtgaatctgtccaaggtcacccagcaaggtatcagtagccctgagggtaaggactctgataaggctcgggagggtcctggaaagcctgaggcggcaggaagagtgtgcagagttgagcgtgtctggaaggctgatccactgctgggcccacatcaaagcccccatggggagcagacccgactgcacatggctcttttgctggaagaagagcatggctgcgcagaggactaaaatttcatctgggaaggcttcttttgactgtcagtagcaggatgtcaccagatgagggtgctatgggaccacagctgtctttgttcccattgcaactcaaccctgcgggaggccgcctacatccctgagagccttctggagcctacagaggagacattggccagccaaaaggaaaggagtggccagggtacgacctggagtagggaagggaaaaagttcccggaaagaagagaattggatgagaggtctcagtggaaat

SEQ ID NO: 292387 - DNA, 2543 bp, Artificial Sequence
  derived and/or modified sequence
aaacccgggagccaccccgcggcgcggctgcggctttgcctcggcgcgacagggaaaataaaagaagcaaaaacaggccctgctgtgagggaccacgaggcagtgccaggatgaaagagttggagtaacctaggtgattctgagtgaatcagtcaggaggccttcctggagggggctgaggccccagcttgtggccaccacaacgtatcaagctatctccagggttgggctcaggactcagagctgacgcagctggggtgccccttggttctggaggatgaggctcctccgcagacgccacatgcccctgcgcctggccatggtgggctgcgcctttgtgctcttcctcttcctcctggtgagccggaaggatcacgtcctggacctcatgctggaggccatgaacaaccttagagattcaatgcccaagctccaaatcagggctccagaagcccagcagactctgttctccataaaccagtcctgcctccctgggttctataccccagctgaactgaagcccttctgggaacggccaccacaggaccccaatgcccctggggcagatggaaaagcatttcagaagagcaagtggacccccctggagacccaggaaaaggaagaaggctataagaagcactgtttcaatgcctttgccagcgaccggatctccctgcagaggtccctggggccagacacccgaccacctgagtgtgtggaccagaagttccggcgctgccccccactggccaccaccagcgtgatcattgtgttccacaacgaagcctggtccacactgctgcgaacagtgtacagcgtcctacacaccacccctgccatcttgctcaaggagatcatactggtggatgatgccagcacagaggagcacctaaaggagaagctggagcagtacgtgaagcagctgcaggtggtgagggtggtgcggcaggaggagcggaaggggctgatcaccgcccggctgctgggggccagcgtggcacaggcggaggtgctcacgttcctggatgcccactgtgagtgcttccacggctggctggagcccctcctggctcgaatcgctgaggacaagacagtggtggtgagcccagacatcgtcaccatcgaccttaatacttttgagttcgccaagcccgtccagaggggcagagtccatagccgaggcaactttgactggagcctgaccttcggctgggaaacacttcctccacatgagaagcagaggcgcaaggatgaaacctaccccatcaaatccccgacgtttgctggtggcctcttctccatctccaagtcctactttgagcacatcggtacctatgataatcagatggagatctggggaggggagaacgtggaaatgtccttccgggtgtggcagtgtgggggccagctggagatcatcccctgctctgtcgtaggccatgtgttccggaccaagagcccccacaccttccccaagggcactagtgtcattgctcgcaatcaagtgcgcctggcagaggtctggatggacagctacaagaagattttctataggagaaatctgcaggcagcaaagatggcccaagagaaatccttcggtgacatttcggaacgactgcagctgagggaacaactgcactgtcacaacttttcctggtacctgcacaatgtctacccagagatgtttgttcctgacctgacgcccaccttctatggtgccatcaagaacctcggcaccaaccaatgcctggatgtgggtgagaacaaccgcggggggaagcccctcatcatgtactcctgccacggccttggcggcaaccagtactttgagtacacaactcagagggaccttcgccacaacatcgcaaagcagctgtgtctacatgtcagcaagggtgctctgggccttgggagctgtcacttcactggcaagaatagccaggtccccaaggacgaggaatgggaattggcccaggatcagctcatcaggaactcaggatctggtacctgcctgacatcccaggacaaaaagccagccatggccccctgcaatcccagtgacccccatcagttgtggctctttgtctaggacccagatcatccccagagagagcccccacaagctcctcaggaaacaggattgctgatgtctgggaacctgatcaccagcttctctggaggccgtaaagatggatttctaaacccactgggtggcaaggcaggaccttcctaatccttgcaacaacattgggcccattttctttccttcacaccgatggaagagaccattaggacatatatttagcctagcgttttcctgttctagaaatagaggctcccaaagtagggaaggcagctgggggagggttcagggcagcaatgctgagttcaagaaaagtacttcaggctgggcacagtggctcatgcctgaaatcctagcactttgggaagacaatgtgggagaatggcttgagcccaggagttcaagaccggcctgagcaacatagtgaggatcccatctctacgcccaccctccccccggc

SEQ ID NO: 292388 - protein, 254 aa, Artificial Sequence
  derived and/or modified sequence
MVREANIKQATAEKQLKEAQGKIDVLQAEVAALKTLVLSSSPTSPTQEPLPGGKTPFKKGHTRNKSTSSAMSGSHQDLSVIQPIVKDCKEADLSLYNEFRLWKDEPTMDRTCPFLDKIYQEDIFPCLTFSKSELASAVLEAVENNTLSIEPVGLQPIRFVKASAVECGGPKKCALTGQSKSCKHRIKLGDSSNYYYISPFCRYRITSVCNFFTYIRYIQQGLVKQQDVDQMFWEVMQLRKEMSLAKLGYFKEEL

SEQ ID NO: 292389 - DNA, 1383 bp, Artificial Sequence
  derived and/or modified sequence
atggccaatgacccactggagggatttcacgaagtcaacttggcctccccaacgagtccggacctgctgggcgtgtacgaatcaggtacacaggagcagacaacgtccccatccgtcatctatcggccacatccgtcagcactgagtagtgtcccgatacaagctaatgcactcgacgtctcagaactgccaactcagccagtgtatagttcacccaggagactgaattgtgcggagatttcaagtataagttttcatgtcactgacccagccccttgctcgacaagtggagtcaccgccggactaaccaaattgactacacggaaagacaattacaatgccgaacgcgaatttcttcaaggagctaccatcacagaggcttgcgacggaagcgacgatattttcggactttccaccgatagcttatcaagactacggtctccatctgtcctggaagtaagagagaagggctatgagcggctcaaggaggagctcgctaaggctcagcgtgagctgaagctgaaagatgaagagtgtgagcggttgtcgaaggtgcgggaccagctaggccaggaactggaggagctgactgcgtctctatttgaggaagctcataagatggttcgtgaggcaaatatcaagcaggctacagcagagaaacaactaaaagaggcgcaggggaaaatcgacgttctgcaggccgaggttgctgctcttaaaacactggtgctctcctcttcacccacatcgccgacacaggaacccctgcccgggggcaaaacgccattcaagaagggtcacacgagaaataagagcactagttctgccatgtcaggctctcaccaggatctgtctgtcattcaaccaatagtaaaggattgtaaggaggccgacctgtccctgtacaatgaattccggctgtggaaggacgaacctaccatggatcgcacctgtcctttcctggacaagatctaccaggaagacatcttcccttgcctgaccttttccaagtccgagctagcctccgcagtattggaggcagtggaaaacaatacattaagcatagagcccgtcggcctacagcctattaggtttgtgaaggcttctgctgtggaatgcggaggtccaaagaaatgtgccctaacaggccagtccaagtcatgcaagcatcggattaaattgggggattctagtaactattactatatctctcccttttgccgctaccgcattaccagcgtgtgtaattttttcacatacattaggtatatccagcagggcttggtcaagcagcaggatgtggaccagatgttttgggaagtgatgcagctgaggaaagagatgtcactggcaaaactgggatattttaaggaggaactttag

SEQ ID NO: 292390 - DNA, 1383 bp, Artificial Sequence
  derived and/or modified sequence
atggccaatgaccccctggagggcttccacgaggtgaacctggccagccccaccagcccagacctgctgggcgtgtatgagagcggcacccaggagcagaccaccagccccagcgtcatctaccggccccaccccagcgccctgagctctgtgcccatccaggccaatgccctggatgtgtctgagctgcccacccagcctgtgtacagcagcccccggcggctgaactgtgccgagatcagcagcatctccttccacgtgacagatcctgccccctgcagcaccagcggcgtgacagctggcctgaccaagctgaccaccaggaaggacaactacaatgctgagcgggagttcctgcagggcgccaccatcacagaggcctgtgatggcagtgatgacatcttcggcctgagcacagacagcctgagccggctgcggagccccagcgtgctggaggtgcgggagaagggctatgaaaggctgaaggaggagctggccaaggcccagcgggagctgaagctgaaggatgaggagtgtgagcggctgagcaaggtgcgggaccagctgggccaggagctggaggagctgacagccagcctgtttgaggaggcccacaagatggtgcgggaggccaacatcaagcaggccacagctgagaagcagctgaaggaggcccagggcaagattgatgtgctgcaggccgaggtggccgccctgaagaccctggtgctgagcagcagccccaccagccccacccaggagcccctgcccggcggcaagacccccttcaagaagggccacaccaggaacaagagcaccagcagcgccatgagcggcagccaccaggacctgagcgtcatccagcccatcgtgaaggactgcaaggaggccgacctgagcctgtacaatgagttccggctgtggaaggatgagcccaccatggacaggacctgccccttcctggacaagatctaccaggaggacatcttcccctgcctgaccttcagcaagtctgagctggccagcgctgtgctggaggccgtggagaacaacaccctgagcattgagcctgtgggcctgcagcccatccgctttgtgaaggccagcgctgtggagtgtggcggccccaagaagtgtgccctgaccggccagagcaagagctgcaagcaccgcatcaagctgggggacagcagcaactactactacatcagccccttctgccgctaccgcatcacctctgtgtgcaacttcttcacctacatccgctacatccagcagggcctggtgaagcagcaggatgtggaccagatgttctgggaggtgatgcagctgaggaaggagatgagcctggccaagctgggctacttcaaggaggagctgtag

SEQ ID NO: 292391 - DNA, 1383 bp, Artificial Sequence
  derived and/or modified sequence
atggccaacgaccccctggagggcttccacgaggtgaacctggccagccccacctccccggatctcctgggcgtgtacgagtccggtactcaggagcagactacgtccccgtcggtcatctaccgtccccatccttcagcactttcctcagttcctatccaggctaacgctctggacgtcagcgaactgcctacacagcctgtatactctagtccgcggagattaaactgcgccgaaattagtagcataagcttccacgtgactgatcccgctccatgctcaacatctggcgtgacggccggacttacaaagctgacaacacgcaaagataattacaatgctgaaagggagttcctccagggcgctaccattaccgaggcttgcgacggaagcgatgatatattcggtttatctactgattctttatcacgcctgcggtccccatctgttttggaagtccgcgagaaagggtatgagaggctcaaggaggagttggcgaaggctcagagggagctgaaattgaaggatgaagagtgtgaacgcctcagtaaagtgagagatcagctgggtcaagaattggaggaactcacggccagcctttttgaagaggcacacaagatggtgagagaggccaacataaagcaagcaactgcagagaagcaattgaaggaggcgcaggggaagatcgatgttctccaagcagaggtggccgctctgaagactctggtgctgtcatcaagccccaccagccccacacaggaacctctgccgggcggcaaaactccgttcaaaaaaggccatacacgaaacaaatcaacatccagcgctatgagtggatctcaccaggatctgtctgtcatccagccaatcgtgaaggattgcaaggaagctgacttatctctgtataacgaattccgcctgtggaaagacgagcccacgatggatcgtacttgcccctttttagataaaatctaccaggaagatatctttccatgcttgaccttcagcaagtctgagttggcgtccgccgtcctggaggccgtggaaaacaatacgctctctattgagcccgtcggcctccagcccattcgctttgtaaaggcaagtgctgtggagtgcggaggaccaaagaagtgcgcgttaacaggccaatccaaatcttgcaaacatcggatcaagctgggagacagctctaattactactatatctcccccttctgtcgctaccgcatcaccagtgtttgcaatttctttacctatattcgctatatccagcagggtttagttaaacagcaggacgtcgaccaaatgttctgggaagtgatgcagctcaggaaagagatgtctttagccaagttaggatactttaaagaggagctctag

SEQ ID NO: 292392 - DNA, 1383 bp, Artificial Sequence
  derived and/or modified sequence
atggcaaatgacccactcgaggggtttcatgaggttaacctggcctcacccacctcaccagaccttttaggtgtatatgaaagcggcacccaggagcagaccacgtccccctcagtgatctaccgcccacatccatccgccctgtcctccgttcccatacaggccaacgctctcgacgtgagcgaactgcctactcagccagtatattctagccctcgccgacttaattgtgccgaaatctcatccatctcctttcacgtgaccgatccggcaccatgcagcacttcgggcgttaccgccggactgactaaacttacaacgaggaaggacaactataacgcagaacgagagtttctgcagggagcaacaatcaccgaggcgtgtgatggttccgatgacatctttggactgagcactgactctctgagcagactgcggagcccttccgtgctcgaagtccgggagaaggggtatgagcggctgaaggaagagctcgctaaagcccagcgggaacttaaactgaaggacgaggaatgcgaacggctatctaaagtgagagaccagttaggacaggaacttgaggagctgaccgcctctttgttcgaggaggcccataagatggtacgggaggccaatatcaagcaagccacagctgaaaaacaacttaaggaggcacaagggaagattgatgttctgcaggctgaggttgccgctcttaaaaccctcgtgctgtcatcaagcccaacgtcacccacacaggaacccttaccaggcggtaagacccccttcaagaaggggcacaccaggaacaagtctacctcttccgctatgtcaggatcgcaccaggatttgtctgtgattcagcccatagtgaaagattgtaaagaggccgacctgtcactgtacaatgagttcagattatggaaagatgagcctactatggacaggacatgcccatttctggataaaatataccaggaggatatattcccttgcttaacttttagcaaatccgaactcgcctctgctgtcttggaggccgtggagaataacaccctcagcattgaacctgttggcctgcagcctatacgctttgtgaaagcctcagctgtcgagtgcggcggaccaaagaaatgcgctctgaccgggcaatccaagagctgcaaacatagaatcaagcttggcgacagttctaactactactatatctcccccttttgcaggtataggatcacgtcagtgtgtaatttcttcacatacattcgatacatccagcaaggtcttgttaaacaacaggacgttgaccagatgttctgggaggtgatgcagcttcgaaaggaaatgtctcttgctaaactcggatattttaaagaggagctctag

SEQ ID NO: 292393 - DNA, 2840 bp, Artificial Sequence
  derived and/or modified sequence
gagcttcccggctgctttgtttacctaagcaagcctgggcaatggcgggcgtccctcccccagcctcgttgccgccttgcagtttgatctcagactgctgtgctagcaatcagcgagattccgtgggcgtaggaccctctgagccaggtgtgggatatagtctcgtggtgcgccgtttcttaagccggtctgaaaagcgcaatattcggatgggagtgacccgattttccaggaactgaagttaaaagatgaagaatgtgagaggctttcaaaagtgcgagatcaacttggacaggaattggaagaactcacagctagtctatttgaggaagctcataaaatggtgagagaagcaaatatcaagcaggcaacagcagaaaaacagctaaaagaagcacaaggaaaaattgatgtacttcaagctgaagtagctgcattgaagacacttgtattgtccagttctccaacatcacctacgcaggagcctttgccaggtggaaagacaccttttaaaaaggggcatacaagaaataaaagcacaagcagtgctatgagtggcagtcatcaggacctcagtgtgatacagccaattgtaaaagactgcaaagaggctgacttatccttgtataatgaattccgattgtggaaggatgagcccacaatggacaggacgtgtcctttcttagacaaaatctaccaggaagatatctttccatgtttaacattctcaaaaagtgagttggcttcagctgttctggaggctgtggaaaacaatactctaagcattgaaccagtgggattacaacctatccggtttgtgaaagcttctgcagttgaatgcggaggaccaaaaaaatgtgctctcactggccagagtaagtcctgtaaacacagaattaaattaggggactcaagcaactattattatatttctcctttttgcagatacaggatcacttctgtatgtaacttttttacatacattcgatacattcagcagggactcgtgaaacagcaggatgttgatcagatgttttgggaggttatgcagttgagaaaagagatgtcattggcaaagctgggttatttcaaagaggaactctgatgctctgcgtgggaccatgcctgaactccccgaataactgaaaaatggctgaatatttttatggttacttgatatttatttccaaggagtgagcctaagacttttttccccttttgcaaattgctctaagaagtaccatgatttcttttaaactgatctatgctgtgtttgcttattctttagttgaacacactatgaagaattccaggtgtactagtgaatgtaatttatagttgccaaaaaaaaaaaaaacctgaaataaataaatgttagattgaatgtgtgtacattttctcttctagctctgacatggcatttagggttagcagaatgtattaaatagtaattttcaaactacacagtagcttccttccttgtgagaggcaagaaagaagtctgagtggatagtactcactttccaaggcccccacctctagaatggctttatttttatctgttttctatattgggtttcaaaaaagattttatttgaagaaatacttctgctgctacaaagtttgaaagttactattttaattattctgctctctgtaactgaaagaatccctttattttggttattcattaaaatataatagaaggcagtcagattttatcccagagatgtattcctgagtgtcttgatatagtgtattcatgttttatatgtgttgaccactatattgtcattggagggacatagatgtaaatgagtttgacgtgtgtcaaaggggtttaaaggggtgtggattgaatgaatggtacgtgcgaagtatatgctgattatagaaccacttgatctctgcattccaaattgtaaaactgactcaactggagaaattataacaaagaggtttgtggtagacatgtaataagtatagaaaagcaaaaagaaaagagaaactgctttagtttctgtttagagaaagctgctgttaatatttttggatagtagcctttcagctttcagatattttctacttacatatgcatatttttgaaacaaaaagtaggctttttttttgctttttaaacctaaacattaaatatattttcccttgggtaaacctacacatcctaatccctgtttatagaattttaacataatttaattgtgtttggagatgaggtggttttcagtttatttttcatattataatgctgtgacgagtatccttatctgtacacttctgaacattgtggagttctttcatgtggatgcctggagataaaattgtgtcgagatatatatgtatttttaaatgtttgatctgcattgctagattgccatccagaaaagttaatcaatttgtattcacagcagcagtgtacaagagggctggttttctgaagataacatttttttcagtcctgttcagaggtttggtcaatcttacctgtagatgacttcagccaccaggctggatgggagcccacagacaaaaggacattggtgtatgttatggtgaaaaccatcagtaccatgcctagctcaagaatgtgaaattgaacctgaaaaaaactttgaacctacaattttatgttctgaaaatagttattctaatgtgagggcattaataagaatatgtaccatcaaagcttcagaagattttccgtacaaactaaaatcacttttggagaaagtacctaaataaaaagagaaacaaatccaggagatactgtacggtttgaaagaaaggtaatcaaatactcagaaaaagtttgttgatgactt

SEQ ID NO: 292394 - DNA, 2674 bp, Artificial Sequence
  derived and/or modified sequence
tgtttacctaagcaagcctgggcaatggcgggcgtccctcccccagcctcgttgccgccttgcagtttgatctcagactgctgtgctagcaatcagcgagattccgtgggcgtaggaccctctgagccaggaactgaagttaaaagatgaagaatgtgagaggctttcaaaagtgcgagatcaacttggacaggaattggaagaactcacagctagtctatttgaggaagctcataaaatggtgagagaagcaaatatcaagcaggcaacagcagaaaaacagctaaaagaagcacaaggaaaaattgatgtacttcaagctgaagtagctgcattgaagacacttgtattgtccagttctccaacatcacctacgcaggagcctttgccaggtggaaagacaccttttaaaaaggggcatacaagaaataaaagcacaagcagtgctatgagtggcagtcatcaggacctcagtgtgatacagccaattgtaaaagactgcaaagaggctgacttatccttgtataatgaattccgattgtggaaggatgagcccacaatggacaggacgtgtcctttcttagacaaaatctaccaggaagatatctttccatgtttaacattctcaaaaagtgagttggcttcagctgttctggaggctgtggaaaacaatactctaagcattgaaccagtgggattacaacctatccggtttgtgaaagcttctgcagttgaatgcggaggaccaaaaaaatgtgctctcactggccagagtaagtcctgtaaacacagaattaaattaggggactcaagcaactattattatatttctcctttttgcagatacaggatcacttctgtatgtaacttttttacatacattcgatacattcagcagggactcgtgaaacagcaggatgttgatcagatgttttgggaggttatgcagttgagaaaagagatgtcattggcaaagctgggttatttcaaagaggaactctgatgctctgcgtgggaccatgcctgaactccccgaataactgaaaaatggctgaatatttttatggttacttgatatttatttccaaggagtgagcctaagacttttttccccttttgcaaattgctctaagaagtaccatgatttcttttaaactgatctatgctgtgtttgcttattctttagttgaacacactatgaagaattccaggtgtactagtgaatgtaatttatagttgccaaaaaaaaaaaaaacctgaaataaataaatgttagattgaatgtgtgtacattttctcttctagctctgacatggcatttagggttagcagaatgtattaaatagtaattttcaaactacacagtagcttccttccttgtgagaggcaagaaagaagtctgagtggatagtactcactttccaaggcccccacctctagaatggctttatttttatctgttttctatattgggtttcaaaaaagattttatttgaagaaatacttctgctgctacaaagtttgaaagttactattttaattattctgctctctgtaactgaaagaatccctttattttggttattcattaaaatataatagaaggcagtcagattttatcccagagatgtattcctgagtgtcttgatatagtgtattcatgttttatatgtgttgaccactatattgtcattggagggacatagatgtaaatgagtttgacgtgtgtcaaaggggtttaaaggggtgtggattgaatgaatggtacgtgcgaagtatatgctgattatagaaccacttgatctctgcattccaaattgtaaaactgactcaactggagaaattataacaaagaggtttgtggtagacatgtaataagtatagaaaagcaaaaagaaaagagaaactgctttagtttctgtttagagaaagctgctgttaatatttttggatagtagcctttcagctttcagatattttctacttacatatgcatatttttgaaacaaaaagtaggctttttttttgctttttaaacctaaacattaaatatattttcccttgggtaaacctacacatcctaatccctgtttatagaattttaacataatttaattgtgtttggagatgaggtggttttcagtttatttttcatattataatgctgtgacgagtatccttatctgtacacttctgaacattgtggagttctttcatgtggatgcctggagataaaattgtgtcgagatatatatgtatttttaaatgtttgatctgcattgctagattgccatccagaaaagttaatcaatttgtattcacagcagcagtgtacaagagggctggttttctgaagataacatttttttcagtcctgttcagaggtttggtcaatcttacctgtagatgacttcagccaccaggctggatgggagcccacagacaaaaggacattggtgtatgttatggtgaaaaccatcagtaccatgcctagctcaagaatgtgaaattgaacctgaaaaaaactttgaacctacaattttatgttctgaaaatagttattctaatgtgagggcattaataagaatatgtaccatcaaagcttcagaagattttccgtacaaactaaaatcacttttggagaaagtacctaaataaaaagagaaacaaatcc

SEQ ID NO: 292395 - DNA, 1383 bp, Artificial Sequence
  derived and/or modified sequence
atggccaacgaccccctggagggcttccacgaggtgaacctggccagccccaccagccccgacctgctgggcgtgtacgagagcggcacccaggagcagaccaccagccccagcgtgatctacagaccccaccccagcgccctgagcagcgtgcccatccaggccaacgccctggacgtgagcgagctgcccacccagcccgtgtacagcagccccagaagactgaactgcgccgagatcagcagcatcagcttccacgtgaccgaccccgccccctgcagcaccagcggcgtgaccgccggcctgaccaagctgaccaccagaaaggacaactacaacgccgagagagagttcctgcagggcgccaccatcaccgaggcctgcgacggcagcgacgacatcttcggcctgagcaccgacagcctgagcagactgagaagccccagcgtgctggaggtgagagagaagggctacgagagactgaaggaggagctggccaaggcccagagagagctgaagctgaaggacgaggagtgcgagagactgagcaaggtgagagaccagctgggccaggagctggaggagctgaccgccagcctgttcgaggaggcccacaagatggtgagagaggccaacatcaagcaggccaccgccgagaagcagctgaaggaggcccagggcaagatcgacgtgctgcaggccgaggtggccgccctgaagaccctggtgctgagcagcagccccaccagccccacccaggagcccctgcccggcggcaagacccccttcaagaagggccacaccagaaacaagagcaccagcagcgccatgagcggcagccaccaggacctgagcgtgatccagcccatcgtgaaggactgcaaggaggccgacctgagcctgtacaacgagttcagactgtggaaggacgagcccaccatggacagaacctgccccttcctggacaagatctaccaggaggacatcttcccctgcctgaccttcagcaagagcgagctggccagcgccgtgctggaggccgtggagaacaacaccctgagcatcgagcccgtgggcctgcagcccatcagattcgtgaaggccagcgccgtggagtgcggcggccccaagaagtgcgccctgaccggccagagcaagagctgcaagcacagaatcaagctgggcgacagcagcaactactactacatcagccccttctgcagatacagaatcaccagcgtgtgcaacttcttcacctacatcagatacatccagcagggcctggtgaagcagcaggacgtggaccagatgttctgggaggtgatgcagctgagaaaggagatgagcctggccaagctgggctacttcaaggaggagctgtag

SEQ ID NO: 292396 - DNA, 948 bp, Artificial Sequence
  derived and/or modified sequence
atggccaacgaccccctggagggcttccacgaggtgaacctggccagccccaccagccccgacctgctgggcgtgtacgagagcggcacccaggagcagaccaccagccccagcgtgatctacagaccccaccccagcgccctgagcagcgtgcccatccaggccaacgccctggacgtgagcgagctgcccacccagcccgtgtacagcagccccagaagactgaactgcgccgagatcagcagcatcagcttccacgtgaccgaccccgccccctgcagcaccagcggcgtgaccgccggcctgaccaagctgaccaccagaaaggacaactacaacgccgagagagagttcctgcagggcgccaccatcaccgaggcctgcgacggcagcgacgacatcttcggcctgagcaccgacagcctgagcagactgagaagccccagcgtgctggaggtgagagagaagggctacgagagactgaaggaggagctggccaaggcccagagagagctgaagctgaaggacgaggagtgcgagagactgagcaaggtgagagaccagctgggccaggagctggaggagctgaccgccagcctgttcgaggaggcccacaagatggtgagagaggccaacatcaagcaggccaccgccgagaagcagctgaaggaggcccagggcaagatcgacgtgctgcaggccgaggtggccgccctgaagaccctggtgctgagcagcagccccaccagccccacccaggagcccctgcccggcggcaagacccccttcaagaagggccacaccagaaacaagagcaccagcagcgccatgagcggcagccaccaggacctgagcgtgatccagcccatcgtgaaggactgcaaggaggtgacccaccagggcctgagccccctgaccctgctgatcctggtgagcagccaccactag

SEQ ID NO: 292397 - DNA, 1188 bp, Artificial Sequence
  derived and/or modified sequence
atggccaacgaccccctggagggcttccacgaggtgaacctggccagccccaccagccccgacctgctgggcgtgtacgagagcggcacccaggagcagaccaccagccccagcgtgatctacagaccccaccccagcgccctgagcagcgtgcccatccaggccaacgccctggacgtgagcgagctgcccacccagcccgtgtacagcagccccagaagactgaactgcgccgagatcagcagcatcagcttccacgtgaccgaccccgccccctgcagcaccagcggcgtgaccgccggcctgaccaagctgaccaccagaaaggacaactacaacgccgagagagagttcctgcagggcgccaccatcaccgaggcctgcgacggcagcgacgacatcttcggcctgagcaccgacagcctgagcagactgagaagccccagcgtgctggaggtgagagagaagggctacgagagactgaaggaggagctggccaaggcccagagagagctgaagctgaaggacgaggagtgcgagagactgagcaaggtgagagaccagctgggccaggagctggaggagctgaccgccagcctgttcgaggaggcccacaagatggtgagagaggccaacatcaagcaggccaccgccgagaagcagctgaaggaggcccagggcaagatcgacgtgctgcaggccgaggtggccgccctgaagaccctggtgctgagcagcagccccaccagccccacccaggagcccctgcccggcggcaagacccccttcaagaagggccacaccagaaacaagagcaccagcagcgccatgagcggcagccaccaggacctgagcgtgatccagcccatcgtgaaggactgcaaggaggccgacctgagcctgtacaacgagttcagactgtggaaggacgagcccaccatggacagaacctgccccttcctggacaagatctaccaggaggacatcttcccctgcctgaccttcagcaagagcgagctggccagcgccgtgctggaggccgtggagaacaacaccctgagcatcgagcccgtgggcctgcagcccatcagattcgtgaaggccagcgccgtggagtgcggcggccccaagagcctgctgtacgtgaccttcctgcacaccttcgacaccttcagcagagacagctag

SEQ ID NO: 292398 - DNA, 501 bp, Artificial Sequence
  derived and/or modified sequence
atggccaacgaccccctggagggcttccacgaggtgaacctggccagccccaccagccccgacctgctgggcgtgtacgagagcggcacccaggagcagaccaccagccccagcgtgatctacagaccccaccccagcgccctgagcagcgtgcccatccaggccaacgccctggacgtgagcgagctgcccacccagcccgtgtacagcagccccagaagactgaactgcgccgagatcagcagcatcagcttccacgtgaccgaccccgccccctgcagcaccagcggcgtgaccgccggcctgaccaagctgaccaccagaaaggacaactacaacgccgagagagagttcctgcagggcgccaccatcaccgaggcctgcgacggcagcgacgacatcttcggcctgagcaccgacagcctgagcagactgagaagccccagcgtgctggaggtgagagagaagggctacgagagactgaaggaggagctggcctag

SEQ ID NO: 292399 - DNA, 948 bp, Artificial Sequence
  derived and/or modified sequence
atggctaacgacccactcgaggggttccacgaagtcaacctggctagtcctacatcgccggatctgttgggggtttacgaatcggggacccaggagcagacaaccagcccatcagtgatctatcggccacacccctcagctttaagttcggtgcccatccaggccaatgccttggatgtcagtgagttaccaacccagcctgtgtactcttccccacgccggctgaattgtgccgaaattagttctatatcattccacgtgacagatccagccccttgttctactagcggcgtgaccgccggactgacaaagctcaccacccgcaaggacaactacaatgctgaaagagaatttctgcaaggagcaaccatcaccgaagcctgtgacgggtccgacgatatcttcggtttgtcaactgattccctttcacgtttgcgctctccatcggtcctggaggttcgtgagaaggggtatgagcggctcaaggaagagcttgcaaaagcccagagggagttgaaactgaaagatgaggaatgtgagcgtctcagcaaggtgcgagatcagttagggcaggagctggaggagttaaccgcatcgctgttcgaagaagctcataaaatggtgcgggaggctaatattaaacaagctacagctgagaaacagttgaaagaggcccaggggaagattgatgttctccaggcagaagtggccgctttgaaaacgctggtgctgagctcctcccccacgagcccaacacaggagcccctgcccggtggaaagactccattcaagaaggggcacactcgcaataagtctacatcttctgcaatgagcggcagtcaccaggatctgtcggtgatccaaccaatagtaaaagattgtaaggaggtgacccaccagggcctgtccccactgaccctgttaattctggtgagtagccatcattag

SEQ ID NO: 292400 - DNA, 1188 bp, Artificial Sequence
  derived and/or modified sequence
atggccaatgaccctttggagggcttccacgaggtgaacctcgcctctcctactagtcccgatcttctcggcgtctatgaaagcggcactcaggagcaaactacctccccaagcgtgatttataggccccacccctccgcccttagctccgtgccaatccaggccaacgccctggacgtatccgaactccccacccagcccgtgtactctagcccgcgacgtcttaactgcgctgagatatccagtatctcttttcatgtgacagaccccgcaccatgttccacttctggagtcaccgctggcttgacaaaattgaccactcgcaaggataactataatgctgaaagggagttcttgcaaggagctaccattaccgaggcctgtgatggcagcgacgacattttcggactcagcactgatagcctcagcagactgagatctccttcggtgcttgaggtgcgggaaaaagggtacgaacgcctcaaggaggaactggccaaggcgcagcgagagctgaagctgaaggacgaagagtgcgagcgcctgagtaaggtcagagatcagctgggccaagagcttgaagagttgacagcttccttgttcgaggaggctcacaaaatggtccgagaggctaacattaagcaggctaccgccgagaaacagctgaaggaggctcagggaaaaatcgacgtgctgcaagctgaggtagccgccctcaagacactggtgctgtcaagttctccaacctcacccactcaggaaccactccccggtggcaagacccccttcaagaaggggcatactcgaaataaaagcacatcttcagcaatgagtggatcacatcaggacttatcggtgatccagcccattgtcaaagactgtaaggaagcggatctgtcactctacaatgaatttagattgtggaaagacgagccgacaatggataggacctgcccgttcttggataagatatatcaggaggacatctttccctgcctgaccttctcaaaaagtgagctggcatctgccgtcctggaggcggtggagaataatacgctgtccatcgagcctgttggtctgcaacctatccggttcgtcaaggcaagcgcagtggagtgcggggggcccaagtctttactctacgtgaccttccttcacacatttgatacattctccagagactcttag

SEQ ID NO: 292401 - DNA, 501 bp, Artificial Sequence
  derived and/or modified sequence
atggctaacgaccccctggaaggcttccatgaagttaacctcgcctcccccacgtctcctgaccttctgggtgtctacgagtccggtactcaagaacagacaacctctccttccgtgatataccggccccacccatccgccctatcctcagtgcccattcaagcaaacgccctagacgtgtcagagctccctacgcagcctgtctattcttctccccgaagactcaactgtgccgaaataagctctatcagttttcacgtgacagacccagccccttgctctaccagcggggtgacggcaggacttactaaacttaccacgagaaaggataactacaacgccgaacgtgaatttctgcaaggtgcgacaatcacagaggcgtgtgacgggtctgacgacatattcggattaagtaccgattccctctctcgtctaaggtcgccatcggttcttgaggtgcgggagaagggatacgagaggctgaaggaggagcttgcctag

SEQ ID NO: 292402 - DNA, 948 bp, Artificial Sequence
  derived and/or modified sequence
atggccaatgaccccctggagggcttccacgaggtgaacctggccagccccaccagcccagacctgctgggcgtgtatgagagcggcacccaggagcagaccaccagccccagcgtcatctaccggccccaccccagcgccctgagctctgtgcccatccaggccaatgccctggatgtgtctgagctgcccacccagcctgtgtacagcagcccccggcggctgaactgtgccgagatcagcagcatctccttccacgtgacagatcctgccccctgcagcaccagcggcgtgacagctggcctgaccaagctgaccaccaggaaggacaactacaatgctgagcgggagttcctgcagggcgccaccatcacagaggcctgtgatggcagtgatgacatcttcggcctgagcacagacagcctgagccggctgcggagccccagcgtgctggaggtgcgggagaagggctatgaaaggctgaaggaggagctggccaaggcccagcgggagctgaagctgaaggatgaggagtgtgagcggctgagcaaggtgcgggaccagctgggccaggagctggaggagctgacagccagcctgtttgaggaggcccacaagatggtgcgggaggccaacatcaagcaggccacagctgagaagcagctgaaggaggcccagggcaagattgatgtgctgcaggccgaggtggccgccctgaagaccctggtgctgagcagcagccccaccagccccacccaggagcccctgcccggcggcaagacccccttcaagaagggccacaccaggaacaagagcaccagcagcgccatgagcggcagccaccaggacctgagcgtcatccagcccatcgtgaaggactgcaaggaggtgacccaccagggcctgagccccctgaccctgctgatcctggtgagcagccaccactag

SEQ ID NO: 292403 - DNA, 1188 bp, Artificial Sequence
  derived and/or modified sequence
atggccaatgaccccctggagggcttccacgaggtgaacctggccagccccaccagcccagacctgctgggcgtgtatgagagcggcacccaggagcagaccaccagccccagcgtcatctaccggccccaccccagcgccctgagctctgtgcccatccaggccaatgccctggatgtgtctgagctgcccacccagcctgtgtacagcagcccccggcggctgaactgtgccgagatcagcagcatctccttccacgtgacagatcctgccccctgcagcaccagcggcgtgacagctggcctgaccaagctgaccaccaggaaggacaactacaatgctgagcgggagttcctgcagggcgccaccatcacagaggcctgtgatggcagtgatgacatcttcggcctgagcacagacagcctgagccggctgcggagccccagcgtgctggaggtgcgggagaagggctatgaaaggctgaaggaggagctggccaaggcccagcgggagctgaagctgaaggatgaggagtgtgagcggctgagcaaggtgcgggaccagctgggccaggagctggaggagctgacagccagcctgtttgaggaggcccacaagatggtgcgggaggccaacatcaagcaggccacagctgagaagcagctgaaggaggcccagggcaagattgatgtgctgcaggccgaggtggccgccctgaagaccctggtgctgagcagcagccccaccagccccacccaggagcccctgcccggcggcaagacccccttcaagaagggccacaccaggaacaagagcaccagcagcgccatgagcggcagccaccaggacctgagcgtcatccagcccatcgtgaaggactgcaaggaggccgacctgagcctgtacaatgagttccggctgtggaaggatgagcccaccatggacaggacctgccccttcctggacaagatctaccaggaggacatcttcccctgcctgaccttcagcaagtctgagctggccagcgctgtgctggaggccgtggagaacaacaccctgagcattgagcctgtgggcctgcagcccatccgctttgtgaaggccagcgctgtggagtgtggcggccccaagagcctgctgtatgtgaccttcctgcacacctttgacaccttcagccgggacagctag

SEQ ID NO: 292404 - DNA, 501 bp, Artificial Sequence
  derived and/or modified sequence
atggccaatgaccccctggagggcttccacgaggtgaacctggccagccccaccagcccagacctgctgggcgtgtatgagagcggcacccaggagcagaccaccagccccagcgtcatctaccggccccaccccagcgccctgagctctgtgcccatccaggccaatgccctggatgtgtctgagctgcccacccagcctgtgtacagcagcccccggcggctgaactgtgccgagatcagcagcatctccttccacgtgacagatcctgccccctgcagcaccagcggcgtgacagctggcctgaccaagctgaccaccaggaaggacaactacaatgctgagcgggagttcctgcagggcgccaccatcacagaggcctgtgatggcagtgatgacatcttcggcctgagcacagacagcctgagccggctgcggagccccagcgtgctggaggtgcgggagaagggctatgaaaggctgaaggaggagctggcctag

SEQ ID NO: 292405 - DNA, 948 bp, Artificial Sequence
  derived and/or modified sequence
atggccaacgaccccctggagggcttccacgaggtgaacctggcctctccaacctcccctgacctgcttggagtttatgagtcaggaacacaggagcagaccacaagtcctagcgtgatttataggccccacccttctgccctctcatccgtgcctattcaggccaatgctttagacgtctcagaacttccaacacagcctgtttactcttcccctaggcggttgaattgtgcagagatctcttcaatttctttccacgtaaccgaccctgccccctgctcaacctcgggtgtcactgctggccttacgaaactcacaacaaggaaggacaactacaatgcggagcgggagttcttacaaggcgccaccatcactgaggcctgcgatggatccgacgacatattcgggctctctacagattctttgagccggttgcgttcaccttcggtgctggaggtgcgggagaagggctacgaacgactaaaggaggaattggctaaagctcagcgagagctcaaactaaaggatgaggagtgcgagagactatctaaggttagagatcagcttgggcaggaactcgaggagctgacggccagtctgttcgaggaagcccataagatggtaagggaggccaacattaagcaggcaactgcggagaaacagttgaaggaggcccaggggaaaattgatgtgttgcaggccgaagtggcagctctgaagacactggtgcttagcagcagccctacctctcctactcaggaaccattgccaggcgggaaaactccctttaaaaagggccataccaggaacaagtctacctcctcagctatgagcgggtcacatcaggatttgtctgttattcaacccatcgtcaaggattgcaaggaggtgacacatcaggggctgagccccctcacgttactgatacttgtcagttcacatcattag

SEQ ID NO: 292406 - DNA, 1188 bp, Artificial Sequence
  derived and/or modified sequence
atggccaacgaccccctggagggcttccacgaggtgaacctggcctccccaacctccccagacctactgggcgtgtatgaatctggaacacaggaacagactacctctcccagtgtcatatatagaccccatccctctgctttgagttctgtgccgatccaggcgaacgcgctggatgtgagcgagctgccgacccaaccggtgtactcctcacctcggagactgaattgtgcagaaatatcctcaatcagctttcatgtgactgatccggccccatgctctacaagcggcgttactgccggtctgacaaagttgaccacgaggaaagacaattacaatgcggaacgggagtttctgcagggcgcaaccattacagaagcctgtgatggatcagacgacatcttcggcctcagtactgattctctcagcagactcagatcaccttccgtcctcgaggtgagagagaaggggtacgaacggcttaaggaagaattagccaaggctcagcgtgagctaaagctgaaggatgaggaatgcgagcggcttagcaaggtgcgcgaccagctcgggcaggagctcgaagaactgactgctagcctcttcgaggaggctcacaaaatggtgagagaggcaaacataaagcaggctacggccgaaaaacagcttaaagaagcccaaggaaagattgatgttctgcaggcggaagtggccgcgctgaagacgctcgtgttaagtagctcacctaccagcccgacgcaggagcccctccctggaggcaaaactccattcaaaaaagggcacacaaggaacaagtccacgtcttcagccatgtcagggagtcatcaggatttgtcagtaatccagccaatcgtaaaagattgcaaagaagccgacttgtctctgtacaacgaattcagattgtggaaagatgagccaaccatggatagaacttgcccatttctggacaagatttatcaggaagatatctttccatgcctcactttttccaagtctgaactcgcctccgctgtgcttgaggccgttgaaaataatactctgtccattgagcccgttgggctgcagccaatccgcttcgtcaaggcatccgccgtggagtgcggcggaccaaagtcgctgctctacgttacatttctgcatacattcgacacttttagccgggacagctag

SEQ ID NO: 292407 - DNA, 501 bp, Artificial Sequence
  derived and/or modified sequence
atggccaacgaccccctggagggcttccacgaggtgaacctggccagcccaacatcccctgatctgctgggcgtttatgagtctggtacacaggaacagaccacctcacccagtgtcatctacagaccgcacccaagcgccctgagttccgtccctattcaggccaatgctttggacgtatccgaactgcccacacagcccgtgtactctagtccccggcgactcaactgcgcagagatttctagcatctccttccacgtcacagaccccgctccctgttctaccagtggggtgaccgcgggattaactaaactgactactcgcaaggataactacaatgcagagcgggagtttttgcagggcgccaccataaccgaggcatgcgacggatccgacgatatctttggactgtccacagatagtctctcacgactgcgtagcccatctgttttggaagtgcgggagaaaggctacgagcggcttaaagaggagcttgcctag

SEQ ID NO: 292408 - DNA, 948 bp, Artificial Sequence
  derived and/or modified sequence
atggctaatgatccactggaagggtttcatgaggttaatctcgcctccccaaccagtcccgatctcttaggggtgtacgagagtggcacacaggaacagacgacttcccctagtgtgatctatcggccacatcctagcgcactatccagcgtgccgattcaagctaatgcccttgatgtgagcgagttgcccacacaaccagtctacagcagtccacggcgattgaactgtgcagaaatttccagtataagcttccacgtgactgaccccgctccatgctccacatccggtgtgaccgcaggccttacaaaattaacaacaagaaaggataactacaacgctgagcgggaatttttacagggagcaaccattacagaggcttgcgacggaagcgatgacattttcggtttgtccacagactccctcagccggttgcggtcccctagcgtgttagaagtgcgtgaaaagggatacgaacgactcaaggaagaactagccaaagcccagcgcgagttgaaacttaaagacgaagagtgcgaacggctgtcaaaggttcgcgatcagctggggcaagagttagaggagctcaccgcatccctgttcgaagaagcccacaaaatggtccgggaagccaacataaaacaagcaactgccgagaagcaattgaaagaagctcaagggaagatcgatgtgctgcaagcggaagttgctgcccttaagactctggttctgagttcatccccaacaagtccaacccaggaaccattgccgggaggaaaaactccctttaagaaggggcatacccgcaataagagcacatcctctgctatgtctggcagtcatcaggacctgagcgtcattcagccaatagtgaaggattgcaaggaagtgactcaccagggactgtccccactcactctacttatcctggttagcagccaccattag

SEQ ID NO: 292409 - DNA, 1188 bp, Artificial Sequence
  derived and/or modified sequence
atggcaaacgaccctctggagggatttcacgaggtaaacttagcttctcccacgtcgcccgatctactgggggtgtatgaatctgggacccaagagcagaccactagcccttccgtgatctacagaccccatccatctgcactttcatcagtacccatccaggctaatgctctggatgtatctgagcttcccacccagccggtgtattcatctccccgaagactgaactgcgctgagatatcatccatttcattccacgtgactgaccctgcaccgtgctcgaccagcggcgtcactgcaggactgactaaactgacaacacgaaaggacaattacaatgcagagagggaattcctgcagggggctactattacagaagcctgtgacggctccgatgatattttcggcctgtcaactgacagccttagccggctgaggtccccttccgtgctggaggttcgtgagaaaggctacgaaagactgaaagaggaattggccaaagcgcagcgagagctcaaactcaaggacgaggaatgtgagcgattgagtaaggtccgggatcagctggggcaggagctggaggagctgactgcaagcctgttcgaggaagcccacaagatggtcagagaggcaaatatcaagcaggctactgctgagaagcagctgaaagaggcccagggaaaaatcgacgttttacaggctgaagtggccgctctgaagaccttggtcctgtcatcatctccgacctcgcctacacaggagcccctgcctggtggcaagacaccattcaagaaaggacatacaagaaataagtccaccagctcagctatgtcaggttcccaccaagacctttccgtgattcagcctatcgtgaaagattgcaaagaagctgatttatctttatataatgaatttcggctgtggaaggacgagccgaccatggacagaacttgtccattcctggataagatttaccaggaggacattttcccatgtctgacattttcgaaaagcgaactcgcttcagcagttctagaagccgttgaaaacaataccctcagtattgagcccgtgggactccagcctatccggttcgtcaaggccagcgcagtggagtgtggcggaccaaaaagtctcctatacgtcacttttctgcataccttcgatacattctccagagactcatag

SEQ ID NO: 292410 - DNA, 501 bp, Artificial Sequence
  derived and/or modified sequence
atggctaatgatccgttggagggcttccacgaggtcaatctcgctagccccacgtcccccgaccttctgggtgtctatgaatctggcactcaagagcagacaacatccccttcggtgatatatagaccccacccatctgctctgtccagtgttcccatacaggcgaatgcgctggatgtgagcgaacttccaacccagccggtttactcatccccgcgtagactgaactgtgccgaaatctcaagcatttcctttcacgtgacagatcctgccccttgcagcactagcggagttacggccggacttaccaaactgacaaccagaaaagacaactacaatgcggagcgcgaatttctacagggcgcaactattacagaggcctgtgatggatctgacgatatctttgggttgtccaccgatagcctgtctcgactgaggagcccgagcgtgcttgaggtccgggaaaaggggtacgaaaggctcaaagaagaactagcttag

SEQ ID NO: 292411 - protein, 407 aa, Artificial Sequence
  derived and/or modified sequence
MESAITLWQFLLQLLLDQKHEHLICWTSNDGEFKLLKAEEVAKLWGLRKNKTNMNYDKLSRALRYYYDKNIIKKVIGQKFVYKFVSFPEILKMDPHAVEISRESLLLQDSDCKASPEGREAHKHGLAALRSTSRNEYIHSGLYSSFTINSLQNPPDAFKAIKTEKLEEPPEDSPPVEEVRTVIRFVTNKTDKHVTRPVVSLPSTSEAAAASAFLASSVSAKISSLMLPNAASISSASPFSSRSPSLSPNSPLPSEHRSLFLEAACHDSDSLEPLNLSSGSKTKSPSLPPKAKKPKGLEISAPPLVLSGTDIGSIALNSPALPSGSLTPAFFTAQTPNGLLLTPSPLLSSIHFWSSLSPVAPLSPARLQGPSTLFQFPTLLNGHMPVPIPSLDRAASPVLLSSNSQKS

SEQ ID NO: 292412 - protein, 38 aa, Artificial Sequence
  derived and/or modified sequence
MESAITLWQFLLQLLLDQKHEHLICWTSNDGEFKLLKA

SEQ ID NO: 292413 - protein, 160 aa, Artificial Sequence
  derived and/or modified sequence
MESAITLWQFLLQLLLDQKHEHLICWTSNDGEFKLLKAEEVAKLWGLRKNKTNMNYDKLSRALRYYYDKNIIKKVIGQKFVYKFVSFPEILKMDPHAVEISRESLLLQDSDCKASPEGREAHKHGLAALRSTSRNEYIHSGLYSSFTINSLQNPPDAFKA

SEQ ID NO: 292414 - DNA, 2180 bp, Artificial Sequence
  derived and/or modified sequence
gggcggaaaagcctgtttacacagactgcacaccgcctggggaataatgcagtaaaggaagtgagccggctcggcctgactgctccaacttcctgctctcacacacaccagaggggaaaaaaaaagaggagcgagagaaagaaaaaaagggggaaaaatcaggatctcattacaagagccacagaccgtctgcagacgcctgtcagcatggaaagtcgggggctttcgcccgggtcctcctagaaattccccccgaagaagactcccccacatctgggtatggagagtgcaatcacgctgtggcagttcctgttgcagttgctgctggatcagaaacatgagcatttgatctgctggacctcgaacgatggtgaattcaagctcctcaaagcagaagaagtggccaagctgtggggactccgaaaaaacaaaacaaatatgaactatgataagctgagcagagccctgcgatactattatgacaagaacatcatcaagaaggtgatcgggcagaagtttgtgtacaagtttgtctctttcccggagatcctgaagatggatcctcacgcggtggagatcagccgggagagccttctgctgcaggacagcgactgcaaggcgtctccggagggccgcgaggcccacaaacacggcctggccgccctcagaagcacgagccgcaacgaatacatccactcaggcctgtactcgtccttcaccattaattccctgcagaacccaccagacgccttcaaggccatcaagacggagaagctggaggagccgcccgaagacagcccccccgtggaagaagtcaggactgtgatcaggtttgtgaccaataaaaccgacaagcacgtcaccaggccggtggtgtccctgccttccacgtcagaggctgcggcggcgtccgccttcctggcctcgtccgtctcggccaagatctcctctttaatgttgccaaacgctgccagtatttcatccgcctcacccttctcatctcggtccccgtccctgtcccccaactcacccctcccttctgaacacagaagcctcttcctggaggccgcctgccatgactccgattccctggagcccttgaacctgtcatcgggctccaagaccaagtctccatctcttcccccaaaggccaaaaaacccaaaggcttggaaatctcagcgcccccgctggtgctctccggcaccgacatcggctccatcgccctcaacagcccagccctcccctcgggatccctcaccccagccttcttcaccgcacagacaccaaatggattgcttctgactccgagtccactgctctccagcatacatttctggagcagccttagtccagttgctccgctgagtcctgccaggctgcaagggccaagcacgctgttccagttccccacactgcttaatggccacatgccagtgccaatccccagtctggacagagctgcttctccagtactgctttcttcaaactctcagaaatcctgatgacgtctggccacaattaaggactcattaactgatgaaacaaatttgtccccacgggctagtttacctgtgtcgtgagaaggacattgtgaaactcttgttaatttggtttgcacttttcataacatggatagtctagatttatgttagcattttaaaaactgtttttgatatattcaagtatatatgaaaatctgtttggcattaagtgaattttaatgtttttgtttttatatccttttagctcttaagtgttgaacactgttgacagtgaagaacttttcttaatggttttcagtataactaataaggatgtgaagcttttttctctttagttctgagtatgctaaactgtgtgcttatatagactataaccagttgtgccttcctttgcatttaatgtaaatgaatgatttatatattttttagtattaagaggaaatgtttgaaagatgaaaattagtatcaaacagctctctagtagaatttcattatttttcaccagtgggcaatatgaaagcatatatcacgttttgttttactttcaattgtataagaattgccttagaacctcttttgaactgaaattcagtaaatgtccaagtaatgtttttataataaactaagccatatttagacaataaacatcgaaaaaaaaaaaaaaaaaaaaaaaaaaa

SEQ ID NO: 292415 - DNA, 1224 bp, Artificial Sequence
  derived and/or modified sequence
atggagagcgccatcaccctgtggcagttcctgctgcagctgctgctggaccagaagcacgagcacctgatctgctggaccagcaacgacggcgagttcaagctgctgaaggccgaggaggtggccaagctgtggggcctgagaaagaacaagaccaacatgaactacgacaagctgagcagagccctgagatactactacgacaagaacatcatcaagaaggtgatcggccagaagttcgtgtacaagttcgtgagcttccccgagatcctgaagatggacccccacgccgtggagatcagcagagagagcctgctgctgcaggacagcgactgcaaggccagccccgagggcagagaggcccacaagcacggcctggccgccctgagaagcaccagcagaaacgagtacatccacagcggcctgtacagcagcttcaccatcaacagcctgcagaacccccccgacgccttcaaggccatcaagaccgagaagctggaggagccccccgaggacagcccccccgtggaggaggtgagaaccgtgatcagattcgtgaccaacaagaccgacaagcacgtgaccagacccgtggtgagcctgcccagcaccagcgaggccgccgccgccagcgccttcctggccagcagcgtgagcgccaagatcagcagcctgatgctgcccaacgccgccagcatcagcagcgccagccccttcagcagcagaagccccagcctgagccccaacagccccctgcccagcgagcacagaagcctgttcctggaggccgcctgccacgacagcgacagcctggagcccctgaacctgagcagcggcagcaagaccaagagccccagcctgccccccaaggccaagaagcccaagggcctggagatcagcgccccccccctggtgctgagcggcaccgacatcggcagcatcgccctgaacagccccgccctgcccagcggcagcctgacccccgccttcttcaccgcccagacccccaacggcctgctgctgacccccagccccctgctgagcagcatccacttctggagcagcctgagccccgtggcccccctgagccccgccagactgcagggccccagcaccctgttccagttccccaccctgctgaacggccacatgcccgtgcccatccccagcctggacagagccgccagccccgtgctgctgagcagcaacagccagaagagctag

SEQ ID NO: 292416 - DNA, 1224 bp, Artificial Sequence
  derived and/or modified sequence
atggaatccgctattactttgtggcagttcttactgcaactactgctggaccaaaagcatgaacatctgatctgctggacctcgaacgatggggagtttaagctgctgaaagcagaggaggtagcaaagctctggggcctgaggaaaaacaaaactaatatgaattatgataagctgtctagagctctcaggtactattatgacaagaatattattaagaaagttattggtcagaaattcgtgtacaagtttgtgtctttccccgagattcttaagatggaccctcacgctgtcgagatttctagggaatccctgctcctgcaggattcagactgtaaggcaagcccagagggcagggaggcgcacaaacacgggctggcagcccttagatctactagcagaaatgaatacatccactcgggtctgtattctagcttcactattaatagtctgcagaacccacctgatgcattcaaggcaattaagacagaaaaactggaggaacccccggaagattctccacccgtggaggaagtccgaaccgtcatccgatttgtcaccaataagaccgacaagcatgtgactcgccccgtcgtctccctacctagcacgtccgaggcggctgccgctagcgctttcctcgccagttccgtgtctgctaagatctcctcgctgatgctcccaaatgccgcctctataagctcagcgtccccattctctagccggagtccctccctttctcccaatagccccctcccctccgagcaccgctctctgtttttggaggccgcctgtcacgactcggacagcttggaacctctcaaccttagctctgggtccaaaacaaaaagtccatctctgccccccaaagctaaaaagccgaaaggactggaaatctcagctccacccctagtattatccggaaccgatatagggtccatagctttgaacagcccagcactgccttctggaagcttgactcccgccttctttacagcccagactccaaatggactgctgttgacaccaagccctctgctaagctcaatccacttttggagttctctgtctcctgtagcaccactgtcacctgctcgtcttcagggtccatcaacccttttccaattccccaccctcttgaacggccacatgcctgtacctattccttcgctagaccgggccgcctcccccgtgctgctctccagtaactctcagaaaagctag

SEQ ID NO: 292417 - DNA, 1224 bp, Artificial Sequence
  derived and/or modified sequence
atggagagcgccatcaccctgtggcagttcctgctgcagctgctgctggaccagaagcatgagcacctgatctgctggaccagcaatgatggagagttcaagctgctgaaggccgaggaggtggccaagctgtggggcctgaggaagaacaagaccaacatgaactatgacaagctgagccgggccctgcgctactactatgacaagaacatcatcaagaaggtgattggccagaagtttgtgtacaagtttgtgtccttccctgagatcctgaagatggacccccatgctgtggagatcagccgggagagcctgctgctgcaggacagcgactgcaaggccagccctgagggccgggaggcccacaagcacggcctggccgccctgcggagcaccagcagaaatgagtacatccacagcggcctgtacagcagcttcaccatcaacagcctgcagaaccccccagatgccttcaaggccatcaagacagagaagctggaggagcccccagaggacagcccccctgtggaggaggtgaggacagtcatccgctttgtgaccaacaagacagacaagcacgtgaccaggcctgtggtgtccctgcccagcaccagcgaggccgctgctgccagcgccttcctggccagctctgtgtctgccaagatcagcagcctgatgctgcccaatgctgccagcatcagcagcgccagccccttcagcagccgcagccccagcctgagccccaacagccccctgcccagcgagcacaggagcctcttcctggaggccgcctgccacgacagcgacagcctggagcccctgaacctgagcagcggcagcaagaccaagagccccagcctgccccccaaggccaagaagcccaagggcctggagatcagcgccccacccctggtgctgtctggaacagacatcggcagcatcgccctgaacagccctgccctgcccagcggcagcctgaccccagccttcttcaccgcccagaccccaaatggcctgctgctgacccccagccccctgctgagcagcatccacttctggagcagcctgagccctgtggcccccctgagccctgcccggctgcagggccccagcaccctcttccagttccccaccctgctgaatggccacatgcctgtgcccatccccagcctggaccgggccgccagccctgtgctgctgagcagcaacagccagaagagctag

SEQ ID NO: 292418 - DNA, 1224 bp, Artificial Sequence
  derived and/or modified sequence
atggagagcgccatcaccctgtggcagttcctgctgcagctgctgctggaccagaagcatgaacacctgatctgttggacatccaacgatggcgagttcaaactccttaaggctgaggaggtggctaagttgtgggggttgcgaaaaaacaagaccaacatgaattacgacaagctgtcaagggcattaagatattactacgataagaatatcataaaaaaggtcatagggcagaaattcgtatacaagtttgtgtcatttcccgaaatcctgaaaatggacccccacgccgttgaaatttcccgcgaatccttgttgctccaggacagcgactgcaaagctagccccgagggcagagaggcacataaacatggactcgctgctttgaggtccacctcgcgaaacgaatacatccactcaggcctgtacagctccttcacgataaactctttgcagaacccaccagatgcatttaaagccattaaaacagagaaactggaagaaccaccagaagactccccccctgtggaagaagttaggactgtaattcgcttcgtgacaaacaaaacagataagcacgtaacacgcccggtggtttctcttccctccacatccgaggcagcagcggcctctgcttttttggctagcagtgttagcgcgaagatctcttccctcatgctgcctaacgcggcctcaatttccagcgcgagtccattttcatcacgcagcccaagtctgtctccgaattcaccactccctagcgagcataggtcccttttcttggaggcggcctgccatgatagtgactccttagagccgctgaatctgagtagcggctccaaaaccaagtcaccgtctctgccacctaaggccaaaaagcctaagggactggaaataagcgcccctcccctggtgctctctggcacggacatcggctccattgcattgaacagccccgccctcccaagcggctcactcacacccgccttctttaccgcacagactcctaatgggcttcttctcaccccatcacccctgctgtccagcatccacttctggtcttcacttagtccggttgctcccctgagccccgcacggctccagggacccagcactctgtttcagtttcccaccctgttaaatggacacatgcctgtgcccattcctagtttagatcgggcagcgagtcctgtgctcctgagttctaactctcagaaaagctag

SEQ ID NO: 292419 - DNA, 1224 bp, Artificial Sequence
  derived and/or modified sequence
atggagtcggcaatcaccctctggcagtttcttttgcagctccttttagatcaaaagcatgagcatctgatctgttggacgtctaacgacggagagttcaaattgcttaaagctgaagaagtcgctaagttatggggccttcgaaagaataaaactaacatgaactacgataagctgagccgcgcactgcgttattactacgacaagaacatcatcaaaaaggttatcggccagaagttcgtgtacaaatttgtgtcattcccagagatacttaaaatggacccccacgcagttgaaatcagccgagaatccctgctccttcaagattccgattgtaaagccagccctgaggggagggaggcccataagcatggcctcgccgctttgagaagcacaagccgaaacgagtacatccactcgggcctgtactccagttttactatcaatagtctgcaaaatccacctgatgcatttaaggctatcaaaaccgagaaattagaagagccccctgaagatagcccgcctgttgaggaggtcaggacagtgattcggtttgtcacaaacaaaacagacaagcatgtgaccaggccagtcgtgtcacttcctagcacgagtgaagcggctgccgctagcgccttcctcgcaagcagcgtcagcgccaagatcagttcattgatgctgccaaacgccgcttctatttcgagcgctagccctttttcctcacggtctccttccctgtctcccaacagtcctctaccttccgagcatcgttctctgtttttagaggcagcttgccacgattcagattcacttgagcctttgaatctctccagtggcagtaaaaccaaatccccctctctcccaccaaaggctaagaagccaaagggattggaaattagcgctccgccactggtgctgtccgggaccgacatcggctcaattgccctaaattcgcccgctctaccgagcggaagcctgacccctgcgttctttaccgcgcaaacccccaatgggctgctactcactccctcgcctctgttgtcctcaattcacttctggagctctctcagtcctgtcgctcccctttcacctgctcggctgcaggggccttccaccctctttcagttccccacactgctcaatggtcatatgccggtgccaattccatccttggaccgcgcagccagccctgtcctgctctccagcaactcacagaagtcttag

SEQ ID NO: 292420 - DNA, 117 bp, Artificial Sequence
  derived and/or modified sequence
atggaatccgctatcaccctctggcagtttttgcttcaactgctcttggaccagaaacacgagcatttgatttgctggacctctaacgacggagagttcaaattgctgaaggcctag

SEQ ID NO: 292421 - DNA, 483 bp, Artificial Sequence
  derived and/or modified sequence
atggaaagtgcgattacactgtggcagtttctgctgcagctgttattggaccagaaacatgagcatctcatttgctggacctccaacgacggagagttcaagctgttaaaggctgaggaggtcgctaagctgtggggtttacgaaagaataagaccaatatgaactacgacaagctctctcgtgcattgcgttactattacgataagaatatcattaagaaagtgataggccagaagttcgtttacaagttcgtgagtttccctgagattctgaagatggatccgcatgcggttgagatctctcgggagtcactgctgttgcaagattctgactgcaaggcaagcccagaaggccgagaagcgcacaaacatggcttagccgctttgagaagcaccagccgaaacgagtacatacacagtggtctgtactcctccttcaccattaatagtctgcagaaccctcctgacgcattcaaggcatag

SEQ ID NO: 292422 - DNA, 117 bp, Artificial Sequence
  derived and/or modified sequence
atggagagcgccatcaccctgtggcagttcctgctgcagctgctgctggaccagaagcatgagcacctgatctgctggaccagcaatgatggagagttcaagctgctgaaggcctag

SEQ ID NO: 292423 - DNA, 483 bp, Artificial Sequence
  derived and/or modified sequence
atggagagcgccatcaccctgtggcagttcctgctgcagctgctgctggaccagaagcatgagcacctgatctgctggaccagcaatgatggagagttcaagctgctgaaggccgaggaggtggccaagctgtggggcctgaggaagaacaagaccaacatgaactatgacaagctgagccgggccctgcgctactactatgacaagaacatcatcaagaaggtgattggccagaagtttgtgtacaagtttgtgtccttccctgagatcctgaagatggacccccatgctgtggagatcagccgggagagcctgctgctgcaggacagcgactgcaaggccagccctgagggccgggaggcccacaagcacggcctggccgccctgcggagcaccagcagaaatgagtacatccacagcggcctgtacagcagcttcaccatcaacagcctgcagaaccccccagatgccttcaaggcctag

SEQ ID NO: 292424 - DNA, 117 bp, Artificial Sequence
  derived and/or modified sequence
atggagagcgccatcaccctgtggcagttcctgctgcagctgctgctggaccagaagcatgagcatctgatctgttggacctctaacgacggcgagttcaaattgctgaaagcctag

SEQ ID NO: 292425 - DNA, 483 bp, Artificial Sequence
  derived and/or modified sequence
atggagagcgccatcaccctgtggcagttcctgctgcagctgctgttagatcaaaaacacgagcacctcatatgttggaccagcaacgatggcgaatttaaacttctgaaagcagaagaggtagccaaactctggggcttacgcaagaataagaccaatatgaattatgacaagctgtccagggccctgcgatattactacgacaagaacattataaaaaaggtgatcggccagaaatttgtttacaagttcgtttcatttcccgaaatcctcaaaatggacccacacgccgttgaaatctcccgggaatctcttctgctacaggacagcgactgtaaggccagccctgagggaagagaagctcacaagcacggcctcgccgcattgcggtccacctcacgcaatgagtatatccatagcggtctgtactcaagcttcactattaatagcctccagaatcccccagacgcctttaaggcatag

SEQ ID NO: 292426 - DNA, 117 bp, Artificial Sequence
  derived and/or modified sequence
atggagtcagctattaccctgtggcaattcctgctgcaattgctcctagatcagaagcatgaacatctcatttgctggacttccaatgacggggagtttaaattacttaaggcttag

SEQ ID NO: 292427 - DNA, 483 bp, Artificial Sequence
  derived and/or modified sequence
atggaaagtgccataactctttggcaatttcttctgcagcttcttctcgatcagaagcacgaacacttaatttgctggacaagtaatgacggagaattcaagctgttgaaggctgaggaagtcgcaaaattgtggggattgagaaagaacaaaacaaacatgaactatgacaagctgtcccgggctctgaggtactattatgacaagaacattattaaaaaagtgatagggcagaagtttgtgtacaagttcgtgagctttcctgagattctcaagatggacccccacgcagttgagatctcgcgcgagtccctattgttacaggactccgactgtaaggcgtcccccgaagggcgtgaggcccacaaacacggcctcgctgctctccgatccacctcacgcaacgagtacattcatagcggcctctattcttcatttactattaactcgttacagaaccctccagacgcctttaaagcctag

SEQ ID NO: 292428 - DNA, 117 bp, Artificial Sequence
  derived and/or modified sequence
atggagagcgccatcaccctgtggcagttcctgctgcagctgctgctggaccagaagcacgagcacctgatctgctggaccagcaacgacggcgagttcaagctgctgaaggcctag

SEQ ID NO: 292429 - DNA, 483 bp, Artificial Sequence
  derived and/or modified sequence
atggagagcgccatcaccctgtggcagttcctgctgcagctgctgctggaccagaagcacgagcacctgatctgctggaccagcaacgacggcgagttcaagctgctgaaggccgaggaggtggccaagctgtggggcctgagaaagaacaagaccaacatgaactacgacaagctgagcagagccctgagatactactacgacaagaacatcatcaagaaggtgatcggccagaagttcgtgtacaagttcgtgagcttccccgagatcctgaagatggacccccacgccgtggagatcagcagagagagcctgctgctgcaggacagcgactgcaaggccagccccgagggcagagaggcccacaagcacggcctggccgccctgagaagcaccagcagaaacgagtacatccacagcggcctgtacagcagcttcaccatcaacagcctgcagaacccccccgacgccttcaaggcctag

SEQ ID NO: 292430 - DNA, 4205 bp, Artificial Sequence
  derived and/or modified sequence
tgggcggccagccccggcgcacagccgcggccggggcgcgcggcgcggggcggaaaagcctgtttacacagactgcacaccgcctggggaataatgcagtaaaggaagtgagccggctcggcctgactgctccaacttcctgctctcacacacaccagaggggaaaaaaaaagaggagcgagagaaagaaaaaaagggggaaaaatcaggatctcattacaagagccacagaccgtctgcagacgcctgtcagcatggaaagtcgggggctttcgcccgggtcctcctagaaattccccccgaagaagactcccccacatctgggtatggagagtgcaatcacgctgtggcagttcctgttgcagttgctgctggatcagaaacatgagcatttgatctgctggacctcgaacgatggtgaattcaagctcctcaaagcagaagaagtggccaagctgtggggactccgaaaaaacaaaacaaatatgaactatgataagctgagcagagccctgcgatactattatgacaagaacatcatcaagaaggtgatcgggcagaagtttgtgtacaagtttgtctctttcccggagatcctgaagatggatcctcacgcggtggagatcagccgggagagccttctgctgcaggacagcgactgcaaggcgtctccggagggccgcgaggcccacaaacacggcctggccgccctcagaagcacgagccgcaacgaatacatccactcaggcctgtactcgtccttcaccattaattccctgcagaacccaccagacgccttcaaggccatcaagacggagaagctggaggagccgcccgaagacagcccccccgtggaagaagtcaggactgtgatcaggtttgtgaccaataaaaccgacaagcacgtcaccaggccggtggtgtccctgccttccacgtcagaggctgcggcggcgtccgccttcctggcctcgtccgtctcggccaagatctcctctttaatgttgccaaacgctgccagtatttcatccgcctcacccttctcatctcggtccccgtccctgtcccccaactcacccctcccttctgaacacagaagcctcttcctggaggccgcctgccatgactccgattccctggagcccttgaacctgtcatcgggctccaagaccaagtctccatctcttcccccaaaggccaaaaaacccaaaggcttggaaatctcagcgcccccgctggtgctctccggcaccgacatcggctccatcgccctcaacagcccagccctcccctcgggatccctcaccccagccttcttcaccgcacagacaccaaatggattgcttctgactccgagtccactgctctccagcatacatttctggagcagccttagtccagttgctccgctgagtcctgccaggctgcaagggccaagcacgctgttccagttccccacactgcttaatggccacatgccagtgccaatccccagtctggacagagctgcttctccagtactgctttcttcaaactctcagaaatcctgatgacgtctggccacaattaaggactcattaactgatgaaacaaatttgtccccacgggctagtttacctgtgtcgtgagaaggacattgtgaaactcttgttaatttggtttgcacttttcataacatggatagtctagatttatgttagcattttaaaaactgtttttgatatattcaagtatatatgaaaatctgtttggcattaagtgaattttaatgtttttgtttttatatccttttagctcttaagtgttgaacactgttgacagtgaagaacttttcttaatggttttcagtataactaataaggatgtgaagcttttttctctttagttctgagtatgctaaactgtgtgcttatatagactataaccagttgtgccttccttcgcatttaatgtaaatgaatgatttatatattttttagtattaagaggaaatgtttgaaagatgaaaattagtatcaaacagctctctagtagaatttcattatttttcaccagtgggcaatatgaaagcatatatcacgttttgttttactttcaattgtataagaattgccttagaacctcttttgaactgaaattcagtaaatgtccaagtaatgtttttataataaactaagccatatttagacaataaacattgataaaagaaaatgttctaaagtacattttcaaaagaatggaccttgaaaggctagcctccttagctgtttacagtatcttatcttttagatgcctcccagacaaaaatctgagatggaaaagctacatcaagttcatgctattccaggcccaagaatatctcctaggttagcatattcttatttcaaaaaattagccctggttttctcagttttccatagggaatcccgaccatctgatatatttactgtgtcagtataagtaagttggggttcccctggaactataattaacatttaaaaaatctaatgctttagaagaagctcacagagtggtgatgaacccaaacaacaaagaaaccatttttaacactaggtatcttcatcagtataggtaggtgttcacaatttttgatggatcaaaaacttgctgtaatacaaatagagagtggaggtactaaaggccttgcttgtggaaactgagagaggatacactgctttatgtattactaaagttaggggagaatgaaggaaatctgacagatgaaaaattctacaggaacctcatcatcgtggaactgaactgatgataacttggaacactccagtaaattctgttgtgtaatgtaatttggagcagtgataatacagacatattttctgttccatcagaaaatcagcaggcaccagtccaaaggtaccacacctgtacatgaagaaggaaagttctaatacaagaaaactgaaaagcaccaagctttaaattcaagattaattacaatccttaactataagtgatgataaaaactaacttgaaatgtgactaaataactgatccaaactgggcattaagtggcaggattatgagaaaggataaaaaaagagatttgagaaaacacatttcttgaattttcagaaaaaaatctagactattgctttgacacttagaaattctgaggtttttcaattggaattgagcatctctgtatgtggggatgtgggcccttatcaagggataaaaatccaaacactctaacatgcctccttgactgtaaagtaatgacactggttccaaaattcacaaataatagacactactgtccccccacccccaccccataggctaagaataattctgtaccagaataaaaggagctggtccagggaactgatatttactgaacatacaaagttagtgctagaaggggcctttgagaatgcttcccgccacctgtttccagctcaagacaggtgcacagcagaagctgggagttgcctatggctgcacagctcactgaaggtagaacaatgattggtgctcagtccaattctgtctcccccatgcctagctgttaagtaattactggttcaaaactacgtgttattagtaaaacaaacaaaacagataaagacagcatttaaaactgtgttgtcagataagagaacacatccaaaatgcatgattcttacaaactaaaggaagttaatgtgcaaaaatctcaaccaaaactactatttttagtatacttgtttacgtaaatgctgattggaaatatttaaatgactatagatctgattctttcttttcctttggaaactgggattaatgtatgctctagatccatttattagaaatgcaaaaatactacaattttttgatggatgaaaatactcctgtaacacaaacagagaactggaggaactgaagaataactcactcatatagctctgcctcattctgtgtgtgtgtgcatgtgtgtgttagcagaggtattttactcagaaaataggtttcaaagaacattaatgactttcttttcccttttatgtctgcttaatcagtgttaaactgctatgggaaaagttttatagaactatataacctgaatgttggtctctttgtacacatcttttctatgactgcaaatcttcactttatgtatcatttttactgtcatattatttttgttcaataaaaactttgtgataaaaggtgtttagaggtaa

SEQ ID NO: 292431 - DNA, 539 bp, Artificial Sequence
  derived and/or modified sequence
acagccgcggccggggcgcgcggcgcggggcggaaaagcctgtttacacagactgcacaccgcctggggaataatgcagtaaaggaagtgagccggctcggcctgactgctccaacttcctgctctcacacacaccagaggggaaaaaaaaagaggagcgagagaaagaaaaaaagggggaaaaatcaggatctcattacaagagccacagaccgtctgcagacgcctgtcagcatggaaagtcgggggctttcgcccgggtcctcctagaaattccccccgaagaagactcccccacatctggaagaccagtatggtgctgtgaaatgttgcaaaacatgacctgatgacaacccaaaacacttcatagaaaactatccaagaatgtgacttcctggagtagagtcttttttcactgagggtatggagagtgcaatcacgctgtggcagttcctgttgcagttgctgctggatcagaaacatgagcatttgatctgctggacctcgaacgatggtgaattcaagctcctcaaagcaga

SEQ ID NO: 292432 - DNA, 808 bp, Artificial Sequence
  derived and/or modified sequence
ccgtctgcagacgcctgtcagcatggaaagtcgggggctttcgcccgggtcctcctagaaattccccccgaagaagactcccccacatctggaagagattaaatgaagatgtgtgtgtgttgaagactgcatagtgcacactctgtgtggctaccggtgagccacgtggcgggatacaggactcaaagaagatcacactggagaagggagttcatgctctgttgcccaggctggggtgcagtgatgtgatcacagctcactgcagcctcaaactcctgggcttaagtgatcctcctgcctcagctccccaagtagctgggactacaggtatggagagtgcaatcacgctgtggcagttcctgttgcagttgctgctggatcagaaacatgagcatttgatctgctggacctcgaacgatggtgaattcaagctcctcaaagcagaagaagtggccaagctgtggggactccgaaaaaacaaaacaaatatgaactatgataagctgagcagagccctgcgatactattatgacaagaacatcatcaagaaggtgatcgggcagaagtttgtgtacaagtttgtctctttcccggagatcctgaagatggatcctcacgcggtggagatcagccgggagagccttctgctgcaggacagcgactgcaaggcgtctccggagggccgcgaggcccacaaacacggcctggccgccctcagaagcacgagccgcaacgaatacatccactcaggcctgtactcgtccttcaccattaattccctgcagaacccaccagacgccttcaaggc

SEQ ID NO: 292433 - DNA, 657 bp, Artificial Sequence
  derived and/or modified sequence
atggatgagcaaggatgcgagcacactagccgaacagaagacccattcatccagccaacggactttgggccctctgagccaccgctttcagtacctcccccccctatttcccctgtgttaccactcgtgcctccccccgctacagcgctgaacccccccgcgccccctacgtttcaccagcctcagaagttcgcaggcgtgaacaaggctcccagtgtcatcacccataccgcctctgcgacccttactcacgacgcccctgcgaccacctttagtcaatcacagggtctggttattaccacccaccaccccgcaccctcagccgcaccatgtggtcttgctcttagccctgtcactagaccccctcagccaagacttactttcgtgcacccaaaacctgtctcactgacgggaggacggcctaagcagccccacaagattgtccccgcaccaaaaccggagcctgtgtcactggtgctgaagaacgcaagaatcgcccccggtgagcccggcggtgaaacgcagtgcggagccccgcctgatccagagggatgctttcctatcccaaaagccttcaagcttgtgaccactaccactaccctcgtgtgtacgtgcatgaggactcacatccatctgaacgagacgaaagtgtcatag

SEQ ID NO: 292434 - DNA, 657 bp, Artificial Sequence
  derived and/or modified sequence
atggatgagcagggctgtgagcacaccagcaggacagaggaccccttcatccagcccacagactttggccccagcgagccccccctgtctgtgcccccaccacccatcagccctgtgctgcccctggtgcccccaccagccacagccctgaaccccccagccccacccaccttccaccagccccagaagtttgctggggtgaacaaggcccccagcgtcatcacccacacagccagcgccaccctgacccatgatgccccagccaccaccttcagccagagccagggcctggtgatcaccacccaccacccagcccccagcgctgccccctgtggcctggccctgagccctgtgaccaggcctccccagccccggctgacctttgtgcaccccaagcctgtgtccctgactggaggccggcccaagcagccccacaagatcgtgcctgcccccaagccagagcctgtgtccctggtgctgaagaatgccagaattgcccctggagagcccggcggggagacccagtgtggggcccccccagaccctgagggctgcttccccatccccaaggccttcaagctggtgaccaccaccaccaccctggtgtgcacctgcatgaggacccacatccacctgaatgagaccaaggtgtcctag

SEQ ID NO: 292435 - DNA, 657 bp, Artificial Sequence
  derived and/or modified sequence
atggatgagcagggctgtgaacacacctcccggactgaggacccgtttatccagcccacggacttcggtccctcagagccgccactgagtgtcccgccaccgcccatctcccccgtgttaccattagttcctcctcctgccactgccctgaaccccccggctccacccaccttccatcagccacagaagtttgctggagtcaacaaagcgccgtctgtcatcacccacacggcctctgccaccctcacccacgatgcccccgccaccacctttagccagagtcagggccttgtgatcaccacccatcaccctgccccgtcagcggccccttgtgggctggcactgtctcctgtcacccggcctccccagccacggttaacttttgtgcaccccaaacctgtatccttgactgggggcaggcctaagcagccccacaaaatagtgcctgctcccaaaccagagcccgtgtccttggtgttgaagaatgcccgtatcgccccaggtgagccaggcggggagactcagtgcggggctccccccgacccagagggatgttttcccatcccaaaggctttcaaacttgtgaccaccaccaccaccctggtgtgcacgtgcatgcgcacacacatacacttaaatgaaacaaaagtgtcatga

SEQ ID NO: 292436 - DNA, 657 bp, Artificial Sequence
  derived and/or modified sequence
atggacgagcagggctgcgagcacaccagccggaccgaggaccccttcatccagcctacagacttcggaccctcagagcctcctttgagcgtacctcctccgccaatatcaccagttctccccctcgttcccccacctgccaccgcattgaatccccctgctcctccaacgtttcatcaacctcagaaatttgcaggcgtgaataaggccccgtccgttataacgcatacagcctcagcaactctgacccacgatgcacccgcaactacttttagtcagtcacagggtctcgtgatcaccacacaccaccctgccccctcagcagccccttgtggtctagctcttagtcccgtgactaggccccctcaacccaggttgactttcgtccacccaaagccagtgtctcttacaggtggaaggcccaaacaaccccacaagatcgtgcccgctcctaagcctgagcctgtgagtctggtgcttaaaaacgcaaggatcgcacccggggagccaggcggtgagacgcaatgcggcgcacctcctgatcccgagggctgttttcctataccaaaggcctttaagctagttactactactacgactttggtctgtacatgtatgcggacccacattcatctcaacgagaccaaggtgagctag

SEQ ID NO: 292437 - DNA, 657 bp, Artificial Sequence
  derived and/or modified sequence
atggacgaacagggatgcgaacacaccagccggactgaggaccccttcatccaacctactgattttggcccatctgagccccctttgagtgtgcccccacccccaatctcacccgtgctgcctctggtgccaccccctgcaaccgctctcaatcctcccgcaccccctacctttcaccagcctcagaagtttgccggagtgaataaggccccttcggtgatcacccacacagccagtgcaaccctcacccacgacgccccagctacaacattttcccaaagccagggattagtgattaccacacatcatccagctccgtccgccgcaccctgcggcctggcccttagtcccgtcaccagacctcctcagccgcgactaacctttgtccatcctaagcctgtgtcacttacgggcggtcggcctaaacagccacacaaaattgtccctgccccaaagccagaaccagttagccttgtgctcaaaaatgccagaatcgccccaggtgagcccggaggagagactcagtgcggcgcaccgccagaccctgaaggatgctttcccatccctaaggcttttaaactggttaccacaaccaccacactcgtctgtacctgcatgcggacccatatccatctaaacgaaacgaaagtcagctag

SEQ ID NO: 292438 - DNA, 657 bp, Artificial Sequence
  derived and/or modified sequence
atggacgagcagggctgcgagcacaccagcagaaccgaggaccccttcatccagcccaccgacttcggccccagcgagccccccctgagcgtgccccccccccccatcagccccgtgctgcccctggtgcccccccccgccaccgccctgaacccccccgccccccccaccttccaccagccccagaagttcgccggcgtgaacaaggcccccagcgtgatcacccacaccgccagcgccaccctgacccacgacgcccccgccaccaccttcagccagagccagggcctggtgatcaccacccaccaccccgcccccagcgccgccccctgcggcctggccctgagccccgtgaccagacccccccagcccagactgaccttcgtgcaccccaagcccgtgagcctgaccggcggcagacccaagcagccccacaagatcgtgcccgcccccaagcccgagcccgtgagcctggtgctgaagaacgccagaatcgcccccggcgagcccggcggcgagacccagtgcggcgccccccccgaccccgagggctgcttccccatccccaaggccttcaagctggtgaccaccaccaccaccctggtgtgcacctgcatgagaacccacatccacctgaacgagaccaaggtgagctag

SEQ ID NO: 292439 - protein, 177 aa, Artificial Sequence
  derived and/or modified sequence
MPQAFLLGSIHEPAGALMEPQPCPGSLAESFLEEELRLNAELSQLQFSEPVGIIYNPVEYAWEPHRNYVTRYCQGPKEVLFLGMNPGPFGMAQTGVPFGEVSMVRDWLGIVGPVLTPPQEHPKRPVLGLECPQSEGPRQSMGHEIKSELLMGGCSWIRGKIQCDRVQVRRPGFSSQL

SEQ ID NO: 292440 - DNA, 534 bp, Artificial Sequence
  derived and/or modified sequence
atgccccaggccttcctgctgggcagcatccacgagcccgccggcgccctgatggagccccagccctgccccggcagcctggccgagagcttcctggaggaggagctgagactgaacgccgagctgagccagctgcagttcagcgagcccgtgggcatcatctacaaccccgtggagtacgcctgggagccccacagaaactacgtgaccagatactgccagggccccaaggaggtgctgttcctgggcatgaaccccggccccttcggcatggcccagaccggcgtgcccttcggcgaggtgagcatggtgagagactggctgggcatcgtgggccccgtgctgacccccccccaggagcaccccaagagacccgtgctgggcctggagtgcccccagagcgagggccccagacagagcatgggccacgagatcaagagcgagctgctgatgggcggctgcagctggatcagaggcaagatccagtgcgacagagtgcaggtgagaagacccggcttcagcagccagctgtag

SEQ ID NO: 292441 - DNA, 534 bp, Artificial Sequence
  derived and/or modified sequence
atgcctcaggccttcctcctggggagtatccacgagcccgctggcgcccttatggagcctcagccatgcccaggctccttggccgaaagctttctggaggaggaactgcgtctgaacgccgagctctcccagttacagttctcggaaccggtaggcattatctacaacccggtcgagtacgcttgggaaccacatagaaattacgtcaccagatactgccagggcccaaaggaggtgttatttctcgggatgaatccaggtcccttcggcatggcccaaaccggcgtacccttcggcgaagtgtccatggtcagagactggctggggatcgtcggtcccgtgctgacaccaccccaggagcatcccaagcgtcccgtactgggcttggaatgcccacagtcagagggccccaggcagagcatgggacacgaaatcaaatcagagctactgatgggcggttgttcatggattcgggggaagatacagtgtgatagggtacaggtgcggcgcccaggtttttcctctcaactgtag

SEQ ID NO: 292442 - DNA, 534 bp, Artificial Sequence
  derived and/or modified sequence
atgcctcaggcttttctgctcgggtccatccatgaacccgcaggtgccctaatggaaccacagccctgcccaggcagtctagctgagagcttcctggaggaagagctcaggcttaacgccgaacttagccaactgcagttcagcgaaccggttggcataatctataaccccgttgagtatgcatgggagccacacagaaattacgtcacccgctattgccaggggccgaaggaagtgctgtttctgggtatgaatcccgggcctttcgggatggctcagaccggcgttcccttcggcgaggtcagcatggtgagggattggttgggcattgtagggcccgtgttaacacctcctcaagaacaccctaaacgtcccgtccttggccttgagtgtcctcaaagtgagggcccccgtcagagtatggggcacgagatcaagtccgaattactgatggggggctgttcttggatcaggggtaaaattcaatgcgaccgtgtgcaggtccgaagaccaggatttagctcccaattgtag

SEQ ID NO: 292443 - DNA, 534 bp, Artificial Sequence
  derived and/or modified sequence
atgccacaggcctttctgctaggctccatccacgagccagctggagccctaatggagccacagccttgcccaggatcacttgccgagtccttcctggaggaggagctccgcctgaacgcagagcttagccagctgcaattttctgagcccgtcggcattatctataacccagtagagtatgcctgggaaccccaccgaaattacgtgacccggtattgccaaggacccaaggaggttctgttcctgggaatgaatccgggcccttttgggatggctcagactggcgtgccatttggtgaggtcagcatggtgcgggactggctgggaatcgtcggacccgttttgacacctccacaagagcacccaaagcgaccagtacttggtctggaatgtccgcagtcagagggcccccgacaatctatgggtcatgagataaagtccgaactcctgatgggcggttgctcctggatcagagggaaaattcagtgtgacagagtgcaggtccgccggcccggattctcgagccagctgtag

SEQ ID NO: 292444 - DNA, 534 bp, Artificial Sequence
  derived and/or modified sequence
atgcctcaggctttcttgttaggatcgattcatgagcccgcaggcgcactcatggagccgcagccgtgtcctggaagtctggcggagagcttcctagaggaggagctccgcctgaacgctgaattgtcacagctccaattcagtgagcccgttgggatcatctataatcccgtggaatatgcttgggagccgcatcggaactacgtgacccggtactgccagggacccaaggaggtcctctttcttgggatgaatccaggtccattcgggatggctcagacaggagtcccattcggagaagtctcaatggtgagggactggttaggcatagtgggacccgtccttaccccacctcaggaacacccaaagagacccgttctggggctcgagtgccctcaatctgaggggcctcgccagagcatgggtcatgaaatcaaaagcgaacttttaatgggcggctgcagttggatccgtggcaagatccagtgtgatagggtgcaggtgaggcgacccggcttcagctcgcagctgtag

SEQ ID NO: 292445 - DNA, 534 bp, Artificial Sequence
  derived and/or modified sequence
atgccccaggccttcctgctgggcagcatccacgagcctgctggggccctgatggagccccagccctgccccggcagcctggccgagagcttcctggaggaggagctgcggctgaatgctgagctgagccagctgcagttcagcgagcctgtgggcatcatctacaaccctgtggagtatgcctgggagccccacaggaactacgtgacccgctactgccagggccccaaggaggtgctcttcctgggcatgaaccctggccccttcggcatggcccagacaggagtgccctttggagaggtgtccatggtgcgggactggctgggcatcgtgggccctgtgctgaccccaccccaggagcaccccaagaggcctgtgctgggcctggagtgcccccagagcgagggcccccggcagagcatgggccacgagatcaagtctgagctgctgatgggcggctgctcctggatccggggcaagatccagtgtgacagagtgcaggtgagaagacctggcttcagcagccagctgtag

SEQ ID NO: 292446 - DNA, 534 bp, Artificial Sequence
  derived and/or modified sequence
atgccccaggccttcctgctgggcagcatccacgagcccgccggcgccctgatggaaccgcagccctgtcctggcagtctagccgaatccttcttggaggaggaactgaggttgaacgcggaattgagtcaacttcaattttctgagcccgtcgggatcatctataatcccgtggagtacgcttgggagccacaccgcaactatgtcactaggtattgtcaggggcctaaggaagttctgttcctggggatgaatcccggaccatttggtatggcccaaaccggcgtgccttttggagaggttagcatggtgagagactggctcggtatcgtgggcccggtccttacaccgccgcaagagcaccctaagcgcccagttcttggtttagagtgtccacagtccgaagggccgaggcagagcatggggcacgagattaaatcagagttactgatgggtggatgttcctggatccgtggaaaaattcagtgcgacagggtgcaagttaggcggccaggcttcagcagccaattgtag

SEQ ID NO: 292447 - DNA, 534 bp, Artificial Sequence
  derived and/or modified sequence
atgccccaggccttcctgctgggcagcatccacgagcccgccggcgcgcttatggaaccccaaccctgccccggcagcttagctgagagttttctcgaggaggaacttcggctgaacgccgaactcagtcaattgcagttcagcgagccagtaggaataatatataaccccgtcgaatatgcttgggagccacatcggaattacgtgacacgctattgtcagggccctaaggaggtgctgtttttgggaatgaacccaggtccgttcggaatggctcagacgggggtgcccttcggtgaagtgtccatggtgagggactggttagggatcgtcgggccagtccttaccccccctcaagaacatcccaaacgtcctgtgctcggcttggaatgtcctcagagtgaggggcctaggcagtctatgggacatgagatcaagtctgaactcctgatgggcggatgctcctggattcgagggaaaatacagtgtgaccgggtccaagtacgtcgaccagggtttagttcacagctgtag

SEQ ID NO: 292448 - DNA, 534 bp, Artificial Sequence
  derived and/or modified sequence
atgccccaggccttcctgctgggcagcatccacgagcccgccggcgccctcatggagccccagccttgcccgggctccctcgctgagagttttcttgaggaggaacttcggctgaacgctgaattgtctcagttgcagttctcagagccagttggaattatctataatcccgttgaatacgcttgggaacctcatcgcaattacgtaacccggtattgccagggccccaaggaggtccttttcctcggtatgaaccctggtccgtttggtatggcacaaacaggcgtgccattcggtgaagtgtctatggtgagagactggctgggaatcgttggacccgttttgacaccgccgcaggagcaccctaaaagacctgtcctgggcttagagtgcccgcaaagcgagggacctcgccaatcgatggggcatgagataaaaagcgagcttttaatgggagggtgctcatggattcgcggtaagatccaatgtgatcgtgtacaggtgagacgacccggtttcagctctcaactgtag

SEQ ID NO: 292449 - DNA, 534 bp, Artificial Sequence
  derived and/or modified sequence
atgccccaggccttcctgctgggcagcatccacgagcccgccggcgctctcatggagcctcagccttgccccggatctctggcagaatctttcctcgaagaagaacttcgcctcaacgctgagctgtcccagctgcaattctccgaacccgtgggaatcatatataatcccgtcgagtatgcttgggagccacacagaaattatgtcacccggtattgtcagggtccgaaggaggttttgtttctgggaatgaatccaggaccctttggtatggctcaaactggcgtcccattcggggaggtttcgatggtgcgtgactggttgggcatcgttgggcccgtgctcactcctcctcaggagcatcccaaacgccccgtactcgggctagaatgccctcagagcgagggcccacgtcagagtatggggcacgaaattaagtctgagctccttatgggcgggtgcagttggatacggggaaagattcagtgtgatagggtccaggtgagacggccaggctttagtagtcagctgtag

SEQ ID NO: 292450 - DNA, 534 bp, Artificial Sequence
  derived and/or modified sequence
atgccccaagcttttcttttggggtctatacatgagcccgcaggagcacttatggagccccaaccttgtcctggcagcttggcagagagttttcttgaagaggagcttcgcctcaacgccgaactatcacagttgcagttcagtgagcccgtcggcatcatctacaaccccgtggagtatgcctgggagccccatcggaattacgtcacgagatactgccagggcccaaaggaggttttgtttctaggcatgaaccccggaccattcggcatggcacaaaccggggtccctttcggcgaggtctctatggttcgagactggttgggaatagtggggcctgtgctgaccccaccccaggaacaccccaaaaggccagtcctcgggctagaatgcccccaaagtgaagggccacgtcagtctatggggcatgagattaaatcggaattactgatgggcggttgcagttggattcgaggaaagattcagtgtgacagagttcaggtgcgaagaccaggattcagtagccagttgtag

SEQ ID NO: 292451 - DNA, 534 bp, Artificial Sequence
  derived and/or modified sequence
atgccccaagctttcctgctgggcagcatacacgagccagccggagctctgatggaaccccagccttgtcccggatcgctcgctgaatcttttctggaagaagagctgcgtctgaatgccgagctcagtcagctccaattctctgagccagtggggatcatctataatccagtggagtacgcttgggaaccccacagaaactacgtcacacgttactgtcagggccctaaagaagtgctgttcctgggcatgaaccctggcccttttggcatggctcaaactggcgtgccttttggagaggtcagcatggtaagggattggctggggatagtgggtcccgtgctcacacctccccaggagcaccccaaaagaccggttctgggactggaatgccctcagtctgagggacccagacagagcatgggacatgaaattaaatccgagctgctgatgggcggatgcagctggattcgcggaaagatccagtgtgaccgggtccaggtaagaaggcccggattcagctctcagctgtag

SEQ ID NO: 292452 - DNA, 534 bp, Artificial Sequence
  derived and/or modified sequence
atgccacaagcattcctgctgggaagcatccacgaacctgccggagcccttatggagccacagccttgccctgggtccctcgcggaatcatttctggaggaggagttaagactcaatgctgagctgtcacagctacaattctccgagcctgtggggattatttacaaccctgttgaatatgcctgggagccccatagaaattacgtgacacgatactgtcagggtcctaaggaggtgctgttcctcggaatgaaccctggtccatttggcatggcccagactggggtgccattcggcgaggtctcaatggtgagagactggttgggaattgtggggccagtgctgactcctccccaggagcatccgaagcggcctgtgctgggccttgagtgtccgcagtccgaagggcctcggcagtcgatgggtcatgagataaagtcagagctgctgatgggcggttgcagctggatccgaggcaaaatccagtgtgatagggttcaggtgcgacgccctggattttctagccagctttag

SEQ ID NO: 292453 - DNA, 534 bp, Artificial Sequence
  derived and/or modified sequence
atgccccaggccttcctgttggggtccatccacgagcccgctggtgcgctcatggagcctcaaccatgtcccggatcactggcagaaagtttcctggaggaggaactccggctaaatgcagagctctcacagctgcagttttctgagcccgttgggattatttacaacccagtggagtacgcgtgggagccccaccggaactacgtaacacgatactgtcagggacccaaggaagttctgtttctcggaatgaaccccggacccttcgggatggcccaaaccggtgttccttttggcgaagtgagcatggtccgcgactggctgggaatagttggcccagtcctgacaccaccacaggaacacccgaagcgaccagtactcggcctcgagtgtccccagagtgaaggccctagacaatctatgggccacgagattaagtctgagctactcatgggcggttgctcctggatccgtggaaagatccagtgcgaccgggtacaggttcgtcgccctggattctctagccaactctag

SEQ ID NO: 292454 - DNA, 627 bp, Artificial Sequence
  derived and/or modified sequence
ggaaacgggatggggagctggaccaggtgacagcggcatggacatatgccccaggctttcctgctggggtccatccatgagcctgcaggtgccctcatggagccccagccctgccctggaagcttggctgagagcttcctggaggaggagcttcggctcaatgctgagctgagccagctgcagttttcggagcctgtgggcatcatctacaatcccgtggagtatgcatgggagccacatcgcaactacgtgactcgctactgccagggccccaaggaagtactcttcctgggcatgaaccctggaccttttggcatggcccagactggggtgccctttggggaagtaagcatggtccgggactggttgggcattgtggggcctgtgctgacccctccccaagagcatcctaaacgaccagtgctgggactggagtgcccacagtcagaaggaccaagacaaagcatgggacatgaaattaagagtgaacttcttatgggaggctgcagctggatcagaggaaaaatccagtgtgacagagtgcaagtcagaagacctggcttttcatcccagctttgaaacttggaactttttgattgacaaattaataaacctctctatgcctca

SEQ ID NO: 292455 - DNA, 712 bp, Artificial Sequence
  derived and/or modified sequence
ctgaattccaggctggagtgcaatggcgcgatctcagctcactgcagcctccgcctcccgggttcaagcgattcttctgcctcagcctcccgagtgacagcggcatggacatatgccccaggctttcctgctggggtccatccatgagcctgcaggtgccctcatggagccccagccctgccctggaagcttggctgagagcttcctggaggaggagcttcggctcaatgctgagctgagccagctgcagttttcggagcctgtgggcatcatctacaatcccgtggagtatgcatgggagccacatcgcaactacgtgactcgctactgccagggccccaaggaagtactcttcctgggcatgaaccctggaccttttggcatggcccagactggggtgccctttggggaagtaagcatggtccgggactggttgggcattgtggggcctgtgctgacccctccccaagagcatcctaaacgaccagtgctgggactggagtgcccacagtcagaaggaccaagacaaagcatgggacatgaaattaagagtgaacttcttatgggaggctgcagctggatcagaggaaaaatccagtgtgacagagtgcaagtcagaagacctggcttttcatcccagctttgaaacttggaactttttgattgacaaattaataaacctctctatgcctcaggctcctcatctgtaaaa

SEQ ID NO: 292456 - DNA, 1006 bp, Artificial Sequence
  derived and/or modified sequence
ggaccaggtgaggaagtagggggctgggaatccgggactgtgggggcaagttgacggctcccagggtcgtcggggctgagccgagagggtggttagaatttctatattttggggtccctccctccgtatggggtaagactcagtgcagggagagcccagcctatgaaaccgcctgggaggtctgcaggatcaaggctttccagtcggccggagccagcgggcgcccccggaggctggagtgcaatggcgcgatctcagctcactgcagcctccgcctcccgggttcaagcgattcttctgcctcagcctcccgagtagcagattatgagcttacagaaagcctggcctacattttactctttttggatttcttcctcatcaagagactgctgcagtgcctgtcatgtgacagcggcatggacatatgccccaggctttcctgctggggtccatccatgagcctgcaggtgccctcatggagccccagccctgccctggaagcttggctgagagcttcctggaggaggagcttcggctcaatgctgagctgagccagctgcagttttcggagcctgtgggcatcatctacaatcccgtggagtatgcatgggagccacatcgcaactacgtgactcgctactgccagggccccaaggaagtactcttcctgggcatgaaccctggaccttttggcatggcccagactggggtgccctttggggaagtaagcatggtccgggactggttgggcattgtggggcctgtgctgacccctccccaagagcatcctaaacgaccagtgctgggactggagtgcccacagtcagaaggaccaagacaaagcatgggacatgaaattaagagtgaacttcttatgggaggctgcagctggatcagaggaaaaatccagtgtgacagagtgcaagtcagaagacctggcttttcatcccagctttgaaacttggaactttttgattgacaaattaataaacctctctatgcctca

SEQ ID NO: 292457 - DNA, 926 bp, Artificial Sequence
  derived and/or modified sequence
agggggctgggaatccgggactgtgggggcaagttgacggctcccagggtcgtcggggctgagccgagagggtggttagaatttctatattttggggtccctccctccgtatggggtaagactcagtgcagggagagcccagcctatgaaaccgcctgggaggtctgcaggatcaaggctttccagtcggccggagccagcgggcgcccccggaggttttcagattatgagcttacagaaagcctggcctacattttactctttttggatttcttcctcatcaagagactgctgcagtgcctgtcatgtgacagcggcatggacatatgccccaggctttcctgctggggtccatccatgagcctgcaggtgccctcatggagccccagccctgccctggaagcttggctgagagcttcctggaggaggagcttcggctcaatgctgagctgagccagctgcagttttcggagcctgtgggcatcatctacaatcccgtggagtatgcatgggagccacatcgcaactacgtgactcgctactgccagggccccaaggaagtactcttcctgggcatgaaccctggaccttttggcatggcccagactggggtgccctttggggaagtaagcatggtccgggactggttgggcattgtggggcctgtgctgacccctccccaagagcatcctaaacgaccagtgctgggactggagtgcccacagtcagaaggaccaagacaaagcatgggacatgaaattaagagtgaacttcttatgggaggctgcagctggatcagaggaaaaatccagtgtgacagagtgcaagtcagaagacctggcttttcatcccagctttgaaacttggaactttttgattgacaaattaataaacctctctatgcctcaggctcctcatctgtaaaa

SEQ ID NO: 292458 - protein, 273 aa, Artificial Sequence
  derived and/or modified sequence
MALSRVCWARSAVWGSAVTPGHFVTRRLQLGRSGLAWGAPRSSKLHLSPKADVKNLMSYVVTKTKAINGKYHRFLGRHFPRFYVLYTIFMKGIISIPPFANYLVFLLMYLFPRQLLIRHFWTPKQQTDFLDIYHAFRKQSHPEIISYLEKVIPLISDAGLRWRLTDLCTKIQRGTHPAIHDILALRECFSNHPLGMNQLQALHVKALSRAMLLTSYLPPPLLRHRLKTHTTVIHQLDKALAKLGIGQLTALHQLPWDKALNEPWSGWHCPAVV

SEQ ID NO: 292459 - DNA, 822 bp, Artificial Sequence
  derived and/or modified sequence
atggccctgagcagagtgtgctgggccagaagcgccgtgtggggcagcgccgtgacccccggccacttcgtgaccagaagactgcagctgggcagaagcggcctggcctggggcgcccccagaagcagcaagctgcacctgagccccaaggccgacgtgaagaacctgatgagctacgtggtgaccaagaccaaggccatcaacggcaagtaccacagattcctgggcagacacttccccagattctacgtgctgtacaccatcttcatgaagggcatcatcagcatcccccccttcgccaactacctggtgttcctgctgatgtacctgttccccagacagctgctgatcagacacttctggacccccaagcagcagaccgacttcctggacatctaccacgccttcagaaagcagagccaccccgagatcatcagctacctggagaaggtgatccccctgatcagcgacgccggcctgagatggagactgaccgacctgtgcaccaagatccagagaggcacccaccccgccatccacgacatcctggccctgagagagtgcttcagcaaccaccccctgggcatgaaccagctgcaggccctgcacgtgaaggccctgagcagagccatgctgctgaccagctacctgcccccccccctgctgagacacagactgaagacccacaccaccgtgatccaccagctggacaaggccctggccaagctgggcatcggccagctgaccgccctgcaccagctgccctgggacaaggccctgaacgagccctggagcggctggcactgccccgccgtggtgtag

SEQ ID NO: 292460 - DNA, 822 bp, Artificial Sequence
  derived and/or modified sequence
atggccttgtctagagtatgttgggccaggagtgcagtctggggaagtgctgtgaccccgggacacttcgtcacaaggagattacagttgggtagatctggtcttgcatggggcgcaccccgaagctccaagctgcatctcagtccaaaggctgacgtaaaaaacctgatgagctacgtcgttaccaagacaaaggctatcaacggaaagtatcaccgctttttgggcaggcacttcccccgcttctatgtactgtacacaatcttcatgaaggggattatttcgatcccgcctttcgccaactacctggtgttcttgctgatgtatctgtttcctcgtcagttgctaatacggcacttttggacccctaagcagcagaccgatttcttagacatttatcacgccttccgcaaacagtcccaccccgagatcattagctatttggaaaaagttattccacttatttcagatgcaggtctccggtggcgcctgacagatctgtgcaccaaaattcagagaggcacccaccccgcgattcacgacattctagctctccgggagtgcttttcgaatcacccgctcggaatgaatcaactccaagctctccatgtgaaagccctgagtcgcgcaatgctactcacctcctatctgccccctcctctccttcggcaccgcctgaagactcatacgacggtgatccaccagcttgataaagccctcgcaaagctcggcatcggtcagctgaccgcactgcatcagttgccatgggataaggcccttaacgagccctggtccggctggcattgtcctgccgtggtgtag

SEQ ID NO: 292461 - DNA, 1901 bp, Artificial Sequence
  derived and/or modified sequence
ctcttctctcccgcttctctcgctgtgaagatggcgctctccagggtgtgctgggctcggtcggctgtgtggggctcggcagtcacccctggacattttgtcacccggaggctgcaacttggtcgctctggcctggcttggggggcccctcggtcttcaaagcttcacctttctccaaaggcagatgtgaagaacttgatgtcttatgtggtaaccaagacaaaagcgattaatgggaaataccatcgtttcttgggtcgtcatttcccccgcttctatgtcctgtacacaatcttcatgaaaggtacctgtttcccaggcaactactgatcaggcatttctggaccccaaaacaacaaactgatttcttagatatctatcatgctttccggaagcagtcccacccagaaattattagttatttagaaaaggtcatccctctcatttctgatgcaggactccggtggcgtctgacagatctgtgcaccaagatacagcgtggtacccacccagcaatacatgatatcttggctctgagagagtgtttctctaaccatcctctgggcatgaaccaactccaggctttgcacgtgaaagccttgagccgggccatgcttctcacatcttacctgcctcctcccttgttgagacatcgtttgaagactcatacaactgtgattcaccaactggacaaggctttggcaaagctggggattggccagctgactgctcaggaagtaaaatcggcttgttatctccgtggcctgaattctacgcatattggtgaagataggtgtcgaacttggctgggagaatggctgcagatttcctgcagcctgaaagaagctgagctgtctctcttgctgcacaacgtggtcctgctctccaccaactaccttgggacaaggcgctgaatgaaccatggagcggatggcattgtcctgcagtcgtatagtatagcagtgcaggaacaaacagcacttgccagcaaagtctgtgtgtactgttaagtgtgtgggaggcagagagaggagcaggggccatgggcttcacagcatggcacacatgtgggaactgcagacattcctctcacagctagaactgaaacaaaccctcttgctaggggtggtccgtgtgaggtgtcatcctgtccccctcataattactaatagctggaactggcagcagcctctactgggcttttactgtgatgtgttcagttcatgtcctaggaagtcagcttttgccccaggtgggaatccttatttggcttaggactgatccacttccatgttacttacatctgtgggtttttgttgttgctgttagaaaatttgtggctggtgaaaacagcactcctttggctggagcacatgtgtccgtgcatgtacttgggtgtttccctccatcctttctgatatgaccaaaaatcaagttgttttgttttttgtcaccttcactggcatgggctaaccacttctttttcaaaccctctgaacacctttttctgatgggtaacttgcaggaatattctattggaaaagataacaggaagtacaagtgcttcttgaccccttcctcaatgtttctagccttcactctccattgtcttttctgggctgtattacagccctctgtggatcttcaactctgctgcctccactgtgatgcagcagtccaactgtaactgacagtggctgccttctctgggccatggatcacacctgtaaggtactaattactgcccagcctggggagatcaggagaggtctgcatagttagtaagttgggtttagcttttgtgtgtgcatcagtgacttagagttctgtaataacttattgtaaatgcatgaagcactgtttttaaacccaagtaaagactgcttgaaacctgttgatgg

SEQ ID NO: 292462 - DNA, 917 bp, Artificial Sequence
  derived and/or modified sequence
gcttctctcgctgtgaagatggcgctctccagggtgtgctgggctcggtcggctgtgtggggctcggcagtcacccctggacattttgtcacccggaggctgcaacttggtcgctctggcctggcttggggggcccctcggtcttcaaagcttcacctttctccaaaggcagatgtgaagaacttgatgtcttatgtggtaaccaagacaaaagcgattaatgggaaataccatcgtttcttgggtcgtcatttcccccgcttctatgtcctgtacacaatcttcatgaaaggtattatttccattccaccttttgccaactacctggtcttcttgctaatgtacctgtttcccaggcaactactgatcaggcatttctggaccccaaaacaacaaactgatttcttagatatctatcatgctttccggaagcagtcccacccagaaattattagttatttagaaaaggtcatccctctcatttctgatgcaggactccggtggcgtctgacagatctgtgcaccaagatacagcgtggtacccacccagcaatacatgatatcttggctctgagagagtgtttctctaaccatcctctgggcatgaaccaactccaggctttgcacgtgaaagccttgagccgggccatgcttctcacatcttacctgcctcctcccttgttgagacatcgtttgaagactcatacaactgtgattcaccaactggacaaggctttggcaaagctggggattggccagctgactgctctccaccaactaccttgggacaaggcgctgaatgaaccatggagcggatggcattgtcctgcagtcgtatagtatagcagtgcaggaacaaacagcacttgccagcatggcacacatgtgggaactgcagacattcctctcacagctag

SEQ ID NO: 292463 - DNA, 822 bp, Artificial Sequence
  derived and/or modified sequence
atggccctgagccgggtgtgctgggcccggtctgctgtgtggggcagcgctgtgaccccaggccactttgtgacccggcggctgcagctgggccgcagcggcctggcctggggcgcccccaggagcagcaagctgcacctgagccccaaggcagatgtgaagaacctgatgtcctatgtggtgaccaagaccaaggccatcaacgggaagtaccaccgcttcctgggccgccacttcccccgcttctacgtgctgtacaccatcttcatgaagggcatcatcagcatccccccatttgccaactacctggtgttcctgctgatgtacctgttcccccggcagctgctgatccgccacttctggacccccaagcagcagacagacttcctggacatctaccacgccttcaggaagcagagccaccctgagatcatctcctacctggagaaggtgatccccctcatcagtgatgctggcctgcgctggaggctgacagacctgtgcaccaagatccagaggggcacccacccagccatccatgacatcctggccctgcgggagtgcttcagcaaccaccccctgggcatgaaccagctgcaggccctgcacgtgaaggccctgagccgggccatgctgctgaccagctacctgcccccacccctgctgcggcaccggctgaagacccacaccaccgtcatccaccagctggacaaggccctggccaagctgggcatcggccagctgacagccctgcaccagctgccctgggacaaggccctgaatgagccctggagcggctggcactgcccagctgtggtgtag

SEQ ID NO: 292464 - DNA, 822 bp, Artificial Sequence
  derived and/or modified sequence
atggccctgagccgggtgtgctgggcccggagcgccgtgtggggctcagctgtgacccctggccattttgtaacccgccggctgcagctagggcggtccggtctcgcgtggggcgctccgagatcctctaagctgcacctgtctccaaaggcagatgttaagaacctgatgtcctatgtagtcacaaaaaccaaggctattaatggcaagtatcatagattcctcggtagacacttccccaggttctatgttctttacactatctttatgaaaggaatcatcagtattccgcccttcgctaactatcttgtcttcctgctgatgtacctcttcccaagacaactcctcatccggcacttctggacaccaaaacagcagaccgatttcctcgacatctatcatgcgttcagaaagcaaagtcatccggagataatctcatacctggagaaggtgattcccctgatctccgacgcgggtctacgctggaggctgactgatctgtgcacgaagatccaacgcgggacgcatcctgccattcacgacattctggcactgcgggagtgtttcagcaaccatcccctggggatgaaccagctgcaggccctgcatgttaaggccctgtctagggcgatgcttctgacttcatacctgccaccacccttactccgacatcgacttaagacgcacactactgtaatccaccagctcgataaagccctggcaaagctgggaatcggccaacttacagccttgcatcaactgccatgggacaaagccttgaacgaaccttggagcggttggcactgcccagccgtggtgtag

SEQ ID NO: 292465 - DNA, 822 bp, Artificial Sequence
  derived and/or modified sequence
atggctctttcacgggtctgctgggctcggtctgccgtgtggggttccgctgtcactcctggacactttgtaacccgccgacttcagctcggcaggtccggcttggcctggggtgcccctaggtcgtctaagttacacctttctcctaaagccgacgttaaaaatctgatgtcctacgtggtgacaaagacaaaggccatcaatggcaagtaccatagattcttgggcagacattttccaaggttctacgtgttgtatacaattttcatgaaaggaattatatccatccccccattcgccaactacctggtgtttctcttaatgtatctcttcccgaggcagcttttgattcgacacttctggacacccaaacagcagaccgacttcctggatatctaccacgcctttaggaagcaatcccatccagaaatcatttcctacttggaaaaagttattcccttgataagtgacgcaggccttagatggcggctgaccgacctatgtactaagatccaacgcggaacacaccctgccattcatgacatactcgctctgcgtgagtgtttctcaaaccacccactgggtatgaaccagctgcaggccctccatgtgaaggcactcagtcgggcaatgctcttgacttcatacctccctcccccactcctgaggcatcgcctcaaaactcacaccaccgtcattcatcagctcgacaaggctctcgctaagcttgggatcggccagctcacagcattgcatcagcttccatgggataaagctcttaacgaaccttggagcggctggcattgcccggctgtggtctag

SEQ ID NO: 292466 - protein, 90 aa, Artificial Sequence
  derived and/or modified sequence
MRKQGVSSKRLQSSGRSQSKGRRGASLAREPEVEEEMEKSALGGGKLPRGSWRSSPGRIQSLKERKGLELEVVAKTFLLGPFQFVRNSLA

SEQ ID NO: 292467 - protein, 205 aa, Artificial Sequence
  derived and/or modified sequence
MRLKMFLTPHMCVMASLICSRQLFGWLFRRVRFEKVIFGILTVMSIQGYANLRNQWSIIGEFNNLPQEELLQWIKYSTTSDAVFAGAMPTMASIKLSTLHPIVNHPHYEDADLRARTKIVYSTYSRKSAKEVRDKLLELHVNYYVLEEAWCVVRTKPGCSMLEIWDVEDPSNAANPPLCSVLLEDARPYFTTVFQNSVYRVLKVN

SEQ ID NO: 292468 - protein, 162 aa, Artificial Sequence
  derived and/or modified sequence
MKIPLTATICLPGSSPPGLCIFAKVSDVKRLEMDDIADRMRMDAGEVTLVNHNSVFKTHLLPQTGFPEDQLSLSDQQILSSRQGHLDRSFTCSTRSAAYNPSYYSGPGLGVLARYSWGKMLTFGGHHGVTLMQIRHMAVAGFSSFINFQIILPQTVFLAQAI

SEQ ID NO: 292469 - DNA, 4838 bp, Artificial Sequence
  derived and/or modified sequence
gtggccgccggtggccgttaggctacctgaggccgttccttctggtctctctctcctgggccgcggagagaccgtctccctgccgttacagcaggccccatcccagcgcccagccgtacttggggaaaggccggttgcgattccggggctttcccgccagagctgggtcttctctggggagagctgttttcaccgggaagctcggctttctgtggtaccggcttcatctcccgccttccttgagacccgagtgatatttcttgactacttctgcgtctcacgtaaacatttctccaactctcctactctgtggtatctccctgagatgtgatatcgctagtgccaccatcagaaagaaacgtctggaccctcctgctcaggttatgaaaatccccttaactgccacaatttgcttacctggctcatcgcctcctggactttgtatctttgctaaagtcagtgatgtgaaaagacttgaaatggatgatattgctgataggatgaggatggatgctggagaagtgactttagtgaaccacaactccgtattcaaaacccacctcctgccacaaacaggttttccagaggaccagctttcgctttctgaccagcagattttatcttccaggcaaggacatttggaccgatcttttacatgttccacaagaagtgcagcttataatccaagctattactcagataatccttcctcagacagttttcttggctcaggcgatttaagaacctttggccagagtgcaaatggccaatggagaaattctaccccatcgtcaagctcatctttacaaaaatcaagaaacagccgaagtctttacctcgaaacccgaaagacctcaagtggattatcaaacagttttgcgggaaagtcaaaccatcactgccatgtatctgcatatgaaaaatcttttcctattaaacctgttccaagtccatcttggagtggttcatgtcgtcgaagtcttttgagccccaagaaaactcagaggcgacatgttagtacagcagaagagacagttcaagaagaagaaagagagatttacagacagctgctacagatggtcacagggaaacagtttactatagccaaacccaccacacattttcctttacacctgtctcgatgtcttagttccagtaaaaatactttgaaagactcactgtttaaaaatggaaactcttgtgcatctcagatcattggctctgatacttcatcatctggatctgccagcattttaactaaccaggaacagctgtcccacagtgtatattccctatcttcttataccccagatgttgcatttggatccaaagattctggtactcttcatcatccccatcatcaccactctgttccacatcagccagataacttagcagcttcaaatacacaatctgaaggatcagactctgtgattttactgaaagtgaaagattcccagactccaactcccagttctactttcttccaggcagagctgtggatcaaagaattaactagtgtttatgattctcgagcacgagaaagattgcgccagattgaagaacagaaggcattggccttacagcttcaaaaccagagattgcaggagcgggaacattcagtacatgattcagtagaactacatcttcgtgtacctcttgaaaaggagattcctgttactgttgtccaagaaacacaaaaaaaaggtcataaattaactgatagtgaagatgaatttcctgaaattacagaggaaatggagaaagaaataaagaatgtatttcgtaatgggaatcaggatgaagttctcagtgaagcatttcgcctgaccattacacgcaaagatattcaaactctaaaccatctgaattggctcaatgatgagatcatcaatttctacatgaatatgctgatggagcgaagtaaagagaagggcttgccaagtgtgcatgcatttaatacctttttcttcactaaattaaaaacggctggttatcaggcagtgaaacgttggacaaagaaagtagatgtattttctgttgacattcttttggtgcccattcacctgggagtacactggtgtctagctgttgtggactttagaaagaagaatattacctattacgactccatgggtgggataaacaatgaagcctgcagaatactcttgcaatacctaaagcaagaaagcattgacaagaaaaggaaagagtttgacaccaatggctggcagcttttcagcaagaaaagccaggagattcctcagcagatgaatggaagtgactgtgggatgtttgcctgcaaatatgctgactgtattaccaaagacagaccaatcaacttcacacagcaacacatgccatacttccggaagcggatggtctgggagatcctccaccgaaaactcttgtgaagactgtctcacttagcagaccttgaccatgtgggggaccagctctttgttgtctacagccagagaccttggaaacagctgctcccagccctctgctgttgtaacacccttgatcctggaccaggccctggcgagatgcattcacaagcacatctgcctttccttttgtatctcagatactatttttgcaaagaaactttggtgctgtgaaaggggtgagggacatccctaagctgaagagagagactgcttttcacttcttcagttctgccatcttgttttcaaagggctccagcctcactcagtccctaattatgggactgagaaaagcttggaaagaatcttggtttcatataaattcttgttgttaggccttactaagaagtaggaaagggcatgggcaaaaggtagggataaaaaccaccagcatatacatggacatacacacacacccacacacacaaacacacacacacacacaattttcacgatgtatggtcaggaatgtgactgtaaactggactttggggcccaggcataagtcccttcctccaggacctttcctatttatatgtccctatacaaaatccatctgcttttatacgtagctgttttatcatctgtagcttcatcctatccggaggcacagcacatgagccctggacaggtcccaaagttccaagcagtcctttccgtgaaagcaggggtttgcatgtgctaccaacacatgatacggggaagacccacccagggagcggtttcagtggcgcaacaaagcaccacttttactgttgcctacttctgaccaagaagaaaaaggaccttagtatttagcataaaattccagcgctggatgaatgcagatctagtttggtctgtggctagtttaaatatgtttctaaccacagagaatttcatatatatatacatatatatatacacatacatatatatatatatatatgtatgtataaaatttcacagggatatgcttttttttttaaagactgaatgtgttcaccatttagcctgtagatttatttccattttccaaattccagcacacagagatcccagcccctatgagtagggtgtttgtggactacctaatggaatatttttgaggcctggatgaactttgccatatgggtagaggttacagagggaggtgatattttcagctaaaaaaaaaaacgggtggagtttggactgatcaacttgagatttaaaaactgctattccttttgttctttctagcatctctccccaccctctgagagctcctcaggcttagatagtgaagtgatcaaatgccagtgtcattttgtacttaagttccaaagtaggaacattttatacttttttctgtattgtaataggtagttttgtatgaaatcttttctcctctcccgttgtaccgcattctttccagcattgtgctttttccctgggcttatttgaaaattttactgttttatacaagctcgtttagtacatttttctatgttttaccacaagttacaatttgaaaagaaaactattttttttaaatattccattgttaactgaatgttactgtttccactccagcaactacatgtcctcccttcaactgcctgccttttggggaaagaccaccttttgtgtgtttgttttttctctctctttctttccctttctctttctatctctctttatttttctttctttttctttgtttttgagttttctataggaaataaatagctttctatatatgagttgctggggaccttcacattctcttttagaaagctgtggcatgcagtctcattgcaggactcctggaatattgtctggttcttggtatttactgtatgtaagcaacaacttgaaaggtggcaatatggtgtcgatttggactatgaatcaaaagacctttttcaggttctttcactattgtctgggggactcagaacaagattgttctctgtatttattgtttgtccatttaggtaacatctgtcttaccttcctcacagactttgtacagaccaaagcaacaaatatttattgccatgtatagcagaaaatgaaacatgcaacaaaagcactttgaaaaatatataaggaattgttgagcctgtctgaatttgggccccctttctgactaatgcagttttgcacaaggtagaagttagtgaccctgagaccatcttaccaccctggacctggtccaaatacagacttacacagtggaccattctttcctgagctagccaacaagagcaggagtagtatctggaaactttcccctttgtttaggggtaggctttgatgaccaggaaaaaaaaaaaggtatttctgcattttatggcccaaaggcatgttattaatatcttatgtaatttactttaaactaaataagacttttttctcctgtgt

SEQ ID NO: 292470 - DNA, 4726 bp, Artificial Sequence
  derived and/or modified sequence
cctgctgtccggtggccgcgctgtggccgccggtggccgttaggctacctgaggccgttccttctggtctctctctcctgggccgcggagagaccgtctccctgccgttacagcaggccccatcccagcgcccagccgtacttggggaaaggccggttgcgattccggggctttcccgccagagctgggtcttctctggggagagctgttttcaccgggaagctcggctttctgtggtaccggcttcatctcccgccttccttgagacccgagtgatatttcttgactacttctgcgtctcacgtaaacatttctccaactctcctactctgtggtatctccctgagatgtgatatcgctagtgccaccatcagaaagaaacgtctggaccctcctgctcaggactttgtatctttgctaaagtcagtgatgtgaaaagacttgaaatggatgatattgctgataggatgaggatggatgctggagaagtgactttagtgaaccacaactccgtattcaaaacccacctcctgccacaaacaggttttccagaggaccagctttcgctttctgaccagcagattttatcttccaggcaaggacatttggaccgatcttttacatgttccacaagaagtgcagcttataatccaagctattactcagataatccttcctcagacagttttcttggctcaggcgatttaagaacctttggccagagtgcaaatggccaatggagaaattctaccccatcgtcaagctcatctttacaaaaatcaagaaacagccgaagtctttacctcgaaacccgaaagacctcaagtggattatcaaacagttttgcgggaaagtcaaaccatcactgccatgtatctgcatatgaaaaatcttttcctattaaacctgttccaagtccatcttggagtggttcatgtcgtcgaagtcttttgagccccaagaaaactcagaggcgacatgttagtacagcagaagagacagttcaagaagaagaaagagagatttacagacagctgctacagatggtcacagggaaacagtttactatagccaaacccaccacacattttcctttacacctgtctcgatgtcttagttccagtaaaaatactttgaaagactcactgtttaaaaatggaaactcttgtgcatctcagatcattggctctgatacttcatcatctggatctgccagcattttaactaaccaggaacagctgtcccacagtgtatattccctatcttcttataccccagatgttgcatttggatccaaagattctggtactcttcatcatccccatcatcaccactctgttccacatcagccagataacttagcagcttcaaatacacaatctgaaggatcagactctgtgattttactgaaagtgaaagattcccagactccaactcccagttctactttcttccaggcagagctgtggatcaaagaattaactagtgtttatgattctcgagcacgagaaagattgcgccagattgaagaacagaaggcattggccttacagcttcaaaaccagagattgcaggagcgggaacattcagtacatgattcagtagaactacatcttcgtgtacctcttgaaaaggagattcctgttactgttgtccaagaaacacaaaaaaaaggtcataaattaactgatagtgaagatgaatttcctgaaattacagaggaaatggagaaagaaataaagaatgtatttcgtaatgggaatcaggatgaagttctcagtgaagcatttcgcctgaccattacacgcaaagatattcaaactctaaaccatctgaattggctcaatgatgagatcatcaatttctacatgaatatgctgatggagcgaagtaaagagaagggcttgccaagtgtgcatgcatttaatacctttttcttcactaaattaaaaacggctggttatcaggcagtgaaacgttggacaaagaaagtagatgtattttctgttgacattcttttggtgcccattcacctgggagtacactggtgtctagctgttgtggactttagaaagaagaatattacctattacgactccatgggtgggataaacaatgaagcctgcagaatactcttgcaatacctaaagcaagaaagcattgacaagaaaaggaaagagtttgacaccaatggctggcagcttttcagcaagaaaagccagattcctcagcagatgaatggaagtgactgtgggatgtttgcctgcaaatatgctgactgtattaccaaagacagaccaatcaacttcacacagcaacacatgccatacttccggaagcggatggtctgggagatcctccaccgaaaactcttgtgaagactgtctcacttagcagaccttgaccatgtgggggaccagctctttgttgtctacagccagagaccttggaaacagctgctcccagccctctgctgttgtaacacccttgatcctggaccaggccctggcgagatgcattcacaagcacatctgcctttccttttgtatctcagatactatttttgcaaagaaactttggtgctgtgaaaggggtgagggacatccctaagctgaagagagagactgcttttcacttcttcagttctgccatcttgttttcaaagggctccagcctcactcagtccctaattatgggactgagaaaagcttggaaagaatcttggtttcatataaattcttgttgttaggccttactaagaagtaggaaagggcatgggcaaaaggtagggataaaaaccaccagcatatacatggacatacacacacacccacacacacaaacacacacacacacacaattttcacgatgtatggtcaggaatgtgactgtaaactggactttggggcccaggcataagtcccttcctccaggacctttcctatttatatgtccctatacaaaatccatctgcttttatacgtagctgttttatcatctgtagcttcatcctatccggaggcacagcacatgagccctggacaggtcccaaagttccaagcagtcctttccgtgaaagcaggggtttgcatgtgctaccaacacatgatacggggaagacccacccagggagcggtttcagtggcgcaacaaagcaccacttttactgttgcctacttctgaccaagaagaaaaaggaccttagtatttagcataaaattccagcgctggatgaatgcagatctagtttggtctgtggctagtttaaatatgtttctaaccacagagaatttcatatatatatacatatatatatacacatacatatatatatatatatatgtatgtataaaatttcacagggatatgcttttttttttaaagactgaatgtgttcaccatttagcctgtagatttatttccattttccaaattccagcacacagagatcccagcccctatgagtagggtgtttgtggactacctaatggaatatttttgaggcctggatgaactttgccatatgggtagaggttacagagggaggtgatattttcagctaaaaaaaaaaacgggtggagtttggactgatcaacttgagatttaaaaactgctattccttttgttctttctagcatctctccccaccctctgagagctcctcaggcttagatagtgaagtgatcaaatgccagtgtcattttgtacttaagttccaaagtaggaacattttatacttttttctgtattgtaataggtagttttgtatgaaatcttttctcctctcccgttgtaccgcattctttccagcattgtgctttttccctgggcttatttgaaaattttactgttttatacaagctcgtttagtacatttttctatgttttaccacaagttacaatttgaaaagaaaactattttttttaaatattccattgttaactgaatgttactgtttccactccagcaactacatgtcctcccttcaactgcctgccttttggggaaagaccaccttttgtgtgtttgttttttctctctctttctttccctttctctttctatctctctttatttttctttctttttctttgtttttgagttttctataggaaataaatagctttctatatatgagttgctggggaccttcacattctcttttagaaagctgtggcatgcagtctcattgcaggactcctggaatattgtctggttcttggtatttactgtatgtaagcaacaacttgaaaggtggcaatatggtgtcgatttggactatgaatcaaaagacctttttcaggttctttcactattgtctgggggactcagaacaagattgttctctgtatttattgtttgtccatttaggtaacatctgtcttaccttcctcacagactttgtacagaccaaagcaacaaatatttattgccatgtatagcagaaaatgaaacatgcaacaaaagcactttgaaaaatatataaggaattgttgagcctgtctgaatttgggccccctttctgactaatgcagttttgcacaaggtagaagttagtgaccctgagaccatcttaccaccctggacctggtccaaatacagacttacacagtggaccattctttcctgagctagccaacaagagcaggagtagtatctggaaactttcccctttgtttaggggtaggctttgatgaccaggaaaaaaaaaaaggtatttctgca

SEQ ID NO: 292471 - DNA, 2260 bp, Artificial Sequence
  derived and/or modified sequence
attccgagtacgagaaagcgaaaaagcccagactgaaaagggtactgagaaattacgactagtcttaaatgctcccttcgcttctcgggcctcgccacaccgcgcaggcgccccactggtccttaactctgttctttgacctcctgccccagccccctcctcttcagccacctagcgactcttccggtgctgtgaaggcggttccggttcgcggcggttcccgggttttgcgttccgcgcccggccggaaaccccttcgcatggcagccggttccggttcggactttgtatctttgctaaagtcagtgatgtgaaaagacttgaaatggatgatattgctgataggatgaggatggatgctggagaagtgactttagtgaaccacaactccgtattcaaaacccacctcctgccacaaacaggttttccagaggaccagctttcgctttctgaccagcagattttatcttccaggcaaggacatttggaccgatcttttacatgttccacaagaagtgcagcttataatccaagctattactcagataatccttcctcagacagttttcttggctcaggcgatttaagaacctttggccagagtgcaaatggccaatggagaaattctaccccatcgtcaagctcatctttacaaaaatcaagaaacagccgaagtctttacctcgaaacccgaaagacctcaagtggattatcaaacagttttgcgggaaagtcaaaccatcactgccatgtatctgcatatgaaaaatcttttcctattaaacctgttccaagtccatcttggagtggttcatgtcgtcgaagtcttttgagccccaagaaaactcagaggcgacatgttagtacagcagaagagacagttcaagaagaagaaagagagatttacagacagctgctacagatggtcacagggaaacagtttactatagccaaacccaccacacattttcctttacacctgtctcgatgtcttagttccagtaaaaatactttgaaagactcactgtttaaaaatggaaactcttgtgcatctcagatcattggctctgatacttcatcatctggatctgccagcattttaactaaccaggaacagctgtcccacagtgtatattccctatcttcttataccccagatgttgcatttggatccaaagattctggtactcttcatcatccccatcatcaccactctgttccacatcagccagataacttagcagcttcaaatacacaatctgaaggatcagactctgtgattttactgaaagtgaaagattcccagactccaactcccagttctactttcttccaggcagagctgtggatcaaagaattaactagtgtttatgattctcgagcacgagaaagattgcgccagattgaagaacagaaggcattggccttacagcttcaaaaccagagattgcaggagcgggaacattcagtacatgattcagtagaactacatcttcgtgtacctcttgaaaaggagattcctgttactgttgtccaagaaacacaaaaaaaaggtcataaattaactgatagtgaagatgaatttcctgaaattacagaggaaatggagaaagaaataaagaatgtatttcgtaatgggaatcaggatgaagttctcagtgaagcatttcgcctgaccattacacgcaaagatattcaaactctaaaccatctgaattggctcaatgatgagatcatcaatttctacatgaatatgctgatggagcgaagtaaagagaagggcttgccaagtgtgcatgcatttaatacctttttcttcactaaattaaaaacggctggttatcaggcagtgaaacgttggacaaagaaagtagatgtattttctgttgacattcttttggtgcccattcacctgggagtacactggtgtctagctgttgtggactttagaaagaagaatattacctattacgactccatgggtgggataaacaatgaagcctgcagaatactcttgcaatacctaaagcaagaaagcattgacaagaaaaggaaagagtttgacaccaatggctggcagcttttcagcaagaaaagccaggagattcctcagcagatgaatggaagtgactgtgggatgtttgcctgcaaatatgctgactgtattaccaaagacagaccaatcaacttcacacagcaacacatgccatacttccggaagcggatggtctgggagatcctccaccgaaaactcttgtga

SEQ ID NO: 292472 - DNA, 4088 bp, Artificial Sequence
  derived and/or modified sequence
gaggccgttccttctggtctctctctcctgggccgcggagagaccgtctccctgccgttacagcaggccccatcccagcgcccagccgtacttggggaaaggccggttgcgattccggggctttcccgccagagctgggtcttctctggggagagctgttttcaccgggaagctcggctttctgtggtaccggcttcatctcccgccttccttgagacccgagtgatatttcttgactacttctgcgtctcacgtaaacatttctccaactctcctactctgtggtatctccctgagatgtgatatcgctagtgccaccatcagaaagaaacgtctggaccctcctgctcaggactttgtatctttgctaaagtcagtgatgtgaaaagacttgaaatggatgatattgctgataggatgaggatggatgctggagaagtgactttagtgaaccacaactccgtattcaaaacccacctcctgccacaaacaggttttccagaggaccagctttcgctttctgaccagcagattttatcttccaggcaaggacatttggaccgatcttttacatgttccacaagaagtgcagcttataatccaagctattactcagataatccttcctcagacagttttcttggctcaggcgatttaagaacctttggccagagtgcaaatggccaatggagaaattctaccccatcgtcaagctcatctttacaaaaatcaagaaacagccgaagtctttacctcgaaacccgaaagacctcaagtggattatcaaacagttttgcgggaaagtcaaaccatcactgccatgtatctgcatatgaaaaatcttttcctattaaacctgttccaagtccatcttggagtggttcatgtcgtcgaagtcttttgagccccaagaaaactcagaggcgacatgttagtacagcagaagagacagttcaagaagaagaaagagagatttacagacagctgctacagatggtcacagggaaacagtttactatagccaaacccaccacacattttcctttacacctgtctcgatgtcttagttccagtaaaaatactttgaaagactcactgtttaaaaatggaaactcttgtgcatctcagatcattggctctgatacttcatcatctggatctgccagcattttaactaaccaggaacagctgtcccacagtgtatattccctatcttcttataccccagatgttgcatttggatccaaagattctggtactcttcatcatccccatcatcaccactctgttccacatcagccagataacttagcagcttcaaatacacaatctgaaggatcagactctgtgattttactgaaagtgaaagattcccagactccaactcccagttctactttcttccaggcagagctgtggatcaaagaattaactagtgtttatgattctcgagcacgagaaagattgcgccagattgaagaacagaaggcattggccttacagcttcaaaaccagagattgcaggagcgggaacattcagtacatgattcagtagaactacatcttcgtgtacctcttgaaaaggagattcctgttactgttgtccaagaaacacaaaaaaaaggtcataaattaactgatagtgaagatgaatttcctgaaattacagaggaaatggagaaagaaataaagaatgtatttcgtaatgggaatcaggatgaagttctcagtgaagcatttcgcctgaccattacacgcaaagatattcaaactctaaaccatctgaattggctcaatgatgagatcatcaatttctacatgaatatgctgatggagcgaagtaaagagaagggcttgccaagtgtgcatgcatttaatacctttttcttcactaaattaaaaacggctggttatcaggcagtgaaacgttggacaaagaaagtagatgtattttctgttgacattcttttggtgcccattcacctgggagtacactggtgtctagctgttgtggactttagaaagaagaatattacctattacgactccatgggtgggataaacaatgaagcctgcagaatactcttgcaatacctaaagcaagaaagcattgacaagaaaaggaaagagtttgacaccaatggctggcagcttttcagcaagaaaagccaggagattcctcagcagatgaatggaagtgactgtgggatgtttgcctgcaaatatgctgactgtattaccaaagacagaccaatcaacttcacacagcaacacatgccatacttccggaagcggatggtctgggagatcctccaccgaaaactcttgtgaagactgtctcacttagcagaccttgaccatgtgggggaccagctctttgttgtctacagccagagaccttggaaacagctgctcccagccctctgctgttgtaacacccttgatcctggaccaggccctggcgagatgcattcacaagcacatctgcctttccttttgtatctcagatactatttttgcaaagaaactttggtgctgtgaaaggggtgagggacatccctaagctgaagagagagactgcttttcacttcttcagttctgccatcttgttttcaaagggctccagcctcactcagtccctaattatgggactgagaaaagcttggaaagaatcttggtttcatataaattcttgttgttaggccttactaagaagtaggaaagggcatgggcaaaaggtagggataaaaaccaccagcatatacatggacatacacacacacccacacacacaaacacacacacacacacaattttcacgatgtatggtcaggaatgtgactgtaaactggactttggggcccaggcataagtcccttcctccaggacctttcctatttatatgtccctatacaaaatccatctgcttttatacgtagctgttttatcatctgtagcttcatcctatccggaggcacagcacatgagccctggacaggtcccaaagttccaagcagtcctttccgtgaaagcaggggtttgcatgtgctaccaacacatgatacggggaagacccacccagggagcggtttcagtggcgcaacaaagcaccacttttactgttgcctacttctgaccaagaagaaaaaggaccttagtatttagcataaaattccagcgctggatgaatgcagatctagtttggtctgtggctagtttaaatatgtttctaaccacagagaatttcatatatatatacatatatatatacacatacatatatatatatatatatgtatgtataaaatttcacagggatatgcttttttttttaaagactgaatgtgttcaccatttagcctgtagatttatttccattttccaaattccagcacacagagatcccagcccctatgagtagggtgtttgtggactacctaatggaatatttttgaggcctggatgaactttgccatatgggtagaggttacagagggaggtgatattttcagctaaaaaaaaaaacgggtggagtttggactgatcaacttgagatttaaaaactgctattccttttgttctttctagcatctctccccaccctctgagagctcctcaggcttagatagtgaagtgatcaaatgccagtgtcattttgtacttaagttccaaagtaggaacattttatacttttttctgtattgtaataggtagttttgtatgaaatcttttctcctctcccgttgtaccgcattctttccagcattgtgctttttccctgggcttatttgaaaattttactgttttatacaagctcgtttagtacatttttctatgttttaccacaagttacaatttgaaaagaaaactattttttttaaatattccattgttaactgaatgttactgtttccactccagcaactacatgtcctcccttcaactgcctgccttttggggaaagaccaccttttgtgtgtttgttttttctctctctttctttccctttctctttctatctctctttatttttctttctttttctttgtttttgagttttctataggaaataaatagctttctatata

SEQ ID NO: 292473 - protein, 40 aa, Artificial Sequence
  derived and/or modified sequence
MGNIFGNLLKSLIGKKEMRILMVGLDAAGKTTILYKLKLG

SEQ ID NO: 292474 - DNA, 153 bp, Artificial Sequence
  derived and/or modified sequence
atggggaacatcttcggcaatctgctcaagtccttgattggaaaaaaggagatgaggattttgatggttgggctcgacgcagcagggaagaccaccatactctacaaactaaagctcggcgagatcgtgactaccatccctactatcggttag

SEQ ID NO: 292475 - DNA, 309 bp, Artificial Sequence
  derived and/or modified sequence
atgggtaacattttcggcaacctgctcaagagccttattggtaagaaggagatgcgaatcctgatggtcggcctcgatgccgcgggaaagactacaatcctgtacaaactgaagctgggggagatcgtcacgaccatccccaccatcgggtttaatgtggaaacagtggaatacaagaatatttcgttcacagtttgggatgttggagggcaggataaaatcagacccctatggcgtcattactttcaaaacacacagggactgatttttgtcgtcgactccaatgaccgggaacgagtgaacgagtag

SEQ ID NO: 292476 - DNA, 123 bp, Artificial Sequence
  derived and/or modified sequence
atgggcaatatttttggaaaccttctgaagtccctcatcggaaagaaggaaatgcgcattctcatggtgggcctcgatgcagccgggaaaaccacaatcctgtacaagctgaagttgggctag

SEQ ID NO: 292477 - DNA, 576 bp, Artificial Sequence
  derived and/or modified sequence
agagggagcggagcggaacctgcggggcagaggcggcggccgcagcggcgcagctgatagcaggaacagttttattgggaggagatctgctgcaagagtctgattgcttgggtcagtgcaacaggacagaatctagtcgctgcatacctccttccctgtcctcaatcagaacctgtgggctctgaggacatggaaaccatttcttcagtttgtcagatacagggaaaaggatcagagaccacctatagaatacagtcttcttcaaccccacaagtgttttgccaccctcagtagaaccgttctcaacacgcctgtcagtcactagctataggatcaagtcttccataccagggaccaggccaaaaccagactgccactgcccctacttgggccccactgtccccagaaagcagctgctgtgatcatgggcaatatctttggaaaccttctcaagagcctgattgggaagaaggagatgcgcatcctgatggtgggcctggatgccgcaggaaagaccaccatcctatacaagctgaaactcggggagatcgtcaccaccatccctaccattgggtt

SEQ ID NO: 292478 - DNA, 485 bp, Artificial Sequence
  derived and/or modified sequence
gctcaagggggcgacctgggctgcagttaggttgtcgcctgcaggaggtgtgctgttgagggagaggaaaaccgtccgaggagaggatcaagtcttccataccagggaccaggccaaaaccagactgccactgcccctacttgggccccactgtccccagaaagcagctgctgtgatcatgggcaatatctttggaaaccttctcaagagcctgattgggaagaaggagatgcgcatcctgatggtgggcctggatgccgcaggaaagaccaccatcctatacaagctgaaactcggggagatcgtcaccaccatccctaccattgggttcaatgtggagacagtggagtataagaacatcagctttacagtgtgggatgtgggtggccaggacaagattcgacccctctggagacactacttccagaacacccaagggttgatatttgtggtcgacagcaatgatcgggagcgagtaaatgagg

SEQ ID NO: 292479 - DNA, 557 bp, Artificial Sequence
  derived and/or modified sequence
aaaacgggccacttgattagcaaagtggtagctgttattttgggggaattcccgtcttgattgcattaaggcgggtctccatctttccaggccaggaggaatgtggtggtggaggtggaggattgtggtatgtggtcaggagtgagaagaaatagtaaggccgtcccggtgagggagaaatgtaacctaaaacctgtctctgctgttgttggattgggtcacccctggtctatggcatgaaagttttattgggaggagatctgctgcaagagtctgattgcttgggtcagtgcaacaggacagaatctagtcgctgcatacctccttccctgtcctcaatcaggatcaagtcttccataccagggaccaggccaaaaccagactgccactgcccctacttgggccccactgtccccagaaagcagctgctgtgatcatgggcaatatctttggaaaccttctcaagagcctgattgggaagaaggagatgcgcatcctgatggtgggcctggatgccgcaggaaagaccaccatcctatacaagctgaaactcgggg

SEQ ID NO: 292480 - DNA, 153 bp, Artificial Sequence
  derived and/or modified sequence
atgggcaacatctttggaaacctgctgaagagcctgattggcaagaaggagatgaggatcctgatggtgggcctggatgctgctgggaagaccaccatcctgtacaagctgaagctgggggagatcgtgaccaccatccccaccatcggctag

SEQ ID NO: 292481 - DNA, 309 bp, Artificial Sequence
  derived and/or modified sequence
atgggcaacatctttggaaacctgctgaagagcctgattggcaagaaggagatgaggatcctgatggtgggcctggatgctgctgggaagaccaccatcctgtacaagctgaagctgggggagatcgtgaccaccatccccaccatcggcttcaacgtggagaccgtggagtacaagaacatctccttcaccgtgtgggatgtgggcggccaggacaagatccggcccctgtggaggcactacttccagaacacccagggcctcatctttgtggtggacagcaatgaccgggagcgggtgaatgaatag

SEQ ID NO: 292482 - DNA, 123 bp, Artificial Sequence
  derived and/or modified sequence
atgggcaacatctttggaaacctgctgaagagcctgattggcaagaaggagatgaggatcctgatggtgggcctggatgctgctgggaagaccaccatcctgtacaagctgaagctgggctag

SEQ ID NO: 292483 - DNA, 153 bp, Artificial Sequence
  derived and/or modified sequence
atgggcaacatcttcggcaacctgctgaagagcctgatcggcaagaaggagatgcgaattctgatggtcggtctggacgctgctgggaaaactactatcctgtacaagttgaaactgggagaaattgtcaccactattcccactattggatag

SEQ ID NO: 292484 - DNA, 309 bp, Artificial Sequence
  derived and/or modified sequence
atgggcaacatcttcggcaacctgctgaagagcctgatcggcaagaaggagatgcggattctgatggtggggctggacgctgccggcaaaacgactattctatacaaactgaagttaggggagatcgttactacaatccccaccataggcttcaatgtggagacggtcgaatacaagaacatatctttcacagtttgggacgtgggtggccaggataagatccggcctctatggagacattatttccagaacacacaagggctcatttttgttgtggactccaatgaccgcgagcgggttaacgaatag

SEQ ID NO: 292485 - DNA, 123 bp, Artificial Sequence
  derived and/or modified sequence
atgggcaacatcttcggcaacctgctgaagagcctgatcggcaagaaggaaatgcggatcctgatggtggggctggacgcagcgggaaagaccaccattttgtataagctgaaactgggatag

SEQ ID NO: 292486 - DNA, 153 bp, Artificial Sequence
  derived and/or modified sequence
atgggtaatatattcggaaatctgttaaaaagtctgattgggaaaaaagaaatgcgtatccttatggtggggctggacgctgccggaaaaaccaccattttgtacaagctgaagctgggagagatcgtgaccacaatcccaacgattggatag

SEQ ID NO: 292487 - DNA, 309 bp, Artificial Sequence
  derived and/or modified sequence
atgggcaacatcttcggaaacctgctcaagagcctgattggtaaaaaagagatgagaattctgatggtgggcttggatgctgcaggcaagaccactatcttgtataaactcaagctcggggaaatcgtgactaccataccaactatcgggttcaacgtggaaactgtggagtataagaacatcagctttactgtatgggacgtgggcggtcaggacaagatccggccactgtggagacattattttcagaatacccagggcctgatcttcgtagttgattcaaacgatagagagagggtgaacgagtag

SEQ ID NO: 292488 - DNA, 123 bp, Artificial Sequence
  derived and/or modified sequence
atggggaacatctttggcaatctgcttaaaagtttgattggaaagaaggagatgagaatcttgatggtagggctggatgcggctggtaagacaactattctatacaagctgaaacttggctag

SEQ ID NO: 292489 - DNA, 153 bp, Artificial Sequence
  derived and/or modified sequence
atgggcaacatcttcggcaacctgctgaagagcctgatcggcaagaaggagatgagaatcctgatggtgggcctggacgccgccggcaagaccaccatcctgtacaagctgaagctgggcgagatcgtgaccaccatccccaccatcggctag

SEQ ID NO: 292490 - DNA, 309 bp, Artificial Sequence
  derived and/or modified sequence
atgggcaacatcttcggcaacctgctgaagagcctgatcggcaagaaggagatgagaatcctgatggtgggcctggacgccgccggcaagaccaccatcctgtacaagctgaagctgggcgagatcgtgaccaccatccccaccatcggcttcaacgtggagaccgtggagtacaagaacatcagcttcaccgtgtgggacgtgggcggccaggacaagatcagacccctgtggagacactacttccagaacacccagggcctgatcttcgtggtggacagcaacgacagagagagagtgaacgagtag

SEQ ID NO: 292491 - DNA, 123 bp, Artificial Sequence
  derived and/or modified sequence
atgggcaacatcttcggcaacctgctgaagagcctgatcggcaagaaggagatgagaatcctgatggtgggcctggacgccgccggcaagaccaccatcctgtacaagctgaagctgggctag

SEQ ID NO: 292492 - protein, 218 aa, Artificial Sequence
  derived and/or modified sequence
MCNTNMSVPTDGAVTTSQIPASEQETLDYWKCTSCNEMNPPLPSHCNRCWALRENWLPEDKGKDKGEISEKAKLENSTQAEEGFDVPDCKKTIVNDSRESCVEENDDKITQASQSQESEDYSQPSTSSSIIYSSQEDVKEFEREETQDKEESVESSLPLNAIEPCVICQGRPKNGCIVHGKTGHLMACFTCAKKLKKRNKPCPVCRQPIQMIVLTYFP

SEQ ID NO: 292493 - protein, 130 aa, Artificial Sequence
  derived and/or modified sequence
MCNTNMSVPTDGAVTTSQIPASEQETLVRPKPLLLKLLKSVGAQKDTYTMKEFEREETQDKEESVESSLPLNAIEPCVICQGRPKNGCIVHGKTGHLMACFTCAKKLKKRNKPCPVCRQPIQMIVLTYFP

SEQ ID NO: 292494 - DNA, 669 bp, Artificial Sequence
  derived and/or modified sequence
atgggcgtgacctgggacttcagcatgagcaacggcggccccagaggcaagacctacgccttcaagggcgactacgtgtggaccgtgagcgacagcggccccggccccctgttcagagtgagcgccctgtgggagggcctgcccggcaacctggacgccgccgtgtacagccccagaacccagtggatccacttcttcaagggcgacaaggtgtggagatacatcaacttcaagatgagccccggcttccccaagaagctgaacagagtggagcccaacctggacgccgccctgtactggcccctgaaccagaaggtgttcctgttcaagggcagcggctactggcagtgggacgagctggccagaaccgacttcagcagctaccccaagcccatcaagggcctgttcaccggcgtgcccaaccagcccagcgccgccatgagctggcaggacggcagagtgtacttcttcaagggcaaggtgtactggagactgaaccagcagctgagagtggagaagggctaccccagaaacatcagccacaactggatgcactgcagacccagaaccatcgacaccacccccagcggcggcaacaccacccccagcggcaccggcatcaccctggacaccaccctgagcgccaccgagaccaccttcgagtactag

SEQ ID NO: 292495 - DNA, 669 bp, Artificial Sequence
  derived and/or modified sequence
atgggggtgacgtgggacttttcaatgtctaatggaggtccacgcggaaagacctacgcattcaagggagattacgtctggactgtgtccgactccggtcccggaccactgttccgagtgtctgctctctgggagggattgcctggaaatctcgacgcagcagtctatagcccacggacccaatggattcatttctttaagggcgacaaagtctggaggtatatcaacttcaagatgtcccctggatttcccaagaagttaaatcgtgtggaacccaacctggatgccgcattatattggccacttaaccagaaagtgttcttgtttaaaggcagcgggtattggcagtgggatgaacttgcaaggaccgactttagctcctaccctaaacctattaaaggattgtttaccggtgtgcctaaccagccaagtgccgccatgtcttggcaggacggacgagtgtacttctttaaggggaaggtctattggaggctgaatcagcagctgcgggttgagaaaggatatccacggaatatctcacataactggatgcactgtagacctcggacgatagacaccacaccttcaggtggaaatacaaccccgagcggtaccgggataacactcgacacaactctttcagcgaccgaaactaccttcgaatattag

SEQ ID NO: 292496 - DNA, 669 bp, Artificial Sequence
  derived and/or modified sequence
atgggcgtgacctgggacttctccatgagcaatggaggcccccggggcaagacctacgccttcaagggggactatgtgtggacagtgtctgacagcggccctggccccctcttccgggtgtctgccctgtgggagggcctgcccggcaacctggatgctgctgtgtacagccccaggacccagtggatccacttcttcaagggggacaaggtgtggagatacatcaacttcaagatgagccctggcttccccaagaagctgaacagagtggagcccaacctggatgctgccctgtactggcccctgaaccagaaggtgttcctgttcaagggcagcggctactggcagtgggatgagctggccaggacagacttcagcagctaccccaagcccatcaagggcctcttcaccggggtgcccaaccagcccagcgctgccatgtcctggcaggacggccgggtgtacttcttcaagggcaaggtgtactggaggctgaaccagcagctgcgggtggagaagggctaccccaggaacatcagccacaactggatgcactgccggcccaggaccatcgacaccacccccagcggcggcaacaccaccccatctggaacaggcatcaccctggacaccaccctgagcgccacagagaccacctttgagtactag

SEQ ID NO: 292497 - DNA, 669 bp, Artificial Sequence
  derived and/or modified sequence
atgggcgtgacctgggacttcagcatgagcaacggcggcccccggggtaagacatacgccttcaagggggattacgtctggaccgtgagtgattctggcccaggccccctcttccgagtttccgccctgtgggagggactgcctggcaatttagacgccgccgtttatagtcctcgtacacagtggatccacttcttcaaaggcgataaagtctggaggtacataaatttcaaaatgagtcctggtttcccaaaaaagctgaatagggttgaacccaatcttgatgcagccctgtactggcctcttaaccaaaaagtatttctcttcaaaggtagcgggtactggcagtgggatgagttagccaggactgatttttcctcctatccaaagccaatcaaaggactattcactggggtgccaaatcaaccctcggctgcaatgtcgtggcaggacgggagggtatacttcttcaaaggaaaggtatattggcgcctcaaccagcagctgagagtcgaaaagggctatccaagaaacataagccacaattggatgcattgcaggcctcgtacaattgatacaaccccctctggagggaacaccacgccatcgggcaccggtattacgcttgataccaccctgagcgcaacagaaaccaccttcgagtactag

SEQ ID NO: 292498 - DNA, 669 bp, Artificial Sequence
  derived and/or modified sequence
atgggagtcacgtgggacttctctatgtccaacggaggaccaagaggaaaaacttacgcttttaaaggcgattacgtgtggacagtatctgattctggcccaggacccttgtttcgcgtgagcgctctgtgggagggtctgcctgggaacctggacgccgctgtatatagtccgaggacccagtggattcacttctttaaaggcgacaaggtgtggcgttatattaacttcaaaatgagtcctggatttcccaagaagctaaaccgcgtcgagcccaacctggacgctgccctctactggccgctcaatcagaaggtgtttttgtttaagggcagcggttactggcagtgggatgagttggccagaacagacttcagctcttacccgaagccaattaagggtttattcactggggttccgaaccagcccagcgccgcaatgagctggcaggatgggagagtttatttctttaaggggaaagtctattggcggctcaaccaacagttgagggtagaaaagggttatccaaggaacataagccataattggatgcattgtagacccagaacgatagacaccactccctccggcggtaacaccaccccatccggtacaggcattacactggataccaccttgtccgcaacggagactacattcgaatattag

SEQ ID NO: 292499 - DNA, 669 bp, Artificial Sequence
  derived and/or modified sequence
atgggagtgacatgggatttctccatgtccaatggcggtcccagaggaaagacctatgcttttaagggcgactatgtgtggaccgtttccgatagcggccccggcccattgttcagagtttcagccctatgggagggcctgcccgggaatctggatgccgctgtatactccccccgtacccagtggatccacttttttaaaggtgacaaagtgtggcgatatataaatttcaagatgagccctggatttcccaaaaaattgaaccgtgtggagccaaatttagacgccgccctctactggccactgaaccagaaagtcttcctattcaaggggagtggatattggcagtgggacgagttagccagaacggatttctccagctacccgaaaccaatcaaagggctatttacgggcgtccccaatcagcccagcgccgctatgtcttggcaggacggtagggtgtatttttttaaaggaaaagtttactggagattaaaccaacagctccgagtcgaaaagggatacccacgcaacatcagccataattggatgcactgcaggccaagaactattgacactaccccttctgggggaaacactacaccctcgggcaccggtattactttggatacaacactatccgctactgagactacctttgagtattag

SEQ ID NO: 292500 - DNA, 669 bp, Artificial Sequence
  derived and/or modified sequence
atgggcgtgacctgggatttctctatgagtaatggcgggccgaggggaaagacatacgcatttaaaggggattacgtgtggacagtgtcggatagtggccctgggcctctatttagagttagcgccctatgggaaggattacccggcaatcttgacgctgccgtttatagtccacgtacacaatggatacacttcttcaaaggagataaggtgtggcggtacatcaatttcaaaatgtcaccgggctttccgaagaaactgaatagggtcgaaccaaatcttgacgccgcactttactggccacttaaccagaaagtgttcctgttcaaaggaagtggctattggcagtgggatgagttggctaggaccgatttttcctcgtatcccaaacctattaaaggactgttcactggagtccctaatcaacctagtgcggctatgtcgtggcaggacggtcgggtgtactttttcaaaggtaaggtgtattggcggttgaatcagcagttacgggtcgaaaagggctaccctagaaatatcagccataattggatgcattgccggcccagaacaattgataccacgccctcaggaggaaatacaaccccaagcggaactggcattaccctggacacaaccctcagcgcgaccgagacaacctttgaatactag

SEQ ID NO: 292501 - DNA, 2245 bp, Artificial Sequence
  derived and/or modified sequence
atgggagtgacatgggacttcagcatgagcaatggagggccccgtgggaagacctatgctttcaagggggactatgtgtggactgtatcagattcaggaccgggccccttgttccgagtgtctgccctttgggaggggctccccggaaacctggatgctgctgtctactcgcctcgaacacaatggattcacttctttaagggagacaaggtgtggcgctacattaatttcaagatgtctcctggcttccccaagaagctgaatagggtagaacctaacctggatgcagctctctattggcctctcaaccaaaaggtgttcctctttaagggctccgggtactggcagtgggacgagctagcccgaactgacttcagcagctaccccaaaccaatcaagggtttgtttacgggagtgccaaaccagccctcggctgctatgagttggcaagatggccgagtctacttcttcaagggcaaagtctactggcgcctcaaccagcagcttcgagtagagaaaggctatcccagaaatatttcccacaactggatgcactgtcgtccccggactatagacactaccccatcaggtgggaataccactccctcaggtacgggcataaccttggataccactctctcagccacagaaaccacgtttgaatactgactgctcacccacagacacaatcttggacattaacccctgaggctccaccacccaccctttcatttcccccccagaagcctaaggcctaatagctgaatgaaatacctgtctgctcagtagaaccttgcaggtgctgtagcaggcgcaagaccgtagatctcaggcctctaacacttccaactccagccaccactttcctgtgcattttcactcctgagaagtgctcccctaactcagatcccctaacttagatttggcccccaactccatttcctgtctgtcttagacagcccttccaactgtgtcatctcttctctggaggtcaatggtggagggagatgcctgggtcctgttcttcctacataaaatgcaagaaaacagcatggccagtaaactgagcaagggccttggaatccttgagaatcacatttatgtgcttatgattacgggcaagctaattaaccttgttgaatctcagattccccatttgcaacattaggttaagaccagtactgcaggattgttgcactaaatgaaatactgtatgtgaagtgcctggcacagtgtctggtacatttgtgtttaataaaagctaactccatgttcataagagaggactgaacagctcttcctctagctgtctggctgtataactcttacagtagtctgtataataagggcatctctattagatctttaggggacagaggatttgtcaagatggttagctctttgttttggggtgcagagaaagaaaagagcagcaacagcagaggctggactccctggttcagtatttaatgccattttattcacatgctcccatgttctccctccctcccattgtagccttgctgcccaggggagggatatgtcttcctttatgcatctgggaaaccaggaacagaccctgcgcaggagagtcagagggggaagagttagaatgggtcagtggctggaacaaagttctggttaaggaggaaattagtgccacccacggtgagaagcagagaaggcacttgcatcctatgcagccctgaagaccaggctcctttgggcaaaaggcaagactctggcaggtgggtcaatgctctctccttggagcaagaagccagcttttggggaaggcaggtcctgaggcaggcactgccctgtggtcttccccaggttgaggagagaagtggaagccccatggaagacagtgctcccagctgaggtaggaggcggaggtgggggtgggggtagtttaagcctatggggcccagggggaaaggccaaacagaaacccaactaccccctaatgaagggcctggaggttggggtatcttggagctcctcagagcccttcttcccatcaaaaaggtatcaaatgccttggaagctccctgatcctacaaaacaaaaaaatgcttatttttaccactgtgaggcaagctgaggtgaacatttaaaaggctatttcaagacgaggtgcggtggctataatcctagcactttgggaggctgaagcaggaggatcacttgagcccaggagttcaagaccagcttgggcaacatagggagaccctgtctctgc

SEQ ID NO: 292502 - RNA, 669 nt, Artificial Sequence
  derived and/or modified sequence
augggagugacaugggauuucuccauguccaauggcggucccagaggaaagaccuaugcuuuuaagggcgacuauguguggaccguuuccgauagcggccccggcccauuguucagaguuucagcccuaugggagggccugcccgggaaucuggaugccgcuguauacuccccccguacccaguggauccacuuuuuuaaaggugacaaaguguggcgauauauaaauuucaagaugagcccuggauuucccaaaaaauugaaccguguggagccaaauuuagacgccgcccucuacuggccacugaaccagaaagucuuccuauucaaggggaguggauauuggcagugggacgaguuagccagaacggauuucuccagcuacccgaaaccaaucaaagggcuauuuacgggcguccccaaucagcccagcgccgcuaugucuuggcaggacgguaggguguauuuuuuuaaaggaaaaguuuacuggagauuaaaccaacagcuccgagucgaaaagggauacccacgcaacaucagccauaauuggaugcacugcaggccaagaacuauugacacuaccccuucugggggaaacacuacacccucgggcaccgguauuacuuuggauacaacacuauccgcuacugagacuaccuuugaguauuag

SEQ ID NO: 292503 - RNA, 669 nt, Artificial Sequence
  derived and/or modified sequence
augggcgugaccugggauuucucuaugaguaauggcgggccgaggggaaagacauacgcauuuaaaggggauuacguguggacagugucggauaguggcccugggccucuauuuagaguuagcgcccuaugggaaggauuacccggcaaucuugacgcugccguuuauaguccacguacacaauggauacacuucuucaaaggagauaagguguggcgguacaucaauuucaaaaugucaccgggcuuuccgaagaaacugaauagggucgaaccaaaucuugacgccgcacuuuacuggccacuuaaccagaaaguguuccuguucaaaggaaguggcuauuggcagugggaugaguuggcuaggaccgauuuuuccucguaucccaaaccuauuaaaggacuguucacuggagucccuaaucaaccuagugcggcuaugucguggcaggacggucggguguacuuuuucaaagguaagguguauuggcgguugaaucagcaguuacgggucgaaaagggcuacccuagaaauaucagccauaauuggaugcauugccggcccagaacaauugauaccacgcccucaggaggaaauacaaccccaagcggaacuggcauuacccuggacacaacccucagcgcgaccgagacaaccuuugaauacuag

SEQ ID NO: 292504 - protein, 782 aa, Artificial Sequence
  derived and/or modified sequence
MPEPTKKEENEVPAPAPPPEEPSKEKEAGTTPAKDEEEVSPPSALPPGLGSRALERKDSDWTLVETPPGEEQAKQNANSQLSILFIEKPQGGTVKVGEDITFIAKVKAEDLLRKPTIKWFKGKWMDLASKAGKHLQLKETFERHSRVYTFEMQIIKAKDNFAGNYRCEVTYKDKFDSCSFDLEVHESTGTTPNIDIRSAFKRSGEGQEDAGELDFSGLLKRREVKQQEEEPQVDVWELLKNAKPSEYEKIAFQYGITDLRGMLKRLKRMRREEKKSAAFAKILDPAYQVDKGGRVRFVVELADPKLEVKWYKNGQEIRPSTKYIFEHKGCQRILFINNCQMTDDSEYYVTAGDEKCSTELFVREPPIMVTKQLEDTTAYCGERVELECEVSEDDANVKWFKNGEEIIPGPKSRYRIRVEGKKHILIIEGATKADAAEYSVMTTGGQSSAKLSVDLKPLKILTPLTDQTVNLGKEICLKCEISENIPGKWTKNGLPVQESDRLKVVHKGRIHKLVIANALTEDEGDYVFAPDAYNVTLPAKVHVIDPPKIILDGLDADNTVTVIAGNKLRLEIPISGEPPPKAMWSRGDKAIMEGSGRIRTESYPDSSTLVIDIAERDDSGVYHINLKNEAGEAHASIKVKVVDFPDPPVAPTVTEVGDDWCIMNWEPPAYDGGSPILGYFIERKKKQSSRWMRLNFDLCKETTFEPKKMIEGVAYEVRIFAVNAIGISKPSMPSRPFVPLAVTSPPTLLTVDSVTDTTVTMRWRPRPHWCSRFRWLCARVLL

SEQ ID NO: 292505 - DNA, 2349 bp, Artificial Sequence
  derived and/or modified sequence
atgccggagcccactaaaaaagaagaaaacgaggtccctgcccctgcgccccccccggaggaaccttccaaggagaaagaggctgggactacaccggccaaagatgaggaagaagtaagccctcccagcgcactgcccccgggcttgggcagcagggccttggaacgcaaggacagcgactggaccctagtggaaacccctcctggcgaggagcaagctaaacagaacgccaattcacagctcagtatcctgttcatcgaaaagccacaagggggtacagtgaaggttggggaagatatcactttcattgctaaggtcaaagccgaagaccttcttaggaagccgactatcaagtggttcaagggaaagtggatggacttagctagtaaggccggcaagcacttgcaactgaaggaaacctttgaacgacactccagagtgtacacctttgagatgcagataattaaagccaaagacaatttcgctggaaattaccgatgcgaggtgacatacaaggataagttcgattcttgctcattcgatttggaggtccacgaatctacaggaacaaccccgaatattgacattagatccgcatttaagaggagtggtgaaggtcaggaagacgctggtgagttagatttcagtgggctactcaaaagacgggaagtaaagcagcaggaggaggaaccacaagtggacgtttgggagctcctaaaaaacgcgaaaccgtctgaatatgagaaaatcgcttttcagtacgggatcacagacctgcgtggcatgctgaaaagactgaagagaatgagacgggaggaaaagaagtctgccgctttcgccaaaatactggacccggcataccaggttgataaaggtgggcgggtgaggttcgtcgtggagctagccgatccaaagttggaggtgaaatggtataagaatggtcaggagattaggccaagcaccaaatacatcttcgagcacaaaggctgccagagaattctgtttatcaataactgccagatgactgatgatagtgaatactatgtgaccgccggcgacgagaagtgtagcaccgaactgttcgtgcgagaaccacctataatggtcacaaagcagcttgaggacaccacagcctattgcggggagagggtagagctggagtgtgaggtgagcgaagacgacgcgaacgtcaagtggttcaagaacggtgaagagattatcccaggccccaagagcagatatagaatacgtgtggaggggaagaagcacatactgataatcgagggagcgacaaaggccgatgcagctgagtactctgtgatgaccactggcggccaatcatctgccaaactttcagtggacctgaagccacttaaaattctcacgccattgacagaccagaccgtaaatctgggcaaggaaatatgtctcaagtgcgagatctctgaaaatatccccgggaagtggaccaagaatggcctgcccgtgcaagagagcgatcggctcaaagtcgtccacaaaggcagaatccacaaactcgttatcgctaacgccctgacagaggatgagggcgattacgtctttgcccctgatgcctataatgtcactttgcctgccaaggttcatgtaatcgatcctcccaagatcattctcgatgggctcgatgccgacaacaccgtgacagtgatcgctgggaataagctgagactggagattcctatttcaggagagcctcctccaaaggcaatgtggagtcggggcgacaaggctattatggaggggagtggaagaatccggaccgagtcttacccagactcatctacactggtcatcgatatcgccgagcgggatgatagtggcgtgtaccacattaacctgaagaatgaagccggagaagcccacgcctctattaaagttaaggtcgtggattttcctgatcccccggtggccccgactgtgaccgaggttggcgacgattggtgcataatgaactgggagcccccagcctacgatggcggctcacccattctgggctacttcatcgagagaaagaagaagcagtccagtcgatggatgcgtctgaatttcgacctctgtaaggagacaacctttgaaccgaaaaagatgattgagggcgtggcctacgaggtgcgcatctttgctgtaaacgccatcggcattagcaaacctagcatgcccagtcggccttttgtgccacttgccgtgacctcccctcctacactgctcaccgttgattcggttaccgacaccacagtcactatgcggtggagacccagaccccattggtgctcacggttccggtggttgtgcgccagggtgctactctag

SEQ ID NO: 292506 - DNA, 2349 bp, Artificial Sequence
  derived and/or modified sequence
atgcctgagcccaccaagaaggaggagaatgaggtgcctgccccagcccctcctcctgaggagcccagcaaggagaaggaggccggcaccaccccagccaaggatgaggaggaggtgtccccaccttctgccctgcccccaggcctgggcagccgggccctggagaggaaggacagcgactggaccctggtggagaccccacctggagaggagcaggccaagcagaatgccaacagccagctgagcatcctcttcatcgagaagccccagggcggcaccgtgaaggtgggggaggacatcaccttcatcgccaaggtgaaggccgaggacctgctgaggaagcccaccatcaagtggttcaagggcaagtggatggacctggccagcaaggccggcaagcacctgcagctgaaggagacctttgagcggcacagccgggtgtacacctttgagatgcagatcatcaaggccaaggacaactttgctggcaactaccgctgtgaggtgacctacaaggacaagtttgacagctgcagctttgacctggaggtgcatgagagcacaggcaccacccccaacatcgacatccgcagcgccttcaagaggtctggagagggccaggaggatgctggggagctggacttcagcggcctgctgaagagaagagaggtgaagcagcaggaggaggagccccaggtggatgtgtgggagctgctgaagaatgccaagcccagtgaatatgagaagatcgccttccagtatggcatcacagacctgcggggcatgctgaagaggctgaagaggatgaggcgggaggagaagaagtctgctgcctttgccaagatcctggaccctgcctaccaggtggacaagggcggccgggtgcgctttgtggtggagctggccgaccccaagctggaggtgaagtggtacaagaatggccaggagatccggcccagcaccaagtacatctttgagcacaagggctgccagaggatcctcttcatcaacaactgccagatgacagatgattctgagtactacgtgacagctggagatgagaagtgcagcacagagctgtttgtgcgggagccccccatcatggtgaccaagcagctggaggacaccacagcctactgtggggagcgggtggagctggagtgtgaggtgtctgaagatgatgccaacgtgaagtggttcaagaatggagaggagatcatccctggccccaagagccgctaccgcatccgggtggagggcaagaagcacatcctgatcattgaaggagccaccaaggcagatgctgctgagtacagcgtgatgaccactggaggccagagcagcgccaagctgtctgtggacctgaagcccctgaagatcctgacccccctgacagaccagacagtgaacctgggcaaggagatctgcctgaagtgtgagatcagcgagaacatccctgggaagtggaccaagaatggcctgcctgtgcaggagagtgaccggctgaaggtggtgcacaagggccgcatccacaagctggtgattgccaatgccctgacagaagatgaaggagactatgtgtttgccccagatgcctacaacgtgaccctgcctgccaaggtgcacgtgattgacccccccaagatcatcctggatggcctggatgctgacaacacagtgacagtgattgctggcaacaagctgcggctggagatccccatctctggagagcccccacccaaggccatgtggagcagaggagacaaggccatcatggagggcagcggccgcatcagaacagagagctacccagacagcagcaccctggtgattgatattgctgagagagatgattctggagtgtaccacatcaacctgaagaatgaggccggggaggcccacgccagcatcaaggtgaaggtggtggacttcccagacccccctgtggcccccaccgtgacagaggtgggagatgactggtgcatcatgaactgggagcccccagcctatgatggcggcagccccatcctgggctacttcattgaaaggaagaagaagcagagcagccgctggatgaggctgaactttgacctgtgcaaggagaccacctttgagcccaagaagatgattgagggcgtggcctatgaggtgcgcatctttgctgtgaatgccatcggcatcagcaagcccagcatgcccagccggccctttgtgcccctggccgtgaccagcccccccaccctgctgactgtggacagcgtgacagacaccaccgtgaccatgcgctggaggccccggccccactggtgcagccgcttccgctggctgtgtgcccgggtgctgctgtag

SEQ ID NO: 292507 - DNA, 3818 bp, Artificial Sequence
  derived and/or modified sequence
tcgcctgcctgtggggtttctgtcaactagtcgtggagggaaggagactctttaaagaataacatcttattgtggccatgccagaacccactaagaaagaggaaaatgaagtgccagccccagccccacccccggaagaaccaagtaaagagaaggaggccggaactacaccagcaaaagatgaagaggaagtctccccgcctagcgccttgcctccaggtttgggtagtcgggccctggagagaaaagattcagactggacccttgtcgaaactcctcctggggaggaacaagccaagcagaatgccaactcccagctgtccatcttgttcattgaaaaacctcaaggaggaacagtgaaagttggtgaagatatcaccttcatagccaaagtcaaggctgaagatcttctgagaaaacccactatcaaatggttcaaaggaaaatggatggacctggccagcaaagccgggaagcaccttcagctgaaggaaacctttgagaggcacagtcgggtgtacacatttgagatgcagatcatcaaggccaaagataactttgcaggaaattacagatgcgaggtcacctataaggataagtttgacagctgttcatttgatcttgaagtgcacgaatctactgggactactccaaacattgacatcagatctgctttcaagagaagtggagaaggtcaagaggatgcaggagaacttgactttagtggtctcctgaaacgtagggaggtgaagcagcaggaggaagaaccccaggtggacgtatgggagttgctgaagaacgcgaaacccagtgagtacgagaagatcgccttccagtatggaatcaccgacctgcgcggcatgctcaagcgactcaagcgcatgcgcagagaggagaagaagagcgcagcttttgcaaaaattcttgatcctgcatatcaggttgacaaaggaggcagagtgaggtttgttgtggagctggcagatccaaagttggaggtgaaatggtataaaaatggtcaagaaattcgacccagtaccaaatacatctttgaacacaaaggatgccagagaatcctgtttatcaataactgtcagatgacagatgattcagagtattatgtgacagccggtgatgagaaatgttccactgagctcttcgtaagagagcctccaattatggtgaccaaacagctggaagatacaactgcttattgtggggagagagtggaattagaatgtgaggtgtctgaagatgatgccaatgtaaaatggtttaagaatggtgaagagattatccctggtccaaaatcaagataccgaattagagttgagggtaaaaaacacatcttgatcatagagggagcaacaaaggctgatgctgcagaatattcagtaatgacaacaggaggacaatcatctgctaaacttagtgttgacttgaaacctctgaagattttgacacctctgactgatcagactgtaaatcttggaaaagaaatctgcctgaagtgtgaaatctctgaaaacataccaggaaaatggactaaaaatggcctacctgttcaggagagtgaccgtctaaaggtggttcacaagggaaggatccacaagttagtgatagccaatgccctcactgaagatgaaggtgattatgtatttgcacctgatgcctacaatgttactctgcctgccaaagttcatgttattgatcctcctaagatcatcctggatggtcttgatgctgacaacacagtgacagtgattgcaggaaacaagcttcgtcttgagatccccatcagcggagaaccacctcctaaagccatgtggagccggggagataaggctattatggaaggcagtggccggataagaacagaatcttaccctgatagcagcactctggtcattgatatagctgaaagagatgactctggtgtttaccacatcaatctgaaaaacgaagctggagaggcacatgcaagcatcaaggttaaagttgtggacttccctgatcctccagtggcaccgactgtgacagaggtgggagatgactggtgtatcatgaactgggagcctcctgcctacgacggaggctctccaatcctaggatattttattgagaggaagaagaaacaaagctccaggtggatgaggctgaattttgatctctgcaaagaaacaacttttgagcccaagaagatgattgaaggtgtggcctatgaggtccgcatctttgcagtcaatgccattggcatctccaagcccagtatgccctccaggccttttgttcctttggctgtaacaagccctcctactcttctgactgtggactctgtcactgacacgactgtcacgatgaggtggcgccccagaccacattggtgcagcaggtttagatggctatgtgctagagtattgctttgaaggaactgaggactggatagttgcaaacaaagatctgattgacaagacgaagttcaccatcacaggtctgccaacagatgcaaagatctttgtgcgtgtgaaggctgttaatgcagctggtgccagcgagcccaagtactattctcagcccattctcgtgaaggaaatcatagaacctccaaagattcgcattccaagacacctgaagcaaacctatatccgcagagttggagaagctgtcaatctggttatacctttccagggaaaaccaagaccagaattaacttggaagaaggatggtgcagaaattgataagaatcaaataaacattcgcaactctgagactgatacaatcatatttattagaaaagcagagaggagccactctgggaaatatgatctgcaagtcaaagtggacaaattcgtggagaccgcatcaattgacatccagatcattgaccgtccaggtccaccccaaattgtgaagattgaggatgtctggggagaaaatgtcgctctcacatggactccaccaaaggatgatggaaatgctgctatcacaggctataccattcagaaggctgacaagaagagcatggaatggtttactgtcattgagcattatcatcgaaccagtgccaccattactgaattggtcatagggaatgaatattacttccgggtcttttctgaaaacatgtgtggcctcagtgaggatgccaccatgactaaagagagtgcagtgatcgccagggatggtaaaatctacaaaaatccagtgtatgaagactttgatttctcagaggcacccatgtttactcagcctttggttaacacctatgccatagctggttacaatgccaccctaaactgcagtgtgagaggaaatcctaagcctaaaataacctggatgaaaaacaaagttgctattgtggatgatccaagatacaggatgttcagcaaccagggagtctgtaccctggaaattcgcaagcccagcccctatgatggaggcacttactgctgcaaagcagtcaatgaccttgggacagtggagattgaatgcaaactggaggtgaaagtcattgcacaataaggatttttgaatgtataatatcatctaaggtgggctctccttctgcagactcctcttgcaaggcgtacctccaaacataattgattcgtatctgcgagacttacactcaagcaatcctgaggaatactgagggagggcctggctactgtctctctgcactctgctgctttgaaatctggttgaaatgagaaaaagcattttctgttttcccaccaggcccccaagtgtggtctttttctttcctcctaatgttgaagagaaaaaaaaaaaaaaaagtttgcccagattgcttaatt

SEQ ID NO: 292508 - DNA, 2349 bp, Artificial Sequence
  derived and/or modified sequence
atgcccgagcccaccaagaaggaggagaacgaggtgcccgcccccgcccccccccctgaggagcctagcaaggaaaaggaagccggcaccaccccagccaaggatgaggaagaggtttcaccccctagtgcgctgcccccaggactggggtctcgagccctggaaaggaaggatagcgactggacgctggtggagaccccccctggtgaagaacaggccaagcagaacgctaattctcaactgagtattttgttcatcgaaaaacctcagggcggcactgtgaaggttggggaggacatcacctttatcgccaaggtgaaggcggaggacctgctgcgaaagccgactattaaatggttcaagggtaagtggatggacctcgcatccaaggccggaaagcacctgcaacttaaagaaacgtttgagagacactcacgagtgtatactttcgagatgcagattatcaaagcaaaggataacttcgctggcaactacagatgtgaggtgacatataaggacaagtttgattcctgttcttttgacctggaggtgcacgagagcactgggacaacacccaatatagatatcaggtccgccttcaagagaagcggcgaaggacaggaagatgctggagagctggatttttcgggtctcctcaaaagaagggaggttaaacagcaggaggaggaaccccaggtggatgtgtgggaattgctaaagaatgccaaaccttccgagtacgaaaagatcgcctttcagtatggtatcacagacctgcgtggaatgctgaagagactcaagaggatgcgccgtgaagagaaaaagtcagcggctttcgctaaaatcctggacccggcgtaccaggtggacaagggaggcagagttaggtttgtagttgagctggccgatccgaaactggaggttaaatggtataaaaacgggcaggagattcgaccttctaccaaatacatttttgagcacaaggggtgtcagcgcattctctttataaataactgccagatgaccgacgacagcgaatattacgtaaccgccggtgacgaaaagtgcagtactgagctttttgtgagagagccaccaatcatggtgacaaaacagcttgaagataccacggcctactgcggagagcgagtggagctggagtgtgaagtttccgaggatgacgccaacgtcaaatggtttaaaaatggggaagagatcatccccggccccaaaagccgctaccgcattcgggttgaaggaaagaaacacatcctgatcatcgaaggtgcaacaaaggccgacgccgccgagtatagtgtcatgaccaccgggggtcagtcatccgcgaaattgagcgtagacctcaagcctctgaagatcctgacccctctgactgatcagacagttaacctaggcaaggaaatctgtctgaaatgcgaaatcagcgagaatattcctggcaaatggacgaagaacggactaccagtgcaggagagcgaccggctgaaggtggtacacaaaggacgcatccataaactggtgattgctaatgcgctgactgaagatgagggcgactatgtgttcgcgccagatgcgtacaacgtgacacttcctgcgaaggttcacgtgattgaccccccaaaaattattttagacggcctggacgcggacaacaccgtaaccgtgattgctggcaacaaactcagactggaaattcctatcagtggagaaccaccacctaaagccatgtggtctcgcggcgataaagctattatggagggcagcggacggattaggacagaatcatatcctgacagctcaacgctggtgattgacatcgctgaaagagatgatagcggggtgtatcatattaaccttaagaacgaggccggagaagcacacgcatcaattaaggtgaaagtggtcgacttccccgatccacccgtggcccccaccgtcactgaggtcggtgacgattggtgcatcatgaactgggagccacccgcctacgacggaggttcccccatcctcgggtacttcattgaacgcaaaaaaaagcaatcaagccgctggatgagattgaacttcgatctatgcaaagagacaacgttcgaacccaaaaaaatgatcgagggcgtggcttatgaggtcaggatctttgctgtcaatgcgatcggaatcagcaagccctcaatgccttcacggccctttgtgcctctggctgtgacatctcctcctacattgctgaccgtggatagcgtgacagacaccaccgtgacaatgcggtggcgtcctcgaccccattggtgttccagattccgatggctttgtgccagggtcctgctgtag

SEQ ID NO: 292509 - DNA, 2349 bp, Artificial Sequence
  derived and/or modified sequence
atgcccgaacctacaaagaaagaggagaatgaagtcccggctccagctccacctcccgaagagccatccaaggagaaggaggctggaaccacaccagccaaagacgaagaggaggtgtctcccccatccgcccttccaccgggattgggaagtagggctctggagcgcaaagactccgactggaccctagtcgaaacaccgcctggagaagagcaggccaagcagaatgcaaactcccagttgagcattctctttattgaaaaaccccaaggcggtactgtgaaagttggcgaggacataaccttcattgctaaggtgaaggccgaggatctccttagaaagccgactattaagtggtttaaaggcaagtggatggatttggcctccaaagctggcaagcacctgcagctaaaagagacgttcgagagacattcacgagtctatactttcgagatgcaaataatcaaagcgaaggacaattttgcaggtaactatagatgtgaagtcacttacaaggacaagtttgactcatgctccttcgacttggaggtccacgagtccacagggactacccccaacatcgatatacgctccgcattcaagaggagcggcgaagggcaggaagacgcaggtgaactggacttctccgggttgctaaaacgcagggaggtgaagcagcaggaggaggagccccaggtcgatgtgtgggaattacttaaaaatgcaaagccatccgagtatgaaaaaattgcattccagtacggtatcactgatctgcgcggaatgctcaagaggctgaagcgcatgagacgcgaagagaagaagtcagcggctttcgccaagattctcgatcctgcctaccaggttgataaaggtggaagggtgcgatttgtggtcgagctggctgatcctaagcttgaggtaaagtggtataaaaacggtcaggaaatccgacccagtactaaatacatctttgagcataaaggatgccagcggatcctgttcattaataattgccagatgacagatgattcagaatattatgtgacagccggtgacgaaaagtgcagcaccgaattgttcgtgcgcgaaccccctattatggtcaccaaacagttggaagacactacagcttactgcggagaaagagtggaattagagtgcgaggtgtctgaggatgatgctaacgtgaagtggttcaaaaatggcgaagagatcatccccggacccaaatccagatatcgcatcagggtcgaagggaaaaagcacattctaatcattgagggtgctacaaaagctgatgcggcagagtacagtgtgatgactacagggggacaatcctccgctaaactgagcgttgatcttaaaccgctcaagatccttacacccttaactgaccaaaccgttaacctgggaaaggagatttgtctcaagtgcgagatctcagagaacatcccaggtaaatggacaaagaatgggctacccgtccaggagtctgatcgccttaaagtggtgcataaaggcaggatccataaattggttatagctaatgctctaactgaggatgagggagattatgtctttgctcccgacgcatacaatgtaacccttccagctaaggttcatgttatcgacccgccaaagattattttggacggcttggacgctgacaatacagtcacggtgatagccggtaataagctgcgcctggaaatccccattagtggggagccgcctcctaaggcaatgtggagtcggggagataaagcaatcatggaggggtccgggaggattcgaacagagagctatcccgattcatctactctagttatcgacattgctgagcgcgacgacagtggcgtgtaccatatcaacctcaagaacgaagccggagaggcgcatgcgtctataaaagtgaaagttgtggattttccggacccaccagttgccccaactgtgaccgaggtcggagacgactggtgcatcatgaactgggaacctcctgcctacgatgggggttctcccatattaggatatttcatcgagagaaaaaagaagcagagcagtaggtggatgcgcttgaacttcgatctgtgtaaggagacgacgttcgagcccaagaaaatgattgagggtgtggcgtacgaagtgagaatatttgcggtgaatgccataggaatttctaagcctagcatgccatctcggccttttgttccactggccgtgacgagcccgccaactcttttgaccgtggattctgtgacagacacaactgtaacaatgcgctggcgccctcggccacattggtgttctcggttccgctggctatgcgctcgggtactattgtag

SEQ ID NO: 292510 - DNA, 2349 bp, Artificial Sequence
  derived and/or modified sequence
atgcccgagcccaccaagaaggaggagaacgaggtgcccgcccccgcccccccccccgaggagcccagcaaggagaaggaggccggcaccacccccgccaaggacgaggaggaggtgagcccccccagcgccctgccccccggcctgggcagcagagccctggagagaaaggacagcgactggaccctggtggagaccccccccggcgaggagcaggccaagcagaacgccaacagccagctgagcatcctgttcatcgagaagccccagggcggcaccgtgaaggtgggcgaggacatcaccttcatcgccaaggtgaaggccgaggacctgctgagaaagcccaccatcaagtggttcaagggcaagtggatggacctggccagcaaggccggcaagcacctgcagctgaaggagaccttcgagagacacagcagagtgtacaccttcgagatgcagatcatcaaggccaaggacaacttcgccggcaactacagatgcgaggtgacctacaaggacaagttcgacagctgcagcttcgacctggaggtgcacgagagcaccggcaccacccccaacatcgacatcagaagcgccttcaagagaagcggcgagggccaggaggacgccggcgagctggacttcagcggcctgctgaagagaagagaggtgaagcagcaggaggaggagccccaggtggacgtgtgggagctgctgaagaacgccaagcccagcgagtacgagaagatcgccttccagtacggcatcaccgacctgagaggcatgctgaagagactgaagagaatgagaagagaggagaagaagagcgccgccttcgccaagatcctggaccccgcctaccaggtggacaagggcggcagagtgagattcgtggtggagctggccgaccccaagctggaggtgaagtggtacaagaacggccaggagatcagacccagcaccaagtacatcttcgagcacaagggctgccagagaatcctgttcatcaacaactgccagatgaccgacgacagcgagtactacgtgaccgccggcgacgagaagtgcagcaccgagctgttcgtgagagagccccccatcatggtgaccaagcagctggaggacaccaccgcctactgcggcgagagagtggagctggagtgcgaggtgagcgaggacgacgccaacgtgaagtggttcaagaacggcgaggagatcatccccggccccaagagcagatacagaatcagagtggagggcaagaagcacatcctgatcatcgagggcgccaccaaggccgacgccgccgagtacagcgtgatgaccaccggcggccagagcagcgccaagctgagcgtggacctgaagcccctgaagatcctgacccccctgaccgaccagaccgtgaacctgggcaaggagatctgcctgaagtgcgagatcagcgagaacatccccggcaagtggaccaagaacggcctgcccgtgcaggagagcgacagactgaaggtggtgcacaagggcagaatccacaagctggtgatcgccaacgccctgaccgaggacgagggcgactacgtgttcgcccccgacgcctacaacgtgaccctgcccgccaaggtgcacgtgatcgacccccccaagatcatcctggacggcctggacgccgacaacaccgtgaccgtgatcgccggcaacaagctgagactggagatccccatcagcggcgagcccccccccaaggccatgtggagcagaggcgacaaggccatcatggagggcagcggcagaatcagaaccgagagctaccccgacagcagcaccctggtgatcgacatcgccgagagagacgacagcggcgtgtaccacatcaacctgaagaacgaggccggcgaggcccacgccagcatcaaggtgaaggtggtggacttccccgacccccccgtggcccccaccgtgaccgaggtgggcgacgactggtgcatcatgaactgggagccccccgcctacgacggcggcagccccatcctgggctacttcatcgagagaaagaagaagcagagcagcagatggatgagactgaacttcgacctgtgcaaggagaccaccttcgagcccaagaagatgatcgagggcgtggcctacgaggtgagaatcttcgccgtgaacgccatcggcatcagcaagcccagcatgcccagcagacccttcgtgcccctggccgtgaccagcccccccaccctgctgaccgtggacagcgtgaccgacaccaccgtgaccatgagatggagacccagaccccactggtgcagcagattcagatggctgtgcgccagagtgctgctgtag

SEQ ID NO: 292511 - protein, 1164 aa, Artificial Sequence
  derived and/or modified sequence
MPEPTKKEENEVPAPAPPPEEPSKEKEAGTTPAKDWTLVETPPGEEQAKQNANSQLSILFIEKPQGGTVKVGEDITFIAKVKAEDLLRKPTIKWFKGKWMDLASKAGKHLQLKETFERHSRVYTFEMQIIKAKDNFAGNYRCEVTYKDKFDSCSFDLEVHESTGTTPNIDIRSAFKRSGEGQEDAGELDFSGLLKRREVKQQEEEPQVDVWELLKNAKPSEYEKIAFQYGITDLRGMLKRLKRMRREEKKSAAFAKILDPAYQVDKGGRVRFVVELADPKLEVKWYKNGQEIRPSTKYIFEHKGCQRILFINNCQMTDDSEYYVTAGDEKCSTELFVREPPIMVTKQLEDTTAYCGERVELECEVSEDDANVKWFKNGEEIIPGPKSRYRIRVEGKKHILIIEGATKADAAEYSVMTTGGQSSAKLSVDLKPLKILTPLTDQTVNLGKEICLKCEISENIPGKWTKNGLPVQESDRLKVVHKGRIHKLVIANALTEDEGDYVFAPDAYNVTLPAKVHVIDPPKIILDGLDADNTVTVIAGNKLRLEIPISGEPPPKAMWSRGDKAIMEGSGRIRTESYPDSSTLVIDIAERDDSGVYHINLKNEAGEAHASIKVKVVDFPDPPVAPTVTEVGDDWCIMNWEPPAYDGGSPILGYFIERKKKQSSRWMRLNFDLCKETTFEPKKMIEGVAYEVRIFAVNAIGISKPSMPSRPFVPLAVTSPPTLLTVDSVTDTTVTMRWRPPDHIGAAGLDGYVLEYCFEGSTSAKQSDENGEAAYDLPAEDWIVANKDLIDKTKFTITGLPTDAKIFVRVKAVNAAGASEPKYYSQPILVKEIIEPPKIRIPRHLKQTYIRRVGEAVNLVIPFQGKPRPELTWKKDGAEIDKNQINIRNSETDTIIFIRKAERSHSGKYDLQVKVDKFVETASIDIQIIDRPGPPQIVKIEDVWGENVALTWTPPKDDGNAAITGYTIQKADKKSMEWFTVIEHYHRTSATITELVIGNEYYFRVFSENMCGLSEDATMTKESAVIARDGKIYKNPVYEDFDFSEAPMFTQPLVNTYAIAGYNATLNCSVRGNPKPKITWMKNKVAIVDDPRYRMFSNQGVCTLEIRKPSPYDGGTYCCKAVNDLGTVEIECKLEVKVIYQGVNTPGQPVFLEGQQQSLHNKDF

SEQ ID NO: 292512 - DNA, 3495 bp, Artificial Sequence
  derived and/or modified sequence
atgcctgagccaaccaagaaggaggagaatgaagtgccagcccctgccccaccccctgaggaacccagcaaggaaaaggaggcagggacgactcctgccaaggactggacattggtggaaacacctcccggtgaggaacaggccaaacaaaatgctaactcacaactctccattctgttcattgagaagccccagggcggaaccgtgaaggtgggcgaagacatcaccttcattgcgaaggtaaaagcggaagatctgttacggaaacccacaattaaatggttcaaggggaaatggatggatctcgcaagcaaagctggcaagcacctacagttgaaggagacctttgagcgccactcgagggtgtacacatttgagatgcaaattatcaaggcgaaggataactttgccggtaactaccgctgcgaggtgacctataaagacaaatttgacagttgctcctttgacctagaagtccacgagagcaccggtaccacacccaacatcgatattaggtctgcttttaagcggtcaggagagggacaagaggatgcgggcgagttagacttctcagggctcttgaaacgacgtgaggtgaagcagcaggaggaggaacctcaagtggatgtctgggagctgctcaagaatgccaaaccgtcagagtatgaaaaaatcgccttccaatacggaatcaccgatcttcggggcatgttaaaacgcctcaagaggatgcggcgggaagagaaaaagagtgcagccttcgctaagattcttgatcccgcgtaccaagtcgataaaggaggaagagtccgatttgtggtagaactggcggacccaaagctagaggtgaagtggtacaagaatggccaggagattagaccgagtaccaaatatatatttgagcataagggctgccaaagaattctgttcattaacaactgccagatgactgacgatagtgaatactacgtcacagcaggggacgaaaaatgttcaaccgaactctttgtgcgggagcccccaatcatggtgacaaagcagctggaggatactacggcctattgtggggaaagggtcgagctggagtgcgaggtgtccgaggatgacgcaaacgtcaagtggtttaagaacggcgaggagattatacctggccccaaaagcaggtatagaatccgggtggagggtaagaagcacatattgattatcgagggtgccacaaaagccgacgccgcagaatacagtgttatgaccaccggcggccagtccagtgcgaagctaagcgtcgatctcaaaccccttaagattctgacgcccctcactgaccagaccgtgaatcttggcaaggagatctgcctgaagtgtgagatatccgaaaacatccctgggaagtggaccaagaatgggctacccgtccaggagtccgacagattaaaggtcgtgcacaaaggccgcatccataagctggtaatcgcaaacgccttgacagaggatgagggggactatgtgtttgctcctgacgcctataacgttaccctcccagctaaagttcatgttatcgatcccccaaaaataatactcgatggcctggatgccgacaataccgtcaccgtcatcgccgggaataagctgcggcttgagatccctatttcgggcgagcccccaccaaaagccatgtggagcagaggagataaggcgatcatggaaggtagcggtcgaataagaactgagtcttaccctgacagttccacactagtgatcgacatagcggagcgagatgattccggcgtgtaccatatcaacctgaaaaacgaggccggggaagcacacgcttccatcaaggtcaaagtggtcgacttcccagacccgccagttgcacctacagtgactgaggtgggagacgattggtgcataatgaattgggagccacccgcttatgacgggggcagtccaatcttgggctacttcatcgagagaaagaagaagcagtcctcccgctggatgagacttaattttgacctgtgtaaagaaaccacatttgagccgaaaaaaatgatagaaggagtggcgtacgaggtgcgaatatttgctgtcaatgctatcggtatcagcaaaccaagtatgccctctaggccgttcgtcccactcgccgttacctccccccctactctgttgaccgtggacagcgtcacagataccaccgtcactatgaggtggcgtccgccagaccacatcggcgctgccgggctggatggctacgtcctcgagtactgtttcgagggctctacctctgcgaagcagagcgacgaaaatggggaagcggcctacgacctgccagcagaagactggatcgtggccaataaagacttaatcgacaagaccaagtttactatcacaggtctcccaacggatgcgaagatttttgttcgagtcaaagccgtcaatgcggctggggccagtgaacctaaatactattcgcagcctattctggttaaagaaatcatcgagcctcccaagatcaggattcctcggcacctgaagcagacctacataagaagagtgggggaggcagttaaccttgtcattcccttccaagggaagcccagacccgagctgacctggaagaaggacggggcagagatcgataagaaccagattaatattcggaactcagagacggacaccattatattcatacgtaaggccgagcgctcccacagtggtaaatatgatctacaagtgaaggtggataagtttgttgaaactgcttctattgatatccagatcatcgataggcccgggccacctcagatcgttaaaatagaggacgtgtggggtgagaatgttgccttgacttggacaccgccaaaggacgatgggaatgcagcgatcaccgggtatacaattcagaaggccgacaaaaaatctatggagtggtttacagttatcgaacattatcataggactagcgccacgatcactgaactggttatcggaaatgaatactacttccgggttttctcagagaacatgtgtggactatccgaagatgcaaccatgactaaggaatcagctgtcattgccagggacggcaagatttacaaaaaccccgtttatgaggactttgatttctcagaggcccctatgtttacccagcccctggttaacacctatgccatcgctgggtataacgccacgctcaattgctcggtccgggggaatcctaagcctaagattacatggatgaagaataaggttgctattgtggatgatccccgctacagaatgttttctaaccagggagtgtgtaccctggagattcggaagccaagcccgtatgacgggggaacatactgttgtaaagccgtcaacgatttgggcacagtagagatcgaatgtaagctggaagtgaaggtgatataccagggcgtgaatactccaggccagccagtgttcttggaaggacagcaacagagtctccacaacaaggacttttag

SEQ ID NO: 292513 - DNA, 3495 bp, Artificial Sequence
  derived and/or modified sequence
atgcctgagcccaccaagaaggaggagaatgaggtgcctgccccagcccctcctcctgaggagcccagcaaggagaaggaggccggcaccaccccagccaaggactggaccctggtggagaccccacctggagaggagcaggccaagcagaatgccaacagccagctgagcatcctcttcatcgagaagccccagggcggcaccgtgaaggtgggggaggacatcaccttcatcgccaaggtgaaggccgaggacctgctgaggaagcccaccatcaagtggttcaagggcaagtggatggacctggccagcaaggccggcaagcacctgcagctgaaggagacctttgagcggcacagccgggtgtacacctttgagatgcagatcatcaaggccaaggacaactttgctggcaactaccgctgtgaggtgacctacaaggacaagtttgacagctgcagctttgacctggaggtgcatgagagcacaggcaccacccccaacatcgacatccgcagcgccttcaagaggtctggagagggccaggaggatgctggggagctggacttcagcggcctgctgaagaggcgggaggtgaagcagcaggaggaggagccccaggtggatgtgtgggagctgctgaagaatgccaagcccagtgaatatgagaagatcgccttccagtatggcatcacagacctgcggggcatgctgaagaggctgaagaggatgagaagagaggagaagaagtctgctgcctttgccaagatcctggaccctgcctaccaggtggacaagggcggccgggtgcgctttgtggtggagctggccgaccccaagctggaggtgaagtggtacaagaatggccaggagatccggcccagcaccaagtacatctttgagcacaagggctgccagaggatcctcttcatcaacaactgccagatgacagatgacagcgagtactacgtgacagctggagatgagaagtgcagcacagagctgtttgtgcgggagccccccatcatggtgaccaagcagctggaggacaccacagcctactgtggggagcgggtggagctggagtgtgaggtgtctgaagatgatgccaacgtgaagtggttcaagaatggagaggagatcatccctggccccaagagccgctaccgcatccgggtggagggcaagaagcacatcctgatcatcgagggcgccaccaaggcagatgctgctgagtacagcgtgatgaccaccggcggccagagcagcgccaagctgtctgtggacctgaagcccctgaagatcctgacccccctgacagaccagacagtgaacctgggcaaggagatctgcctgaagtgtgagatcagcgagaacatccctgggaagtggaccaagaatggcctgcctgtgcaggagagtgaccggctgaaggtggtgcacaagggccgcatccacaagctggtgattgccaatgccctgacagaagatgaaggagactatgtgtttgccccagatgcctacaacgtgaccctgcctgccaaggtgcacgtgattgatcctcccaagatcatcctggatggcctggatgctgacaacacagtgacagtgattgctggcaacaagctgcggctggagatccccatcagcggggagcccccacccaaggccatgtggagcagaggagacaaggccatcatggagggcagcggccgcatcagaacagagagctacccagacagcagcaccctggtgattgatattgctgagagagatgacagcggcgtgtaccacatcaacctgaagaatgaagctggggaggcccacgccagcatcaaggtgaaggtggtggacttcccagacccccctgtggcccccaccgtgacagaggtgggagatgactggtgcatcatgaactgggagcccccagcctatgatggcggcagccccatcctgggctacttcatcgagaggaagaagaagcagagcagccgctggatgaggctgaactttgacctgtgcaaggagaccacctttgagcccaagaagatgattgaaggagtggcctatgaggtgcgcatctttgctgtgaatgccatcggcatcagcaagcccagcatgcccagccggccctttgtgcccctggccgtgaccagcccccccaccctgctgactgtggacagcgtgacagacaccaccgtgaccatgcgctggaggcccccagaccacatcggggctgctggcctggatggctacgtgctggagtactgctttgagggcagcaccagcgccaagcagagtgatgaaaatggagaggccgcctatgacctgcctgctgaggactggatcgtggccaacaaggacctgattgacaagaccaagttcaccatcaccggcctgcccacagatgccaagatctttgtgcgggtgaaggctgtgaatgctgctggggccagcgagcccaagtactacagccagcccatcctggtgaaggagatcatcgagccccccaagatccgcatccccaggcacctgaagcagacctacatcagaagagtgggggaggccgtgaacctggtgatccccttccagggcaagcccaggcctgagctgacctggaagaaggatggagctgagattgacaagaaccagatcaacatccggaacagcgagacagacaccatcatcttcatcaggaaggccgagaggagccacagcggcaagtatgacctgcaggtgaaggtggacaagtttgtggagacagccagcattgacatccagatcatcgaccggcccggccccccccagatcgtgaagattgaagatgtgtggggagaaaatgtggccctgacctggaccccacccaaggatgatggaaatgctgccatcaccggctacaccatccagaaggctgacaagaagtccatggagtggttcaccgtcatcgagcactaccacaggaccagcgccaccatcacagagctggtgattggaaatgagtactacttccgggtcttcagcgagaacatgtgtggcctgtctgaagatgccaccatgaccaaggagagcgctgtgattgccagagatggcaagatctacaagaaccctgtgtatgaagattttgacttcagcgaggcccccatgttcacccagcccctggtgaacacctacgccatcgccggctacaatgccaccctgaactgcagcgtgcggggcaaccccaagcccaagatcacctggatgaagaacaaggtggccatcgtggatgacccccgctacaggatgttcagcaaccagggcgtgtgcaccctggagatcaggaagcccagcccctatgatggcggcacctactgctgcaaggctgtgaatgacctgggcaccgtggagattgagtgcaagctggaggtgaaggtgatctaccagggcgtgaacaccccaggccagcctgtgttcctggagggccagcagcagagcctgcacaacaaggacttctag

SEQ ID NO: 292514 - DNA, 3915 bp, Artificial Sequence
  derived and/or modified sequence
ttgtcacaccgacctgcaccatctctcgcctgcctgtggggtttctgtcaactagtcgtggagggaaggagactctttaaagaataacatcttattgtggccatgccagaacccactaagaaagaggaaaatgaagtgccagccccagccccacccccggaagaaccaagtaaagagaaggaggccggaactacaccagcaaaagactggacccttgtcgaaactcctcctggggaggaacaagccaagcagaatgccaactcccagctgtccatcttgttcattgaaaaacctcaaggaggaacagtgaaagttggtgaagatatcaccttcatagccaaagtcaaggctgaagatcttctgagaaaacccactatcaaatggttcaaaggaaaatggatggacctggccagcaaagccgggaagcaccttcagctgaaggaaacctttgagaggcacagtcgggtgtacacatttgagatgcagatcatcaaggccaaagataactttgcaggaaattacagatgcgaggtcacctataaggataagtttgacagctgttcatttgatcttgaagtgcacgaatctactgggactactccaaacattgacatcagatctgctttcaagagaagtggagaaggtcaagaggatgcaggagaacttgactttagtggtctcctgaaacgtagggaggtgaagcagcaggaggaagaaccccaggtggacgtatgggagttgctgaagaacgcgaaacccagtgagtacgagaagatcgccttccagtatggaatcaccgacctgcgcggcatgctcaagcgactcaagcgcatgcgcagagaggagaagaagagcgcagcttttgcaaaaattcttgatcctgcatatcaggttgacaaaggaggcagagtgaggtttgttgtggagctggcagatccaaagttggaggtgaaatggtataaaaatggtcaagaaattcgacccagtaccaaatacatctttgaacacaaaggatgccagagaatcctgtttatcaataactgtcagatgacagatgattcagagtattatgtgacagccggtgatgagaaatgttccactgagctcttcgtaagagagcctccaattatggtgaccaaacagctggaagatacaactgcttattgtggggagagagtggaattagaatgtgaggtgtctgaagatgatgccaatgtaaaatggtttaagaatggtgaagagattatccctggtccaaaatcaagataccgaattagagttgagggtaaaaaacacatcttgatcatagagggagcaacaaaggctgatgctgcagaatattcagtaatgacaacaggaggacaatcatctgctaaacttagtgttgacttgaaacctctgaagattttgacacctctgactgatcagactgtaaatcttggaaaagaaatctgcctgaagtgtgaaatctctgaaaacataccaggaaaatggactaaaaatggcctacctgttcaggagagtgaccgtctaaaggtggttcacaagggaaggatccacaagttagtgatagccaatgccctcactgaagatgaaggtgattatgtatttgcacctgatgcctacaatgttactctgcctgccaaagttcatgttattgatcctcctaagatcatcctggatggtcttgatgctgacaacacagtgacagtgattgcaggaaacaagcttcgtcttgagatccccatcagcggagaaccacctcctaaagccatgtggagccggggagataaggctattatggaaggcagtggccggataagaacagaatcttaccctgatagcagcactctggtcattgatatagctgaaagagatgactctggtgtttaccacatcaatctgaaaaacgaagctggagaggcacatgcaagcatcaaggttaaagttgtggacttccctgatcctccagtggcaccgactgtgacagaggtgggagatgactggtgtatcatgaactgggagcctcctgcctacgacggaggctctccaatcctaggatattttattgagaggaagaagaaacaaagctccaggtggatgaggctgaattttgatctctgcaaagaaacaacttttgagcccaagaagatgattgaaggtgtggcctatgaggtccgcatctttgcagtcaatgccattggcatctccaagcccagtatgccctccaggccttttgttcctttggctgtaacaagccctcctactcttctgactgtggactctgtcactgacacgactgtcacgatgaggtggcgccccccagaccacattggtgcagcaggtttagatggctatgtgctagagtattgctttgaaggaagtacatcagcaaaacagtctgatgaaaatggggaggctgcctatgatctgccagctgaggactggatagttgcaaacaaagatctgattgacaagacgaagttcaccatcacaggtctgccaacagatgcaaagatctttgtgcgtgtgaaggctgttaatgcagctggtgccagcgagcccaagtactattctcagcccattctcgtgaaggaaatcatagaacctccaaagattcgcattccaagacacctgaagcaaacctatatccgcagagttggagaagctgtcaatctggttatacctttccagggaaaaccaagaccagaattaacttggaagaaggatggtgcagaaattgataagaatcaaataaacattcgcaactctgagactgatacaatcatatttattagaaaagcagagaggagccactctgggaaatatgatctgcaagtcaaagtggacaaattcgtggagaccgcatcaattgacatccagatcattgaccgtccaggtccaccccaaattgtgaagattgaggatgtctggggagaaaatgtcgctctcacatggactccaccaaaggatgatggaaatgctgctatcacaggctataccattcagaaggctgacaagaagagcatggaatggtttactgtcattgagcattatcatcgaaccagtgccaccattactgaattggtcatagggaatgaatattacttccgggtcttttctgaaaacatgtgtggcctcagtgaggatgccaccatgactaaagagagtgcagtgatcgccagggatggtaaaatctacaaaaatccagtgtatgaagactttgatttctcagaggcacccatgtttactcagcctttggttaacacctatgccatagctggttacaatgccaccctaaactgcagtgtgagaggaaatcctaagcctaaaataacctggatgaaaaacaaagttgctattgtggatgatccaagatacaggatgttcagcaaccagggagtctgtaccctggaaattcgcaagcccagcccctatgatggaggcacttactgctgcaaagcagtcaatgaccttgggacagtggagattgaatgcaaactggaggtgaaagtgatatatcaaggagtaaatacccctggacaaccagtcttcctggaggggcagcaacagtcattgcacaataaggatttttgaatgtataatatcatctaaggtgggctctccttctgcagactcctcttgcaaggcgtacctccaaacataattgattcgtatctgcgagacttacactcaagcaatcctgaggaatactgagggagggcctggctactgtctctctgcactctgctgctttgaaatctggttgaaatgagaaaaagcattttctgttttcccaccaggcccccaagtgtggtctttttctttcctcctaatgttgaagagaaaaaaaaaaaaaaaagtttgcccagattgcttaattaaaaattgcaaacaaaatctcatttgaagtca

SEQ ID NO: 292515 - DNA, 3495 bp, Artificial Sequence
  derived and/or modified sequence
atgcccgagcccaccaagaaggaggagaacgaggtgcccgcccccgccccgcccccagaagaaccaagcaaggagaaggaggccggcacgactcccgctaaagattggactttggtcgagacccctcctggtgaagagcaagcaaaacaaaatgccaatagtcaactcagcattctgttcatagaaaagccccagggggggacggtgaaggtgggggaagacataactttcatcgcaaaggtgaaagctgaggacttactgcgtaagcctactatcaaatggttcaaggggaaatggatggacctcgctagtaaagccgggaagcacttacagctgaaagagactttcgagagacactcgagggtatacactttcgaaatgcagatcattaaagcgaaggacaatttcgcaggaaactataggtgcgaagtgacctacaaggataagttcgactcctgctctttcgacctcgaagttcacgagagtacgggaactacacccaatatcgacattagaagcgccttcaaacggtccggggagggccaggaagacgccggtgagctggatttttccggcctgctgaagagaagggaggtgaagcagcaggaagaagagccccaagtggatgtttgggagctgctaaagaacgccaaaccaagtgaatatgaaaagattgccttccagtacgggataacagatctcagggggatgctaaagcgactcaaacgcatgaggagagaagagaagaaaagtgcagctttcgcaaaaattctggacccagcctaccaggtggataagggaggaagagtgcggttcgtggtggaattggctgatccaaagcttgaggtgaaatggtataaaaatgggcaagagatcaggccatctacaaagtatatattcgagcataaaggctgccagcgaattctgttcatcaataactgccagatgacagatgactctgagtattacgtgaccgcaggcgatgagaaatgcagcacagaattatttgtcagagaacccccaatcatggtcaccaaacagctggaagacacaacagcgtactgtggggagcgcgtggagctcgaatgtgaggtgtccgaggatgatgcaaatgttaagtggttcaaaaatggggaagagatcattcccggccctaaaagccgctatagaatccgagtcgaggggaagaagcacattttgatcatcgagggggccacaaaggcagatgctgctgagtactccgtcatgactaccggaggccagtcatcagccaagctgagtgtcgacctcaaacctctgaagattcttactcccctcaccgatcagactgttaatttaggcaaagaaatctgtctgaaatgcgagattagtgagaatattcctggaaagtggactaagaatggccttcccgtgcaggaatcggaccgcctcaaggtggttcacaaggggagaatccataaacttgttattgctaacgccttgacagaggatgaaggcgactatgtgttcgcccccgacgcttataacgtcaccctgccagctaaagttcatgtgattgaccccccaaaaataattcttgatggactagatgcggataatactgtaaccgtcatcgccggaaataagctacggcttgagatccccatttccggagaaccgccccccaaagctatgtggagccgcggcgacaaggccatcatggaagggtcaggcaggatccgcacagagtcttatcccgattcctcaaccttagtcatcgacatagccgagcgcgacgactctggggtttaccacatcaatctcaagaacgaggccggcgaggcacacgcatctattaaggtgaaggtggttgacttccccgacccaccggtggcgccaaccgttaccgaggtcggggacgactggtgcattatgaattgggaaccacccgcctatgatggcggctctccaattctgggatacttcatcgaacggaagaagaagcagtcttctcgatggatgaggcttaacttcgacctctgcaaagagaccacgttcgagcccaagaaaatgatagagggcgtggcctatgaggtcagaatatttgctgtcaatgccatcggaatctccaagccatccatgccaagcaggccttttgtcccactggctgtgaccagtcctcccactctcctgacagtggacagtgtgacggacacaaccgtgacgatgcgctggcgaccacccgaccacattggtgctgcgggactcgatgggtacgtcttagagtactgtttcgaaggatctacatctgcaaaacagagcgatgagaatggggaggccgcctacgatctgcccgccgaggactggattgtggcaaacaaagacctcatagataagacaaagtttaccattactggcctaccaacagacgcaaagatctttgtgcgcgtgaaagcagtgaatgcagccggagcttctgagccaaaatattactcccaaccgattctggtcaaagagatcattgagccacccaagatacgaattcctaggcacttgaagcagacatatattaggcgtgtaggagaagctgtcaatttggtaattccatttcaaggaaaacctagaccagagctgacctggaaaaaagacggagccgagatcgacaagaaccaaattaatattcggaatagcgaaacagacactattatttttatccgaaaagcggagaggagccattcgggaaagtacgacctgcaagtaaaggtggataagtttgtagagacagcctccatagacatccagatcatcgatcgccctggacccccgcagatcgttaaaattgaggatgtttggggagagaacgtggctctgacttggacacccccgaaggacgacggaaacgcagccatcactggttataccatccaaaaggcagacaaaaagtccatggaatggttcacagtaattgaacactaccacaggacatcagccacaatcactgagcttgtcataggaaacgaatactattttcgtgtcttctccgagaacatgtgcggactgtcagaagatgcaaccatgaccaaagagtccgcggttatcgcccgagatggcaagatctataagaacccagtgtatgaagacttcgatttcagcgaggctccaatgttcactcagccactcgtgaatacttatgccattgcaggctacaatgcgactctcaactgtagcgtccgcggaaacccaaagccgaagattacatggatgaagaacaaggtcgcgatagttgatgatccccgctacaggatgttcagcaatcaaggggtgtgcacccttgagatccgtaaaccctcaccctatgacgggggcacttactgttgcaaggcagtcaatgatctaggaacggtggaaatcgaatgtaagctggaggtgaaagtaatatatcagggtgtgaacacccctggacagcctgtctttctcgaaggccagcaacagtcactgcataataaggacttctag

SEQ ID NO: 292516 - DNA, 3495 bp, Artificial Sequence
  derived and/or modified sequence
atgcctgagccaacaaaaaaggaagagaacgaggtacctgcgcctgcaccgccacccgaggagccaagcaaggagaaagaagctggaaccacaccagctaaggactggacactggtcgaaacaccacccggagaggagcaggccaaacaaaacgccaatagccagctctctatcttgtttatcgaaaaaccccaaggaggcactgtgaaggtaggcgaagacatcacgtttattgccaaggtaaaggcggaggaccttctgagaaagcctactattaagtggtttaaaggcaagtggatggatttggccagcaaagcaggcaaacacctgcaactgaaagaaaccttcgagcgtcacagccgggtgtatacattcgaaatgcagatcatcaaagctaaggataattttgccggaaattatcgttgtgaagtgacatacaaagataaatttgatagttgttctttcgatctggaggtgcacgaatcaaccggcacaacccccaacatagacatccgatcggcctttaaacgttcaggggaaggccaagaagatgcaggggagctggatttttccggccttctgaagcggagagaggttaaacagcaagaagaggagccccaggtcgatgtatgggaactcctgaaaaatgccaaacccagcgagtacgagaagatcgcttttcagtacgggataaccgacctgagaggtatgcttaagcggctcaagcggatgcgccgtgaagaaaagaaaagcgccgcttttgccaaaatcctggatcccgcatatcaagtggataagggtggccgtgtccggtttgtggtcgaattagccgacccgaaattggaagtgaagtggtataagaacggccaggagatcagaccctcaacaaagtacatcttcgagcacaagggctgtcagcggatcttgttcatcaataactgccaaatgacagacgatagcgagtattacgttaccgctggcgatgagaaatgctctacggagttgttcgtacgcgaaccaccaataatggtgacaaaacagctggaagatactaccgcttactgcggtgaacgggtggaattggagtgcgaggtttctgaggatgatgctaatgtgaaatggttcaagaatggagaggagatcatccctggtcctaagagccgctaccgcatccgggttgaggggaaaaaacatattttaattatcgaaggtgcaaccaaggccgacgcggctgagtactctgttatgactaccggtggacaatctagtgcaaaattgtcagtcgacctgaagcctctgaagatcctcactccgctgaccgatcaaaccgtgaacctcggcaaagaaatttgtttaaagtgcgaaatctccgagaacattccaggtaaatggacgaaaaacggacttcctgttcaagaatccgaccggcttaaagtggtgcacaagggcagaatccacaagttggtcatcgctaacgccctaaccgaggatgagggggactatgttttcgccccagatgcctacaacgtgacgttaccagccaaagttcacgtgatcgacccacccaaaatcatcttagatggcttagatgccgataacactgtgactgtcattgcgggtaataaactgagactcgagattccaatctctggtgagccacccccaaaggctatgtggagccgcggtgacaaagccattatggagggatcaggacgcatacggaccgaaagttatccagacagttcaactctggttatcgatatagcggaacgcgatgacagcggcgtctaccacattaatctaaagaacgaagcaggagaggcacatgcttctattaaggtgaaagtggtcgactttccggatcctcccgttgccccaactgtaaccgaggtgggcgacgattggtgcattatgaactgggagccccctgcatacgatggaggctcgccaatcctaggctatttcatcgagcgcaaaaagaagcaatcatcaagatggatgaggctcaatttcgacctgtgcaaagaaaccactttcgagcccaaaaaaatgatcgaaggcgtggcctatgaggttcgtatctttgctgtaaacgccatcgggatctctaaaccatcaatgccatccagaccattcgtccccctggctgttaccagccccccaactctccttaccgttgattctgtgaccgacacaaccgtcacgatgcgttggagacctccggatcatatcggggctgcgggattggatggttatgtccttgagtattgtttcgagggatctacgtccgccaaacagtccgatgagaatggagaggccgcttacgacttgccagctgaggactggatcgtggcgaacaaggacctgatcgacaaaactaaattcactatcaccgggctccctacagacgcgaaaatttttgtgcgagtgaaggcggtgaacgccgctggagcttctgaaccaaagtactatagccagccaatactggtgaaggagattattgaaccacccaaaataagaatcccaagacacttaaagcagacatacattcgcagggtcggggaggcggtcaatctggtgatcccatttcagggcaaaccacggccagagttgacttggaaaaaggacggggctgagatagacaaaaatcagattaatatcaggaattccgagacagatactattatcttcatacggaaagctgaaagatcccattccggcaaatacgatctgcaggttaaggtggacaagtttgtggagacggcgtcaatcgatatccagatcattgataggccgggaccaccccagatagtcaagatcgaagacgtgtggggcgagaacgtcgcgctcacctggacaccaccgaaggatgacgggaacgctgccattactggctatactatccaaaaagccgacaaaaaatccatggaatggttcactgtgatcgaacattaccatcgcacaagtgccaccatcaccgagctagtgattggaaacgagtattattttagagtcttttctgagaacatgtgtggactgtccgaggacgcaacaatgacgaaggagtccgcagtgatagcgagagatgggaagatttataagaatccagtctacgaagattttgacttttccgaagcccctatgttcacacagccactcgtcaacacatacgccattgctggatataacgctacattgaactgcagcgtgagggggaatccaaagcctaagatcacgtggatgaaaaacaaagtcgcaatcgtcgatgacccccgttataggatgttctctaaccagggcgtctgtactctggagattaggaagcccagcccttacgatggcggtacttattgctgcaaggccgtcaatgacctcggcactgtggagattgaatgtaagttagaggtgaaagtcatttaccagggggtgaatactccaggacagcccgtctttttggaaggtcagcagcagtctctgcacaataaggacttctag

SEQ ID NO: 292517 - DNA, 3495 bp, Artificial Sequence
  derived and/or modified sequence
atgcccgagcccaccaagaaggaggagaacgaggtgcccgcccccgcccccccccccgaggagcccagcaaggagaaggaggccggcaccacccccgccaaggactggaccctggtggagaccccccccggcgaggagcaggccaagcagaacgccaacagccagctgagcatcctgttcatcgagaagccccagggcggcaccgtgaaggtgggcgaggacatcaccttcatcgccaaggtgaaggccgaggacctgctgagaaagcccaccatcaagtggttcaagggcaagtggatggacctggccagcaaggccggcaagcacctgcagctgaaggagaccttcgagagacacagcagagtgtacaccttcgagatgcagatcatcaaggccaaggacaacttcgccggcaactacagatgcgaggtgacctacaaggacaagttcgacagctgcagcttcgacctggaggtgcacgagagcaccggcaccacccccaacatcgacatcagaagcgccttcaagagaagcggcgagggccaggaggacgccggcgagctggacttcagcggcctgctgaagagaagagaggtgaagcagcaggaggaggagccccaggtggacgtgtgggagctgctgaagaacgccaagcccagcgagtacgagaagatcgccttccagtacggcatcaccgacctgagaggcatgctgaagagactgaagagaatgagaagagaggagaagaagagcgccgccttcgccaagatcctggaccccgcctaccaggtggacaagggcggcagagtgagattcgtggtggagctggccgaccccaagctggaggtgaagtggtacaagaacggccaggagatcagacccagcaccaagtacatcttcgagcacaagggctgccagagaatcctgttcatcaacaactgccagatgaccgacgacagcgagtactacgtgaccgccggcgacgagaagtgcagcaccgagctgttcgtgagagagccccccatcatggtgaccaagcagctggaggacaccaccgcctactgcggcgagagagtggagctggagtgcgaggtgagcgaggacgacgccaacgtgaagtggttcaagaacggcgaggagatcatccccggccccaagagcagatacagaatcagagtggagggcaagaagcacatcctgatcatcgagggcgccaccaaggccgacgccgccgagtacagcgtgatgaccaccggcggccagagcagcgccaagctgagcgtggacctgaagcccctgaagatcctgacccccctgaccgaccagaccgtgaacctgggcaaggagatctgcctgaagtgcgagatcagcgagaacatccccggcaagtggaccaagaacggcctgcccgtgcaggagagcgacagactgaaggtggtgcacaagggcagaatccacaagctggtgatcgccaacgccctgaccgaggacgagggcgactacgtgttcgcccccgacgcctacaacgtgaccctgcccgccaaggtgcacgtgatcgacccccccaagatcatcctggacggcctggacgccgacaacaccgtgaccgtgatcgccggcaacaagctgagactggagatccccatcagcggcgagcccccccccaaggccatgtggagcagaggcgacaaggccatcatggagggcagcggcagaatcagaaccgagagctaccccgacagcagcaccctggtgatcgacatcgccgagagagacgacagcggcgtgtaccacatcaacctgaagaacgaggccggcgaggcccacgccagcatcaaggtgaaggtggtggacttccccgacccccccgtggcccccaccgtgaccgaggtgggcgacgactggtgcatcatgaactgggagccccccgcctacgacggcggcagccccatcctgggctacttcatcgagagaaagaagaagcagagcagcagatggatgagactgaacttcgacctgtgcaaggagaccaccttcgagcccaagaagatgatcgagggcgtggcctacgaggtgagaatcttcgccgtgaacgccatcggcatcagcaagcccagcatgcccagcagacccttcgtgcccctggccgtgaccagcccccccaccctgctgaccgtggacagcgtgaccgacaccaccgtgaccatgagatggagaccccccgaccacatcggcgccgccggcctggacggctacgtgctggagtactgcttcgagggcagcaccagcgccaagcagagcgacgagaacggcgaggccgcctacgacctgcccgccgaggactggatcgtggccaacaaggacctgatcgacaagaccaagttcaccatcaccggcctgcccaccgacgccaagatcttcgtgagagtgaaggccgtgaacgccgccggcgccagcgagcccaagtactacagccagcccatcctggtgaaggagatcatcgagccccccaagatcagaatccccagacacctgaagcagacctacatcagaagagtgggcgaggccgtgaacctggtgatccccttccagggcaagcccagacccgagctgacctggaagaaggacggcgccgagatcgacaagaaccagatcaacatcagaaacagcgagaccgacaccatcatcttcatcagaaaggccgagagaagccacagcggcaagtacgacctgcaggtgaaggtggacaagttcgtggagaccgccagcatcgacatccagatcatcgacagacccggccccccccagatcgtgaagatcgaggacgtgtggggcgagaacgtggccctgacctggaccccccccaaggacgacggcaacgccgccatcaccggctacaccatccagaaggccgacaagaagagcatggagtggttcaccgtgatcgagcactaccacagaaccagcgccaccatcaccgagctggtgatcggcaacgagtactacttcagagtgttcagcgagaacatgtgcggcctgagcgaggacgccaccatgaccaaggagagcgccgtgatcgccagagacggcaagatctacaagaaccccgtgtacgaggacttcgacttcagcgaggcccccatgttcacccagcccctggtgaacacctacgccatcgccggctacaacgccaccctgaactgcagcgtgagaggcaaccccaagcccaagatcacctggatgaagaacaaggtggccatcgtggacgaccccagatacagaatgttcagcaaccagggcgtgtgcaccctggagatcagaaagcccagcccctacgacggcggcacctactgctgcaaggccgtgaacgacctgggcaccgtggagatcgagtgcaagctggaggtgaaggtgatctaccagggcgtgaacacccccggccagcccgtgttcctggagggccagcagcagagcctgcacaacaaggacttctag

SEQ ID NO: 292518 - DNA, 1710 bp, Artificial Sequence
  derived and/or modified sequence
ggaggcaggttctagccccatccctggagggactcggcctctgtggcctcatttctacactagggtgatggtggggccaccccaaagtccccaaggcacagtcgagctcagcatgtccctggcaggttctgggtgctcaggaagcagaatactcaggcctccacacccctggccccaggtcctccttggaccacaggagacacaggcctcccacctcaggagggaggagggctggcctgaccactgtccctcccaccctaggacacagtcatgctcatatcggctgcgtcgatggcacccgaggtgtgcggcccaagcctccagggaacccctggacccccaccgcccctgctgcccaagccagggaaggacaacttgcgtttgcagaagctcctgaggaaggcagcccggaagaagatgatgggaggcacacacctcgctccacccagggccttccgcacctccctgtcccccgtgagtgaggccagccatgaccaggaggtcacagccccgcacgctgctgagggcccgcaccccgccgaagccccacgccttcctgaagccccacgccccgccgaggctccccgcatggtggctgccctaccccgctccccgcacacccccatcatccaccacgtggcatcacccctgcagaagtccacgttctccatcggcctcacccagcgcaggattctagctgctcaattcagggccatggggccccaggttgtagcctcggccccagaacctacccggccccccagtggcttcgtccctgtctctgggggtgggggcacccacgtcacccaggtgcacatccagctggcaccatccccacacaatgggacccctgagcctcccaggacagccccagaagtgggatccaacagccaggatggagatgccaccccaagtccccccagggcccagcccctggtcccagtggctcacatccgcccactgcccaccacagtccaggctgccagtcccttgcctgaggagccccctgtaccacggccgccacccggcttccaggcctcagtgcccagagaggctagtgccagggttgtggtgcccatagccccgacctgccgctcgctggagtcctcaccgcacagcctggtccccatgggccctggcagagagcacctggaggagcccccgatggctggccccgccgctgaggccgagcgagtgtccagccctgcctgggcctcatcccctaccccaccatcaggccctcacccatgccctgtccccaaagttgcacccaagccccggctcagtggctggacgtggctcaagaagcagctgctggaggaggccccagagcctccgtgcccagagccgcggcagagcctggagccagaggtgcccacccccacagagcaggaggtgcctgcccccacagagcaggaggtgcccgccctcaccgcaccccgggcccccgcctcccggacctccaggatgtgggatgccgtgctgtaccgcatgtcagtggcggaggcccaagggcgcctggcagggcccagcggtggggagcacaccccagccagcctcacccgcctgcccttcctgtaccggcctcgcttcaacgcccggaagctgcaggaggccacccggccccctcccacagtccgctccatcctggagctgagcccccagcccaagaacttcaaccgcacagcgactggctggaggctccagtga

SEQ ID NO: 292519 - DNA, 528 bp, Artificial Sequence
  derived and/or modified sequence
atgacccgtccgctgcccgaaagtatcaggcttctcagacacacaggcctggtaccacccaccccggtgccacttggttaccctcaccaatcgttcgtgagccagccccaccctttttcaaaacaacctagcccatgtccccgacaaagcccccaaggcgactttggctgggtttcacccggagcctcacgttccattacgggtccctcctctcccgctgctccatccctgatatccctgggaagcctcgggagccacctgcagggagcccgaccccacccacggcagtcctctctcggagattttggtcttgttacaccgggaaccccctgctgtcgactgtgcccccctctgctccttccgcaaggccgtccaccgtgggtgctctgcgcaggcgtcagcaaagagctgggcccaaaccctgtcttgccttcccccatcgtggaacaaaggctgggacacggagcagacatggtacctccaccagaccaggaggagtggaatgtggtcatgtcccagagtacttag

SEQ ID NO: 292520 - DNA, 1251 bp, Artificial Sequence
  derived and/or modified sequence
atgctgctgattttgctgagcgttgcccttctggccctgtcctccgcccagaacctgaatgaggacgtgagtcaagaagaaagtccttccctgattgccggcaacccgcagggtgcaccacctcaggggggaaacaaacctcagggcccgcctagccccccggggaaaccccagggacccccccctcaaggagggaaccagcctcagggccctccaccccctcctggaaagccgcaaggacccccacctcaaggaggcaataagcctcaaggacccccccctcccggaaagccccaggggccgccaccccagggcgataaatctagaagcccgaggtccccccccggtaagcctcaggggccacctccgcaaggaggaaatcaaccgcaaggccctccacctccaccaggaaaacctcagggcccgccgccacagggagggaataagccccaaggcccaccgcccccggggaaaccacaaggccctccgccccagggtgataacaagtcaaggtctagccggtccccaccaggtaaaccacagggtcctcctcctcagggcgggaatcagccacagggaccaccacctcccccaggaaagccccagggcccccccccccaggggggcaataagccccagggcccgcctcctcccggtaagcctcaaggccctcccccacagggcgacaacaagtctcagtctgcacgcagtcctcccggaaaaccccagggaccaccccctcaaggggggaaccagccacaaggccccccacctccccctgggaagcctcagggacccccaccccagggtggaaataaaccacaagggcctccaccacctggaaagcctcaggggcccccgccacaaggcggctctaaaagtaggtcttcgagaagtccgccaggtaagccccagggccccccgccccaagggggtaatcaacctcagggaccaccaccaccaccagggaaaccccaggggcctcccccccagggtggaaacaagcctcaggggcccccccctcccgggaagccccaaggcccccctccccagggcggctccaaaagcaggtcggctaggagccccccaggaaaaccccaggggcctcctcagcaggagggtaacaatccgcaaggcccaccaccgccggctggtgggaaccctcagcagcctcaggctcccccagccgggcaaccccaaggcccgccacgtcccccacagggagggcggccatcccgaccaccccagtag

SEQ ID NO: 292521 - DNA, 379 bp, Artificial Sequence
  derived and/or modified sequence
gggcggcggcggctgggcgggagccccagaggtactggcgggagcaggggacgggaggcactactgtcgggcccgacaggggagaggtggcctagccgtgggcccgggtgatgtgtatgggagtggggtcctcgccacgttcgccgccagcaccctcccaacttccctccgggctccagctcagtcccgagtcaatatgtccagccccctgtctctgaccagccgttcctactctctctgtgtgacggcttagcctggccagccagccgggcaggaactgctgccacaacctcaggctgggcaccaaacacccgtgcccgccaatgcggcccagcccccggagagtcaggcccacagagcatgcccatgtgggccggcg

SEQ ID NO: 292522 - protein, 215 aa, Artificial Sequence
  derived and/or modified sequence
MPGEATETVPATEQELPQPQAETGSGTESDSDESVPELEEQDSTQATTQQAQLAAAAEIDEEPVSKAKQSRSEKKARKAMSKLGLRQVTGVTRVTIRKSKNILFVITKPDVYKSPASDTYIVFGEAKIEDLSQQAQLAAAEKFKVQGEAVSNIQENTQTPTVQEESEEEEVDETGVEVKDIELVMSQANVSRAKAVRALKNNSNDIVNAIMELTM

SEQ ID NO: 292523 - protein, 198 aa, Artificial Sequence
  derived and/or modified sequence
MPGEATETVPATEQELPQPQAETGSGTESDSDESVPELEEQDSTQATTQQAQLAAAAEIDEEPVSKAKQSRSEKKARKAMSKLGLRQVTGVTRVTIRKSKNILFVITKPDVYKSPASDTYIVFGEAKIEDLSQQAQLAAAEKFKVQGEAVSNIQENTQTPTVQEESEEEEVDETGVEVKDIELVMSQANVSRAKAVRA

SEQ ID NO: 292524 - protein, 126 aa, Artificial Sequence
  derived and/or modified sequence
MPGEATETVPATEQELPQPQAETGSGTESDSDESVPELEEQDSTQATTQQAQLAAAAEIDEEPVSKAKQSRSEKKARKAMSKLGLRQVTGVTRVTIRKSKNILFVITKPDVYKSPASDTYIVFGEA

SEQ ID NO: 292525 - DNA, 648 bp, Artificial Sequence
  derived and/or modified sequence
atgcctggtgaggcgaccgaaacagtaccagcaaccgagcaagaacttccacaaccccaagcagagacaggatccggcactgaatcagattccgacgaatcagtgcctgagctagaagagcaggactctacacaggcaactacccaacaggcccaattggctgcagctgcagagatagacgaggaacctgtcagtaaggccaagcagagcaggtctgagaaaaaagctcggaaggccatgagcaaactcggattgagacaggtcacaggggtgacacgggtgaccatccggaaatctaagaacatcctgttcgtcataaccaaacccgacgtatacaaaagtcccgcctccgatacttacatagtgttcggcgaagcaaagattgaagacctttcccaacaggctcagctggctgctgcagaaaaatttaaggtccagggggaggctgtgagcaatatccaggagaacacccagactcccactgttcaggaagaaagtgaggaggaggaggtggacgaaaccggtgtggaggttaaagacatcgaactagttatgagtcaggccaatgtctcaagagcaaaggctgtgagagccctgaagaacaattccaatgatatcgtaaacgctataatggagctcacaatgtag

SEQ ID NO: 292526 - DNA, 648 bp, Artificial Sequence
  derived and/or modified sequence
atgcccggagaggctacagagactgtcccagccacagagcaagagctcccccagccccaggccgagaccggctctggaacggaaagcgatagcgatgaaagtgtccccgagcttgaagagcaggattccacacaggctactactcagcaagctcagctcgctgcggcagctgaaattgacgaagaacccgtgagtaaagccaagcagtcacgctccgaaaaaaaggcccgaaaggccatgagcaagttgggattaagacaagtgactggagttaccagagttactatcagaaagtctaagaacatccttttcgtgattaccaagcctgacgtctacaagagcccggcttcagacacctatatagtcttcggagaggccaagatcgaggatttgtctcagcaggcacagctcgctgccgccgagaagtttaaggtccaaggcgaagccgtgtccaacatccaagagaacacgcagacgccaactgtacaagaggaaagtgaagaggaggaagtcgatgaaacgggagtggaagtgaaggacatagaactcgtaatgagtcaggcgaatgttagccgggccaaggcagttcgcgccctcaaaaacaacagtaacgacattgtgaacgccattatggaactgactatgtag

SEQ ID NO: 292527 - DNA, 648 bp, Artificial Sequence
  derived and/or modified sequence
atgccaggggaagcaaccgaaaccgtgcccgccacggaacaggagcttccgcagccacaggctgagacaggctctggcactgagtccgattccgacgaatccgttcccgaacttgaagagcaggactctactcaggccactacccagcaggcccagttggctgccgccgctgagattgacgaagagccagtatcaaaagccaagcagagtagatccgagaagaaagctcgaaaggccatgagcaagttgggactgcggcaagtgaccggggtgactcgcgtcaccattagaaaatctaaaaatattcttttcgtcatcactaaaccagacgtgtacaagtcccctgcctccgatacttatattgtctttggcgaggcaaagatcgaagacttgtcacagcaggctcagttagctgctgccgagaagtttaaggtccaaggagaagctgtgtcaaacatccaagagaatactcagactccaaccgtgcaggaggagagtgaggaagaagaggttgacgaaactggggtggaagtgaaagatatagagctggtaatgagccaagcaaacgtctccagagccaaagctgtgcgtgccctcaagaataattctaacgacatagtgaatgccatcatggaactcaccatgtag

SEQ ID NO: 292528 - DNA, 597 bp, Artificial Sequence
  derived and/or modified sequence
atgcccggcgaggccacagaaacagtgcccgcaacagagcaggagctcccacagccccaggcagagactggctctgggaccgagtccgacagcgatgaatctgtccccgaacttgaggagcaggactccacccaagctaccacccaacaagcccaattggctgcagctgctgagatcgacgaggagccggtgagcaaggccaagcagtccagatcagagaaaaaggcacgtaaggcgatgtccaaactgggtctgaggcaggtcaccggagtcactcgcgtaactattcgcaaatccaaaaacatcctgttcgtgattactaaaccagacgtgtataagagtcctgccagtgacacctacatagtgtttggagaagctaaaatcgaagatctgagccagcaggctcagctggccgcggccgagaaattcaaagtccagggcgaagctgtatcaaatatccaggagaatacccaaactcccacggtgcaggaagagtccgaagaagaagaagtggacgaaactggagtcgaggtgaaggacattgagctcgtgatgtcacaggcaaatgtgtcgagggctaaggcggttcgagcctag

SEQ ID NO: 292529 - DNA, 381 bp, Artificial Sequence
  derived and/or modified sequence
atgcccggcgaggccacggagacggtaccagccacggagcaggaactgccacagccacaggccgagactggatccggcactgagagcgactccgacgaatcggtgcccgagctggaagagcaggacagcacccaggccacaacccagcaggcccagctcgccgctgccgcagaaatagacgaggagcctgtgtcgaaggcaaaacagtccaggagcgaaaaaaaagcgcgtaaggccatgagcaaactgggcttgcggcaggtgaccggtgtgacccgcgtgactataagaaagtctaagaacatactgtttgtgattactaaaccagacgtgtacaagagcccggccagcgatacttacatcgtatttggagaagcctag

SEQ ID NO: 292530 - DNA, 648 bp, Artificial Sequence
  derived and/or modified sequence
atgccgggtgaagccacagaaacagtgccagctactgagcaggagctacctcagcctcaagccgaaactgggagtggcacagagtctgactccgacgaatctgtgcctgagctcgaggagcaagactcaacccaggccaccacacagcaggcccagttggctgccgcagctgaaattgatgaagagcccgtgtctaaagccaaacagtcacgctcggagaagaaggccagaaaggctatgagtaaattgggactgcgtcaggttacaggagtcacaagggtcacaatccggaagtctaaaaatattctgtttgtgatcaccaaaccagatgtttataagtctcctgcgtctgacacctacatcgtgtttggcgaggctaagatcgaagacctgtcgcagcaggcacaacttgcggctgccgagaagttcaaagtacagggggaagccgtgagtaacatccaggagaacacccaaactccaaccgtgcaggaggaatcagaggaggaggaggtggatgagactggagtcgaggtaaaggatattgaattggtgatgtctcaggctaatgtctcccgcgcaaaagccgttagggctctgaagaataattcaaatgacattgtaaacgctataatggagttgaccatgtag

SEQ ID NO: 292531 - DNA, 648 bp, Artificial Sequence
  derived and/or modified sequence
atgcctggagaggccacagagaccgtgcctgccacagagcaggagctgccccagccccaggccgagactggaagtggcacagaaagtgacagtgatgagagcgtgcctgagctggaggagcaggacagcacccaggccaccacccagcaggcccagctggccgctgctgctgagattgatgaggagcctgtgtccaaggccaagcagagccgctctgagaagaaggccaggaaggccatgagcaagctgggcctgcggcaggtgactggagtgaccagggtgaccatcaggaagagcaagaacatcctcttcgtcatcaccaagccagatgtgtacaagagccctgccagtgacacctacatcgtgtttggagaggccaagattgaggacctgagccagcaggcccagctggccgctgctgagaagttcaaggtgcagggcgaggccgtgagcaacatccaggagaacacccagacccccaccgtgcaggaggagagcgaggaggaggaggtggatgagaccggggtggaggtgaaggacatcgagctggtgatgagccaggccaacgtgtcccgggccaaggctgtgcgggccctgaagaacaacagcaatgacatcgtgaatgccatcatggagctgaccatgtag

SEQ ID NO: 292532 - DNA, 597 bp, Artificial Sequence
  derived and/or modified sequence
atgcctggagaggccacagagaccgtgcctgccacagagcaggagctgccccagccccaggccgagactggaagtggcacagaaagtgacagtgatgagagcgtgcctgagctggaggagcaggacagcacccaggccaccacccagcaggcccagctggccgctgctgctgagattgatgaggagcctgtgtccaaggccaagcagagccgctctgagaagaaggccaggaaggccatgagcaagctgggcctgcggcaggtgactggagtgaccagggtgaccatcaggaagagcaagaacatcctcttcgtcatcaccaagccagatgtgtacaagagccctgccagtgacacctacatcgtgtttggagaggccaagattgaggacctgagccagcaggcccagctggccgctgctgagaagttcaaggtgcagggcgaggccgtgagcaacatccaggagaacacccagacccccaccgtgcaggaggagagcgaggaggaggaggtggatgagaccggggtggaggtgaaggacatcgagctggtgatgagccaggccaacgtgtcccgggccaaggctgtgcgggcctag

SEQ ID NO: 292533 - DNA, 381 bp, Artificial Sequence
  derived and/or modified sequence
atgcctggagaggccacagagaccgtgcctgccacagagcaggagctgccccagccccaggccgagactggaagtggcacagaaagtgacagtgatgagagcgtgcctgagctggaggagcaggacagcacccaggccaccacccagcaggcccagctggccgctgctgctgagattgatgaggagcctgtgtccaaggccaagcagagccgctctgagaagaaggccaggaaggccatgagcaagctgggcctgcggcaggtgactggagtgaccagggtgaccatcaggaagagcaagaacatcctcttcgtcatcaccaagccagatgtgtacaagagccctgccagtgacacctacatcgtgtttggagaggcctag

SEQ ID NO: 292534 - DNA, 2690 bp, Artificial Sequence
  derived and/or modified sequence
tcccagctactctggaggctgagacgagaatcgcttgaacccgggaggccgaggttgcagtaagccgagatcgcgccactgcactccagcctgggcgacagagcgagactccgcctcaaaaaataaataaatgttgactggtttagctaattcaggtacagcaaatatttgttgagttcttttgtagggctgtgggaagatatgggaggcttttcattaacacaacactgattttacattctacttttcaaaaatacagttgtacaaagcatggtttaaggtggggtcccagacacctagaataaataagcttagaatatccaagaagtgccaggggcggtagttcacgcctgtaatcccagcactttgggaggccgaggcaggcggatcacctgaagtcaggaggagaccagcctggccaacatggagaaagcccgtctctactaaaaatacaaaaaatagactggcgtggtggcgcatgcctgtaatcccagctacccgggaggctgaggcaggagaatcgcttgacccgggaaggggaggttgcagtgagccgagatcgtgcctttgcaccccagcctgggcaataaaagtgagactgtcccaaaaacaaaacaaacaggctgggcatggtggctcacgcctgtaatcccagtagtttgggaggccgaggcaggcggattacctgaggtcaggagttcaagaccagcctggccaacatggtgaaacccgtctctactaaaaataaaaaattagccgggggtggtggcacacacctgtaatcccagctactcgggaggctgaggcgggacaactgcttgagccctggaggcggagattgcagtgagccgagatcgtgccactgcactctagcctggccgacagagcgactcaaaaaaaaaaaaaaaaaaatccaagaagtgcccaaaatagcaagcaaaggaattgtatatgtgcctatgttctttttttctgggaaggagaatctgcagctttataatttcaacatcggctaaattgtcgtgaacctaaaacaatcaaaagggccggaatctatttaaagagtttattcaagggcagtgtgaggatggaccaaccagaaaacctccaaagaatggagtcagccttcagaagtagagaagttacgatttcatttatttagggagacagaggagtttttagctggattacgttatccatacaaggttggaacataattacagaatttggttacaagaagtgttttttttggggggggggcgggggtacagctaacattgttttacgaagagtttaacacgcatgagttgctgtcatctggtgacatcgtttgagtctctctagtcattgaacagaacaagaaaaatcgaattaaatttataatctgaactgaagttatatgtgacccatcacatctctcaagttttaaaatgggtttttttgttgttgttgatggggggggagagggtccagcagcttttaaatgttttcacatcgtgtgttccaaaaataactggttagcctaagtcacttccaccctccaatgttgtgaatgcagtctctagcattcgctatttaatgtcttcttcctgcactatttgagaaatcgcgaggtcgacttaataccgcagtcgccacttcgcggaccggagggcggagtctgcttagttctgaggactgcgtgggtccgcgcagagagctcctgctaggcctgcgcgtcccgttctaaattcttaccctttagtccttgtcaccacccccgccgtgggaacggcctgacagtcactcgtcaaaggaagtggctgccggcagctcttgacccggaatcggatcctagtcccaccccctccgctccaggcttccttctgcaacaggcgtgggtcacgctctcgctcggtctttctgccgccatcttggttccgcgttccctgcacaaaatgcccggcgaagccacagaaaccgtccctgctacagagcaggagttgccgcagccccaggctgagacagggtctggaacagaatctgacagtgatgaatcagtaccagagcttgaagaacaggattccacccaggcaaccacacaacaagcccagctggcggcagcagctgaaattgatgaagaaccagtcagtaaagcaaaacagagtcggagtgaaaagaaggcacggaaggctatgtccaaactgggtcttcggcaggttacaggagttactagagtcactatccggaaatctaagaatatcctctttgtcatcacaaaaccagatgtctacaagagccctgcttcagatacttacatagtttttggggaagccaagatcgaagatttatcccagcaagcacaactagcagctgctgagaaattcaaagttcaaggtgaagctgtctcaaacattcaagaaaacacacagactccaactgtacaagaggagagtgaagaggaagaggtcgatgaaacaggtgtagaagttaaggacattgaattggtcatgtcacaagcaaatgtgtcgagagcaaaggcagtccgagccctgaagaacaacagtaatgatattgtaaatgcgattatggaattaacaatgtaaccatatggaagcaactttttttggtgtctcaaaggagtaactgcagcttggtttgaaatttgtactgtttctatcataaataaagttatggcttcttgttggatg

SEQ ID NO: 292535 - DNA, 1059 bp, Artificial Sequence
  derived and/or modified sequence
gcacagtaagtactttctgtgccgctactgtctatccgcagccatccgcctttctttcgggctaagccgccccggggactgagagttaaggagagttggaggctttactgggccacagggttcctactcgcccctgggcctccggacaaaatggggtctgcggttggtgtcctggcaaaagcagggtagaagggctgcggggcgggcccagaatccgagcctgcagagatgggagcagttgcagtgttgagggcggaagaggagtgcgtcttgttttgggaactgcttcacaggatccagaaaaggaaatgcccggcgaagccacagaaaccgtccctgctacagagcaggagttgccgcagccccaggctgagacagggtctggaacagaatctgacagtgatgaatcagtaccagagcttgaagaacaggattccacccaggcaaccacacaacaagcccagctggcggcagcagctgaaattgatgaagaaccagtcagtaaagcaaaacagagtcggagtgaaaagaaggcacggaaggctatgtccaaactgggtcttcggcaggttacaggagttactagagtcactatccggaaatctaagaatatcctctttgtcatcacaaaaccagatgtctacaagagccctgcttcagatacttacatagtttttggggaagccaagatcgaagatttatcccagcaagcacaactagcagctgctgagaaattcaaagttcaaggtgaagctgtctcaaacattcaagaaaacacacagactccaactgtacaagaggagagtgaagaggaagaggtcgatgaaacaggtgtagaagttaaggacattgaattggtcatgtcacaagcaaatgtgtcgagagcaaaggcagtccgagccctgaagaacaacagtaatgatattgtaaatgcgattatggaattaacaatgtaaccatatggaagcaactttttttggtgtctcaaaggagtaactgcagcttggtttgaaatttgtactgtttctatcataaataaagttatggcttcttgttgga

SEQ ID NO: 292536 - DNA, 802 bp, Artificial Sequence
  derived and/or modified sequence
cccctccgctccaggcttccttctgcaacaggcgtgggtcacgctctcgctcggtctttctgccgccatcttggttccgcgttccctgcacagcctcctttttattcccttccttcagaaatgcccggcgaagccacagaaaccgtccctgctacagagcaggagttgccgcagccccaggctgagacagggtctggaacagaatctgacagtgatgaatcagtaccagagcttgaagaacaggattccacccaggcaaccacacaacaagcccagctggcggcagcagctgaaattgatgaagaaccagtcagtaaagcaaaacagagtcggagtgaaaagaaggcacggaaggctatgtccaaactgggtcttcggcaggttacaggagttactagagtcactatccggaaatctaagaatatcctctttgtcatcacaaaaccagatgtctacaagagccctgcttcagatacttacatagtttttggggaagccaagatcgaagatttatcccagcaagcacaactagcagctgctgagaaattcaaagttcaaggtgaagctgtctcaaacattcaagaaaacacacagactccaactgtacaagaggagagtgaagaggaagaggtcgatgaaacaggtgtagaagttaaggacattgaattggtcatgtcacaagcaaatgtgtcgagagcaaaggcagtccgagccctgaagaacaacagtaatgatattgtaaatgcgattatggaattaacaatgtaaccatatggaagcaactttttttggtgtctcaaag

SEQ ID NO: 292537 - DNA, 690 bp, Artificial Sequence
  derived and/or modified sequence
gtgacaagcaagtgttggacttaaaacaccgtctttcccctcctggtaccccaaagtcggcaaacgtagtccaggaggccccagcccagccagtaaatgcccggcgaagccacagaaaccgtccctgctacagagcaggagttgccgcagccccaggctgagacagggtctggaacagaatctgacagtgatgaatcagtaccagagcttgaagaacaggattccacccaggcaaccacacaacaagcccagctggcggcagcagctgaaattgatgaagaaccagtcagtaaagcaaaacagagtcggagtgaaaagaaggcacggaaggctatgtccaaactgggtcttcggcaggttacaggagttactagagtcactatccggaaatctaagaatatcctctttgtcatcacaaaaccagatgtctacaagagccctgcttcagatacttacatagtttttggggaagccaagatcgaagatttatcccagcaagcacaactagcagctgctgagaaattcaaagttcaaggtgaagctgtctcaaacattcaagaaaacacacagactccaactgtacaagaggagagtgaagaggaagaggtcgatgaaacaggtgtagaagttaaggacattgaattggtcatgtcacaagcaaatgtgtcgagagcaaaggcagtccgagcc

SEQ ID NO: 292538 - DNA, 711 bp, Artificial Sequence
  derived and/or modified sequence
aactatatatgtgtcttaaacctcaaagtaaattttccttgagaaataatttatgttgaaaagatttcctggccaagtgcagtggctcacacccgtaatcccagcactttgggaggccgaggcaggcggatcacctgagtccttgtcaccacccccgccgtgggaacggcctgacagtcactcgtcaaaggaagtggctgccggcagctcttgacccggaatcggatcctagtcccaccccctccgctccaggcttccttctgcaacaggcgtgggtcacgctctcgctcggtctttctgccgccatcttggttccgcgttccctgcacaaaatgcccggcgaagccacagaaaccgtccctgctacagagcaggagttgccgcagccccaggctgagacagggtctggaacagaatctgacagtgatgaatcagtaccagagcttgaagaacaggattccacccaggcaaccacacaacaagcccagctggcggcagcagctgaaattgatgaagaaccagtcagtaaagcaaaacagagtcggagtgaaaagaaggcacggaaggctatgtccaaactgggtcttcggcaggttacaggagttactagagtcactatccggaaatctaagaatatcctctttgtcatcacaaaaccagatgtctacaagagccctgcttcagatacttacatagtttttggggaagcca

SEQ ID NO: 292539 - DNA, 1074 bp, Artificial Sequence
  derived and/or modified sequence
actttctgtgccgctactgtctatccgcagccatccgcctttctttcgggctaagccgccccggggactgagagttaaggagagttggaggctttactgggccacagggttcctactcgcccctgggcctccggacaaaatggggtctgcggttggtgtcctggcaaaagcagggtagaagggctgcggggcgggcccagaatccgagcctgcagagatgggagcagttgcagtgttgagggcggaagaggagtgcgtcttgttttgggaactgcttcacaggatccagaaaagggcctcctttttattcccttccttcagaaatgcccggcgaagccacagaaaccgtccctgctacagagcaggagttgccgcagccccaggctgagacagggtctggaacagaatctgacagtgatgaatcagtaccagagcttgaagaacaggattccacccaggcaaccacacaacaagcccagctggcggcagcagctgaaattgatgaagaaccagtcagtaaagcaaaacagagtcggagtgaaaagaaggcacggaaggctatgtccaaactgggtcttcggcaggttacaggagttactagagtcactatccggaaatctaagaatatcctctttgtcatcacaaaaccagatgtctacaagagccctgcttcagatacttacatagtttttggggaagccaagatcgaagatttatcccagcaagcacaactagcagctgctgagaaattcaaagttcaaggtgaagctgtctcaaacattcaagaaaacacacagactccaactgtacaagaggagagtgaagaggaagaggtcgatgaaacaggtgtagaagttaaggacattgaattggtcatgtcacaagcaaatgtgtcgagagcaaaggcagtccgagccctgaagaacaacagtaatgatattgtaaatgcgattatggaattaacaatgtaaccatatggaagcaactttttttggtgtctcaaaggagtaactgcagcttggtttgaaatttgtactgtttctatcataaataaagttatggcttcttgttgga

SEQ ID NO: 292540 - DNA, 648 bp, Artificial Sequence
  derived and/or modified sequence
atgcccggcgaggccaccgagaccgtgcccgccaccgagcaggagctccctcagccgcaggcagagaccgggtccggcacagagagcgactctgacgagtccgtccctgagttagaagaacaggacagtacacaggccacgacccagcaggcgcagctcgccgctgccgctgaaattgacgaagagcccgtgtcaaaagctaaacaatctcggtccgaaaagaaggctaggaaggcaatgagcaagctcgggttacgacaggtgactggagtgactcgggtgaccattcgtaaatcgaaaaacattttattcgtgatcaccaagcctgacgtttataagtcaccagcatccgatacctatattgtgttcggagaggcgaagatcgaggacctctcccagcaggcccaactcgccgccgccgagaaattcaaagtgcagggcgaggctgtctcaaatatccaggagaacactcagacccccacggtgcaggaggaatcggaggaggaagaggtggacgagacgggcgtcgaagttaaggacatcgagctcgtaatgagccaggctaacgtgagccgagccaaagcggttagagccctgaagaacaatagtaacgatatcgtcaatgccatcatggagcttacaatgtag

SEQ ID NO: 292541 - DNA, 648 bp, Artificial Sequence
  derived and/or modified sequence
atgcccggcgaggccaccgagaccgtgcccgccaccgagcaggagcttccacaacctcaggctgagaccggaagcggcacagagtcagactcagacgaaagcgtgcccgaacttgaggagcaggatagtacccaggctactactcagcaggctcagctggcagctgctgcggaaatcgatgaggaacccgtgtctaaagcaaagcagagtcgcagtgagaaaaaagcacggaaagccatgagcaaactgggcctcaggcaagtaaccggcgtcacaagagtaacaattcgcaagtcgaaaaacattcttttcgtgattaccaagcccgatgtatataagtctcccgcttctgatacgtatatcgtgttcggagaagccaaaattgaggacctgtctcagcaggctcagctagctgccgcagagaagttcaaggtgcagggtgaagccgtgtccaacatccaggagaatacccagacacctactgtccaggaagagtcagaggaagaggaagtcgacgaaacgggggtggaggtgaaagacattgagttggtaatgagtcaagccaacgtcagcagggcaaaagccgtaagggctttgaagaataacagcaacgacatcgtaaatgcgatcatggagctgaccatgtag

SEQ ID NO: 292542 - DNA, 648 bp, Artificial Sequence
  derived and/or modified sequence
atgcccggcgaggccaccgagaccgtgcccgccaccgagcaggagcttccacagccccaagcagagaccggatcagggaccgagtccgatagcgatgaatctgtgcccgaactagaagagcaggatagtacacaggctactactcagcaagcccagctggccgcagctgcagagatagacgaagaaccagtctccaaggctaaacagtctagatcagaaaaaaaggccagaaaagcaatgagtaagctgggcctccggcaagtgacgggtgtgactagagtgaccattaggaagtccaagaacattctcttcgtaatcacgaagccagacgtatataagtcgccagcctccgatacatatatagtcttcggcgaggcgaagatcgaggatctttcgcaacaagctcagctggccgccgccgagaaatttaaggtgcagggcgaggccgtctcaaatattcaggagaacacccagacccctactgtgcaggaagagtctgaagaggaagaagttgacgaaaccggcgtggaagtcaaggatatcgagctagtaatgagtcaagcgaacgtctcccgagcaaaagctgtgagagcgctgaaaaacaacagtaacgacatcgtcaacgccataatggaactgacgatgtag

SEQ ID NO: 292543 - DNA, 597 bp, Artificial Sequence
  derived and/or modified sequence
atgcccggcgaggccaccgagaccgtgcccgccaccgagcaggagttgccacagccacaagccgaaaccgggagcgggacagaatccgattctgatgagtccgtgcccgagctagaagaacaggacagtactcaagcaacaacccagcaggcccagctagccgccgctgctgaaatcgatgaggagcccgtgagcaaagctaagcagagccgcagcgaaaagaaggcgcgcaaggccatgagcaaacttggcctgagacaggtgaccggcgtgactagggtaactatcaggaaatcaaagaatatactattcgttatcaccaagccagatgtgtataaatctccagcctctgacacctatatcgtctttggtgaggctaagatcgaagatcttagtcagcaggcccagctcgctgcagcagagaagtttaaggtccagggggaagccgtctctaatattcaggagaacacccagacccctacagtgcaggaagaaagcgaagaggaggaggtcgacgagaccggcgtggaggtaaaggatatagagttggtgatgtctcaggccaatgtttctcgcgcaaaggctgtgcgcgcctag

SEQ ID NO: 292544 - DNA, 381 bp, Artificial Sequence
  derived and/or modified sequence
atgcccggcgaggccaccgagaccgtgcccgccaccgagcaggagctacctcagccccaggccgagacaggctccgggaccgaaagcgactctgatgagtccgtgccagaactggaggagcaagattccacccaggccaccacccaacaagcacagctggccgccgccgctgagattgacgaagagcccgtaagtaaggcaaagcagtcccgctccgagaagaaagcaaggaaggccatgagtaagctcggcttgcgccaggttaccggagtcacccgggtgacaatacgcaaatccaagaatatcctgttcgtgatcaccaaaccagatgtatataagagtccggcgagcgacacctacatcgtctttggggaagcatag

SEQ ID NO: 292545 - DNA, 648 bp, Artificial Sequence
  derived and/or modified sequence
atgcccggcgaggccaccgagaccgtgcccgccaccgagcaggagttaccacagccacaggcagagacaggaagtggcacggaaagcgattcagacgagtcagtgcctgagctcgaggagcaggacagtactcaagccacaacgcagcaggctcaattggccgctgccgcggagattgacgaggagcctgtgagtaaggcaaagcaaagccgatctgagaaaaaggctaggaaggctatgagcaagttagggcttcgccaggtaacaggagtgacaagagtgacaatcaggaagtcaaagaacatcctctttgtgatcaccaaacctgacgtctacaaatcccctgcaagcgatacatacattgtgttcggtgaggcgaagatagaggatttgtctcagcaggctcagctggcagcagcggagaaatttaaggtccagggcgaggcagtatcaaatattcaggaaaatacgcagactccaacagtgcaggaggagagcgaggaggaggaagtcgatgagactggcgttgaggtcaaggacatcgagctggtcatgtcccaggcaaatgtgtccagggcaaaggccgtccgagcactgaagaacaatagcaacgatatcgtcaatgccatcatggagctgacaatgtag

SEQ ID NO: 292546 - DNA, 648 bp, Artificial Sequence
  derived and/or modified sequence
atgccaggggaggccactgagactgtgcctgctaccgaacaggaactcccccagcctcaggctgagaccggctctggcacggagagcgatagcgatgagtcagtgcctgaattggaagagcaggacagcactcaggctactacacaacaagcccagctggctgccgcagctgagatcgacgaggagccggtttccaaagccaaacagtcccgatcagaaaagaaggcaagaaaggccatgtctaaattgggactgagacaagtgactggcgtgacacgcgtgactattaggaaaagtaagaatattctgttcgttatcacaaagcctgatgtatataaaagccccgcaagcgacacctacatcgtgtttggagaggcaaaaatcgaggatctgtctcagcaagcgcagctcgccgctgcggagaagtttaaggttcaaggagaagcggtgtcgaatattcaggagaacacccagactcccactgtacaagaagagtctgaagaagaggaggtggacgagactggagtagaggttaaggatatagagctggtaatgtcgcaagccaatgtctctagagctaaggccgtgcgtgcgctcaagaacaatagcaatgatatcgtgaatgcaatcatggaactgaccatgtag

SEQ ID NO: 292547 - DNA, 648 bp, Artificial Sequence
  derived and/or modified sequence
atgcctggcgaagccacagagactgtgcccgctaccgagcaggaacttcctcaaccgcaggccgaaaccgggtcagggacagaaagcgacagcgatgagagcgtgccagaactagaggaacaagatagcacgcaagccacaacgcaacaggcacagctggctgccgctgctgagatcgacgaagaacctgtgtcaaaggctaaacaaagtcgctctgagaaaaaagcacgcaaggctatgagcaagcttggactgaggcaggtgactggggttactcgcgtgacgattcggaaaagcaagaatattctattcgtgataaccaagcctgatgtctataagagtcctgccagtgatacttatatagtattcggggaggccaaaatcgaagaccttagtcagcaggcccagctggccgctgctgagaagtttaaggtccaaggtgaggccgtgtctaacatccaagaaaacacccagaccccgactgtccaggaggagtcagaagaagaggaggtcgatgaaacgggtgtggaagtcaaggacatcgaactggtgatgtctcaggctaatgtgtcaagggctaaagccgtcagagctctgaagaataattccaacgacattgtgaatgcgattatggagctaactatgtag

SEQ ID NO: 292548 - DNA, 648 bp, Artificial Sequence
  derived and/or modified sequence
atgccaggcgaagctactgagaccgttcctgctactgaacaagaactgccacaacctcaagctgagaccggctcaggtacagaatctgattctgacgaatcggtgcctgagctggaggaacaggattccactcaggccacgacccaacaggcccagctggcagcagccgctgaaatcgacgaagaacccgtaagcaaggcaaagcaatcccggtcagagaagaaggccaggaaagcgatgagtaaacttggcctgcggcaggtaaccggggttactagagtaaccatcaggaagtcgaaaaacattctgttcgtgatcaccaaacctgacgtgtataagagcccagcttcagacacgtacattgtcttcggggaagccaaaatcgaagatctgtcccagcaggcacagctggctgcggcagagaaattcaaggtgcagggagaggccgtcagtaacattcaagagaacactcaaaccccaaccgttcaggaggaatcagaggaggaagaggtggacgagaccggggttgaagtgaaagacatcgagctggtgatgtcacaagccaatgtgagtcgagccaaggctgtgcgggctctgaagaacaattccaacgacatcgtcaatgccataatggagttgactatgtag

SEQ ID NO: 292549 - DNA, 597 bp, Artificial Sequence
  derived and/or modified sequence
atgcccggagaggcgactgagacagtgccagccacggaacaggaactgccgcagcctcaggccgaaacaggatccggaactgaaagcgattccgatgaaagtgtgcctgagttggaagagcaggacagcacacaggcgacgacccagcaggcccagttggccgctgccgctgagatagatgaggaacctgtgtctaaagctaagcaaagtcgttcggagaaaaaggctagaaaagctatgagtaagctgggtctcaggcaagttaccggggttactagggtcacgattagaaagagcaaaaacatactgttcgtgattaccaaaccggacgtgtacaaatctccggcatctgacacttacatcgtgttcggagaggcaaaaattgaagacctatcccaacaggcccagctcgcggctgctgaaaagttcaaggtgcagggagaagccgtgagtaacattcaggaaaacactcagacccccaccgtgcaagaggagagcgaggaagaagaggttgatgagacaggtgtcgaagtgaaagatattgagttagtgatgagtcaggccaacgtaagcagggcgaaggccgtccgagcctag

SEQ ID NO: 292550 - DNA, 381 bp, Artificial Sequence
  derived and/or modified sequence
atgcctggtgaagctacggaaaccgtgccagcaacagagcaggagttgccacagcctcaagccgaaaccggcagcggtacagagagcgattcggatgagtccgtccccgagctggaagagcaggattccacacaggcgacaacccagcaggcccagttagctgccgcagctgaaatcgacgaagagcctgtctccaaagctaaacagtctcgtagtgagaagaaggcccgtaaagcaatgagcaagttggggctgaggcaagtgacaggtgtgacacgggtcactatccgaaagagtaagaacatcttatttgtaattacaaagccagatgtgtataagtctccagcctctgatacatatatagtattcggggaagcctag

SEQ ID NO: 292551 - DNA, 648 bp, Artificial Sequence
  derived and/or modified sequence
atgcccggagaggccaccgaaaccgttcccgctaccgagcaggaactgccccaacctcaagcggagactgggagcgggacagaatctgattctgatgagagcgtgcctgagctcgaggaacaggatagcacacaggccacaactcagcaggctcaattagccgcagcagcagagattgatgaggagcctgtgtcaaaggccaaacaaagccgttcagagaagaaagcacgcaaggcaatgtctaaactgggcctcaggcaggtgaccggtgtcacccgggtgactatacgtaaaagtaaaaacattctgtttgtgataactaaacccgacgtgtataagtcccctgcatccgacacttatatagtgttcggcgaggctaaaattgaggatctgagtcagcaagcccagctcgcagctgccgaaaagttcaaggtacagggtgaggccgtatcgaacatccaggaaaacacccaaacccctacagtccaggaagagtctgaggaggaggaagtggacgaaaccggcgtggaagtgaaagatattgaacttgtgatgagtcaggcaaacgtgtcaagggcaaaggccgtccgagccttgaaaaataactctaatgacattgtcaatgctatcatggaactgacaatgtag

SEQ ID NO: 292552 - DNA, 648 bp, Artificial Sequence
  derived and/or modified sequence
atgcccggcgaggccaccgagaccgtgcccgccaccgagcaggagctgccccagccccaggccgagaccggcagcggcaccgagagcgacagcgacgagagcgtgcccgagctggaggagcaggacagcacccaggccaccacccagcaggcccagctggccgccgccgccgagatcgacgaggagcccgtgagcaaggccaagcagagcagaagcgagaagaaggccagaaaggccatgagcaagctgggcctgagacaggtgaccggcgtgaccagagtgaccatcagaaagagcaagaacatcctgttcgtgatcaccaagcccgacgtgtacaagagccccgccagcgacacctacatcgtgttcggcgaggccaagatcgaggacctgagccagcaggcccagctggccgccgccgagaagttcaaggtgcagggcgaggccgtgagcaacatccaggagaacacccagacccccaccgtgcaggaggagagcgaggaggaggaggtggacgagaccggcgtggaggtgaaggacatcgagctggtgatgagccaggccaacgtgagcagagccaaggccgtgagagccctgaagaacaacagcaacgacatcgtgaacgccatcatggagctgaccatgtag

SEQ ID NO: 292553 - DNA, 597 bp, Artificial Sequence
  derived and/or modified sequence
atgcccggcgaggccaccgagaccgtgcccgccaccgagcaggagctgccccagccccaggccgagaccggcagcggcaccgagagcgacagcgacgagagcgtgcccgagctggaggagcaggacagcacccaggccaccacccagcaggcccagctggccgccgccgccgagatcgacgaggagcccgtgagcaaggccaagcagagcagaagcgagaagaaggccagaaaggccatgagcaagctgggcctgagacaggtgaccggcgtgaccagagtgaccatcagaaagagcaagaacatcctgttcgtgatcaccaagcccgacgtgtacaagagccccgccagcgacacctacatcgtgttcggcgaggccaagatcgaggacctgagccagcaggcccagctggccgccgccgagaagttcaaggtgcagggcgaggccgtgagcaacatccaggagaacacccagacccccaccgtgcaggaggagagcgaggaggaggaggtggacgagaccggcgtggaggtgaaggacatcgagctggtgatgagccaggccaacgtgagcagagccaaggccgtgagagcctag

SEQ ID NO: 292554 - DNA, 381 bp, Artificial Sequence
  derived and/or modified sequence
atgcccggcgaggccaccgagaccgtgcccgccaccgagcaggagctgccccagccccaggccgagaccggcagcggcaccgagagcgacagcgacgagagcgtgcccgagctggaggagcaggacagcacccaggccaccacccagcaggcccagctggccgccgccgccgagatcgacgaggagcccgtgagcaaggccaagcagagcagaagcgagaagaaggccagaaaggccatgagcaagctgggcctgagacaggtgaccggcgtgaccagagtgaccatcagaaagagcaagaacatcctgttcgtgatcaccaagcccgacgtgtacaagagccccgccagcgacacctacatcgtgttcggcgaggcctag

SEQ ID NO: 292555 - protein, 328 aa, Artificial Sequence
  derived and/or modified sequence
MADIDNLPRVVKRRVNALKNLQVKCAQIEAKFYEEVHDLERKYAVLYQPLFDKRFEIINAIYEPTEEECEWKPDEEDEISEELKEKAKIEDEKKDEEKEDPKGIPEFWLTVFKNVDLLSDMVQEHDEPILKHLKDIKVKFSDAGQPMSFVLEFHFEPNEYFTNEVLTKTYRMRSEPDDSDPFSFDGPEIMGCTGCQIDWKKGKNVTLKTIKKKQKHKGRGTVRTVTKTVSNDSFFNFFAPPEVPESGDLDDDAEAILAADFEIGHFLRERIIPRSVLYFTGEAIEDDDDDYDEEGEEADEEGEEEGDEENDPDYDPKKDQNPAECKQQ

SEQ ID NO: 292556 - DNA, 627 bp, Artificial Sequence
  derived and/or modified sequence
atggtccaagagcacgacgaacccatattgaaacatttgaaagacatcaaagtgaaattctccgacgccggccaacctatgagctttgtgctggaattccactttgagccaaacgagtatttcaccaacgaggtgctgacaaagacatacaggatgaggtcagaaccagatgatagcgatcccttcagcttcgacggccctgagattatgggctgcacgggctgtcagatcgactggaaaaaaggtaagaatgttacactcaaaaccataaagaagaagcagaagcacaagggaagaggaaccgtcaggacggtgacgaaaactgtaagcaacgattccttttttaattttttcgcccccccagaggtgcctgaatccggcgacctggacgacgatgctgaggctatcctggccgcggatttcgaaatcggccacttccttcgcgaacggattatcccccgctcagtgctgtattttacaggcgaggcaattgaagacgacgacgatgattatgatgaggagggcgaagaggctgacgaagaaggggaggaagaaggcgacgaggagaacgaccccgattacgaccccaagaaagaccagaatccagccgagtgtaagcaacaatag

SEQ ID NO: 292557 - DNA, 987 bp, Artificial Sequence
  derived and/or modified sequence
atggcagatatcgacaatttaccaagggtcgtgaaacgaagagtaaatgcactgaagaatctccaggtgaaatgtgcacaaattgaggctaaattttatgaggaagtgcatgatctggagaggaaatacgcagtcctatatcagcccctgttcgacaagcgatttgagataatcaatgctatttatgaacctactgaggaagaatgcgagtggaaaccagatgaggaggacgagatctctgaggagctcaaagagaaggcaaagattgaggacgaaaagaaggatgaagagaaagaggatccaaagggtatacccgaattctggttgaccgtgtttaagaatgtagacctgctctctgacatggtccaggagcacgatgagccgattctgaagcacctcaaggacataaaggttaaattcagcgatgcgggtcagcccatgtcttttgtgcttgagtttcacttcgagccaaatgagtattttactaatgaggtcctgaccaagacataccgcatgagatcagaacccgacgacagcgaccccttctctttcgacggccctgagatcatggggtgcactggctgccaaatcgactggaaaaagggcaagaatgtaacactcaaaactataaagaagaaacagaaacataaggggagggggacggtacgcaccgtcaccaaaacggtgagcaacgattctttcttcaattttttcgccccccccgaggtgcctgagtctggagacctggacgacgacgccgaggcgattctcgccgccgacttcgaaattggccattttctgcgcgagcggatcatcccaaggtccgtcctgtactttacgggcgaggccattgaggatgatgacgacgattacgacgaggagggggaggaagcggacgaggagggggaggaagagggagacgaggaaaacgatcccgattacgaccccaaaaaggaccagaatcccgcagagtgcaagcaacaatag

SEQ ID NO: 292558 - DNA, 627 bp, Artificial Sequence
  derived and/or modified sequence
atggtgcaggagcatgatgagcccatcctgaagcacctgaaggacatcaaggtgaagttcagtgatgctggccagcccatgagctttgtgctggagttccactttgagcccaatgagtacttcaccaatgaggtgctgaccaagacctacaggatgaggtctgagccagatgacagcgaccccttctcctttgatggccctgagatcatgggctgcaccggctgccagattgactggaagaagggcaagaatgtgaccctgaagaccatcaagaagaagcagaagcacaagggccggggcaccgtgaggacagtgaccaagacagtgtccaatgacagcttcttcaacttctttgcccctcctgaggtgcctgagagcggggacctggatgatgatgctgaggccatcctggccgctgactttgaaattggccacttcctgcgggagcgcatcatccccaggtctgtgctgtacttcaccggggaggccattgaagatgatgatgatgattatgatgaggagggggaggaggctgatgaggagggggaggaggagggagatgaagaaaatgaccctgactatgaccccaagaaggaccagaacccagctgagtgcaagcagcagtag

SEQ ID NO: 292559 - DNA, 987 bp, Artificial Sequence
  derived and/or modified sequence
atggctgacatcgacaacctgccccgggtggtgaagagaagagtgaatgccctgaagaacctgcaggtgaagtgtgcccagatcgaggccaagttctatgaggaggtgcatgacctggagaggaaatatgctgtgctgtaccagcccctgtttgacaagagatttgagatcatcaatgccatctatgagcccacagaggaggagtgtgagtggaagccagatgaggaggatgagatcagcgaggagctgaaggagaaggccaagattgaagatgagaagaaggatgaggagaaggaggaccccaagggcatccctgagttctggctgaccgtcttcaagaatgtggacctgctgagtgacatggtgcaggagcatgatgagcccatcctgaagcacctgaaggacatcaaggtgaagttcagtgatgctggccagcccatgagctttgtgctggagttccactttgagcccaatgagtacttcaccaatgaggtgctgaccaagacctacaggatgaggtctgagccagatgacagcgaccccttctcctttgatggccctgagatcatgggctgcaccggctgccagattgactggaagaagggcaagaatgtgaccctgaagaccatcaagaagaagcagaagcacaagggccggggcaccgtgaggacagtgaccaagacagtgtccaatgacagcttcttcaacttctttgcccctcctgaggtgcctgagagcggggacctggatgatgatgctgaggccatcctggccgctgactttgaaattggccacttcctgcgggagcgcatcatccccaggtctgtgctgtacttcaccggggaggccattgaagatgatgatgatgattatgatgaggagggggaggaggctgatgaggagggggaggaggagggagatgaagaaaatgaccctgactatgaccccaagaaggaccagaacccagctgagtgcaagcagcagtag

SEQ ID NO: 292560 - DNA, 627 bp, Artificial Sequence
  derived and/or modified sequence
atggtgcaggagcacgacgagcccatcctgaagcacctgaaggacatcaaggtcaaattctctgatgccggacagcctatgtcgttcgtactggagttccacttcgagccaaacgagtactttaccaacgaagtgctgactaaaacctaccgcatgagaagcgagcctgatgattcagatccgttttctttcgacggccctgagataatggggtgtacaggctgccagattgactggaaaaagggtaagaacgttacactaaagacgatcaagaagaaacagaagcacaagggccgggggactgtcaggaccgttaccaaaaccgtctcaaatgattctttcttcaacttcttcgcaccccctgaggttcccgagtccggagacctggacgacgatgccgaagccatccttgctgccgacttcgaaattggccacttcctgcgcgaacggattattccaaggagtgttctctacttcacgggcgaagctatagaggatgacgacgacgattatgatgaagagggcgaggaagccgacgaggagggggaggaagagggtgacgaggagaatgacccagactacgaccccaaaaaggatcagaacccggcggagtgtaagcaacaatag

SEQ ID NO: 292561 - DNA, 987 bp, Artificial Sequence
  derived and/or modified sequence
atggccgacatcgacaacctgccccgggtggtgaagcggcgggtgaacgcactgaagaatctgcaggttaagtgtgcacagatagaagccaagttctacgaggaagtgcatgatctggagcgcaagtacgcagtcctgtaccagcccctattcgacaagagatttgaaattattaacgcaatctatgaaccgactgaagaggagtgcgaatggaaacccgacgaagaagacgagatctcggaggaactaaaggaaaaggcgaagattgaggacgagaaaaaggacgaggaaaaagaggatccgaaaggaattccggagttttggctaaccgtgttcaagaacgtggacttattgtccgatatggtacaagaacacgatgagcctatattgaagcatctgaaggatatcaaggtcaaattctccgatgccggacagcctatgtcctttgtgcttgaatttcacttcgagccgaacgagtatttcacaaatgaggtgctgaccaaaacctaccgcatgcggagtgagcccgatgactctgatccattctcttttgacggtcccgagatcatgggctgtaccgggtgccagatagactggaagaaggggaaaaacgtgactctcaagactatcaaaaaaaaacagaaacacaaggggcggggtaccgtcagaactgtgaccaaaacagtgtccaacgattctttctttaacttttttgccccacccgaggtgccggagtccggagacctggatgacgacgccgaggccatcctggcagccgattttgaaattggtcattttttgcgagaacgcatcattcccaggtcagtgctctattttaccggagaggccatagaagacgatgacgatgattacgatgaggagggagaggaggctgacgaagagggtgaggaagagggggacgaggaaaacgatccggactatgacccaaaaaaggaccaaaatccagctgagtgcaaacaacaatag

SEQ ID NO: 292562 - DNA, 1597 bp, Artificial Sequence
  derived and/or modified sequence
gtgctgacgctaattgtatatgagcgcgagcggcgggctcttgggtcttttttagcgccatctgctcgcggcgccgcctcctgctcctcccgctgctgctgccgctgccgccctgagtcactgcctgcgcagctccggccgcctggctccccatactagtcgccgcctgcctagggtagttaaaagacgagtgaatgctctcaaaaacctgcaagttaaatgtgcacagatagaagccaaattctatgaggaagttcacgatcttgaaaggaagtatgctgttctctatcagcctctatttgataagcgatttgaaattattaatgcaatttatgaacctacggaagaagaatgtgaatggaaaccagatgaagaagatgagatttcggaggaattgaaagaaaaggccaagattgaagatgagaaaaaagatgaagaaaaagaagaccccaaaggaattcctgaattttggttaactgtttttaagaatgttgacttgctcagtgatatggttcaggaacacgatgaacctattctgaagcacttgaaagatattaaagtgaagttctcagatgctggccagcctatgagttttgtcttagaatttcactttgaacccaatgaatattttacaaatgaagtgctgacaaagacatacaggatgaggtcagaaccagatgattctgatcccttttcttttgatggaccagaaattatgggttgtacagggtgccagatagattggaaaaaaggaaagaatgtcactttgaaaactattaagaagaagcagaaacacaagggacgtgggacagttcgtactgtgactaaaacagtttccaatgactctttctttaacttttttgcccctcctgaagttcctgagagtggagatctggatgatgatgctgaagctatccttgctgcagacttcgaaattggtcactttttacgtgagcgtataatcccaagatcagtgttatattttactggagaagctattgaagatgatgatgatgattatgatgaagaaggtgaagaagcggatgaggaaggggaagaagaaggagatgaggaaaatgatccagactatgacccaaagaaggatcaaaacccagcagagtgcaagcagcagtgaagcaggatgtatgtggccttgaggataacctgcactgtaatagcctaaacacaactcttatttacttacagccttatgtttttgtattttcttggtagactaggtaatttttttttaaaggacaggaaactgatattttaaagaccaatttgttctacctagcattttaactagtttttctgccagctatgttgaatgcacaaattctgtcacgcatgttcattcattgctacataatttggttcttctggaatatttttatgtagctcttggagtacagctatgaaaattaacaactgttaaaggaaataccttttttttttttttgtaattttttccttgaagaaccaaagtattttttcagctggttgttgaatagggttaagtccgcttggattagctgtgcctttcattactttgttacagaaatgcagtgacttatactaagacaatttattgttt

SEQ ID NO: 292563 - DNA, 1967 bp, Artificial Sequence
  derived and/or modified sequence
gctgacgctaattgtatatgagcgcgagcggcgggctcttgggtcttttttagcgccatctgctcgcggcgccgcctcctgctcctcccgctgctgctgccgctgccgccctgagtcactgcctgcgcagctccggccgcctggctccccatactagtcgccgatatttggagttcttacaacatggcagacattgacaacctgcctagggtagttaaaagacgagtgaatgctctcaaaaacctgcaagttaaatgtgcacagatagaagccaaattctatgaggaagttcacgatcttgaaaggaagtatgctgttctctatcagcctctatttgataagcgatttgaaattattaatgcaatttatgaacctacggaagaagaatgtgaatggaaaccagatgaagaagatgagatttcggaggaattgaaagaaaaggccaagattgaagatgagaaaaaagatgaagaaaaagaagaccccaaaggaattcctgaattttggttaactgtttttaagaatgttgacttgctcagtgatatggttcaggaacacgatgaacctattctgaagcacttgaaagatattaaagtgaagttctcagatgctggccagcctatgagttttgtcttagaatttcactttgaacccaatgaatattttacaaatgaagtgctgacaaagacatacaggatgaggtcagaaccagatgattctgatcccttttcttttgatggaccagaaattatgggttgtacagggtgccagatagattggaaaaaaggaaagaatgtcactttgaaaactattaagaagaagcagaaacacaagggacgtgggacagttcgtactgtgactaaaacagtttccaatgactctttctttaacttttttgcccctcctgaagttcctgagagtggagatctggatgatgatgctgaagctatccttgctgcagacttcgaaattggtcactttttacgtgagcgtataatcccaagatcagtgttatattttactggagaagctattgaagatgatgatgatgattatgatgaagaaggtgaagaagcggatgaggaaggggaagaagaaggagatgaggaaaatgatccagactatgacccaaagaaggatcaaaacccagcagagtgcaagcagcagtgaagcaggatgtatgtggccttgaggataacctgcactgtaatagcctaaacacaactcttatttacttacagccttatgtttttgtattttcttggtagactaggtaatttttttttaaaggacaggaaactgatattttaaagaccaatttgttctacctagcattttaactagtttttctgccagctatgttgaatgcacaaattctgtcacgcatgttcattcattgctacataatttggttcttctggaatatttttatgtagctcttggagtacagctatgaaaattaacaactgttaaaggaaataccttttttttttttttgtaattttttccttgaagaaccaaagtattttttcagctggttgttgaatagggttaagtccgcttggattagctgtgcctttcattactttgttacagaaatgcagtgacttatactaagacaatttattgtttaaaaaaaaaattggcaagacaactatatggttaagaatttccagtatgaccacacccaataactgttattagagtgttaatggattattgtgttttaggtgacatagttaactgtaaagtaacctgactcagtatagttactggtaccacagtgaggtgaataaaacgggattttcagaagttagcctgaatttaactgtatttttaaatttaacctccattaactaagcatcttttctttgtggtagggtctaccttctgcttccctggaaaggatgaatttacatcatttgacaagcctattttcaagttatttgttgtttgtttgcttgttt

SEQ ID NO: 292564 - DNA, 627 bp, Artificial Sequence
  derived and/or modified sequence
atggtacaagagcacgatgagcctattctgaaacatttgaaagatatcaaggtcaagtttagcgatgccggacagccaatgtcatttgtcctcgaattccatttcgagcctaatgagtacttcaccaatgaagttctgactaaaacataccgcatgagatccgaacccgatgactctgatccgttttctttcgatggaccagaaattatgggctgcactgggtgccagattgactggaaaaaaggtaaaaatgtgacgctcaagacgattaagaagaagcaaaagcacaaaggccgagggaccgtgcgcaccgttaccaagacagttagcaatgattcattcttcaactttttcgccccaccggaggtgcctgagtccggggatctagatgacgatgccgaagcaattctggctgctgattttgaaattggtcattttctgagagagcgcattatcccacggtctgtgctgtacttcactggcgaggcaatcgaggacgatgatgatgactatgacgaggaaggagaggaggccgatgaggagggggaggaggagggggacgaggagaacgaccccgactacgaccccaagaaggaccagaatcccgcagaatgcaagcaacaatag

SEQ ID NO: 292565 - DNA, 987 bp, Artificial Sequence
  derived and/or modified sequence
atggccgatattgacaatctccccagagtggtgaagcgcagagtcaacgccctgaagaacctccaggtcaagtgcgcccagatagaagcaaagttctacgaggaagtgcatgatctcgagcgtaaatacgccgtgctgtatcaaccactgtttgacaagcgcttcgagatcatcaatgcaatctacgagccaacagaggaagagtgcgagtggaagcctgacgaagaggatgaaatttccgaggagctcaaagaaaaagcaaagatcgaggacgagaagaaggatgaggagaaagaagacccgaaggggatccccgagttctggctgacagtgtttaagaatgtggacctacttagtgacatggtccaggagcacgacgaaccaattcttaaacatttgaaagacatcaaagtgaaatttagcgatgccggacagccgatgagttttgtcctcgaattccacttcgaaccaaatgagtattttaccaatgaagtccttaccaagacctaccgcatgaggagcgaaccagatgactccgaccctttttcctttgatggcccagagataatgggctgcaccggctgtcagatcgactggaaaaagggtaaaaacgttacactaaagacaattaagaaaaaacagaagcataaaggtaggggaacagtgagaactgttactaaaactgtctccaacgacagcttcttcaatttctttgccccacctgaggtgcccgaatcaggcgacctagatgatgacgcagaggccattctggcagcagattttgagatcggacacttcctgagggagcggatcattcccagatctgttctgtacttcacaggagaggctatcgaagatgatgatgacgactacgacgaggagggtgaagaagccgacgaggaaggcgaagaggaaggagatgaggagaacgatcctgattatgaccctaagaaagaccaaaaccctgcggagtgtaaacagcagtag

SEQ ID NO: 292566 - DNA, 627 bp, Artificial Sequence
  derived and/or modified sequence
atggtgcaggagcacgacgagcccatcctgaagcacctgaaggacatcaaggtgaagttcagcgacgccggccagcccatgagcttcgtgctggagttccacttcgagcccaacgagtacttcaccaacgaggtgctgaccaagacctacagaatgagaagcgagcccgacgacagcgaccccttcagcttcgacggccccgagatcatgggctgcaccggctgccagatcgactggaagaagggcaagaacgtgaccctgaagaccatcaagaagaagcagaagcacaagggcagaggcaccgtgagaaccgtgaccaagaccgtgagcaacgacagcttcttcaacttcttcgccccccccgaggtgcccgagagcggcgacctggacgacgacgccgaggccatcctggccgccgacttcgagatcggccacttcctgagagagagaatcatccccagaagcgtgctgtacttcaccggcgaggccatcgaggacgacgacgacgactacgacgaggagggcgaggaggccgacgaggagggcgaggaggagggcgacgaggagaacgaccccgactacgaccccaagaaggaccagaaccccgccgagtgcaagcagcagtag

SEQ ID NO: 292567 - DNA, 987 bp, Artificial Sequence
  derived and/or modified sequence
atggccgacatcgacaacctgcccagagtggtgaagagaagagtgaacgccctgaagaacctgcaggtgaagtgcgcccagatcgaggccaagttctacgaggaggtgcacgacctggagagaaagtacgccgtgctgtaccagcccctgttcgacaagagattcgagatcatcaacgccatctacgagcccaccgaggaggagtgcgagtggaagcccgacgaggaggacgagatcagcgaggagctgaaggagaaggccaagatcgaggacgagaagaaggacgaggagaaggaggaccccaagggcatccccgagttctggctgaccgtgttcaagaacgtggacctgctgagcgacatggtgcaggagcacgacgagcccatcctgaagcacctgaaggacatcaaggtgaagttcagcgacgccggccagcccatgagcttcgtgctggagttccacttcgagcccaacgagtacttcaccaacgaggtgctgaccaagacctacagaatgagaagcgagcccgacgacagcgaccccttcagcttcgacggccccgagatcatgggctgcaccggctgccagatcgactggaagaagggcaagaacgtgaccctgaagaccatcaagaagaagcagaagcacaagggcagaggcaccgtgagaaccgtgaccaagaccgtgagcaacgacagcttcttcaacttcttcgccccccccgaggtgcccgagagcggcgacctggacgacgacgccgaggccatcctggccgccgacttcgagatcggccacttcctgagagagagaatcatccccagaagcgtgctgtacttcaccggcgaggccatcgaggacgacgacgacgactacgacgaggagggcgaggaggccgacgaggagggcgaggaggagggcgacgaggagaacgaccccgactacgaccccaagaaggaccagaaccccgccgagtgcaagcagcagtag

SEQ ID NO: 292568 - protein, 191 aa, Artificial Sequence
  derived and/or modified sequence
MVTDQFGMIGLLTFIRAAETDPGMVHLALGSDLTTLGLNLNSPENLYPKFASPWASSPCRPQDIDFHVPSEYLTNIHIRDKLAAIKLGRYGEDLLFYLYYMNGGDVLQLLAAVELFNRDWRYHKEERVWITRAPGMEPTMKTNTYERGTYYFFDCLNWRKVAKEFHLEYDKLEERPHLPSTFNYNPAQQAF

SEQ ID NO: 292569 - DNA, 576 bp, Artificial Sequence
  derived and/or modified sequence
atggtgaccgatcagtttggtatgatcggacttcttacattcattagggcagctgaaactgaccccggaatggtccatctggctctgggatccgatctaactactttgggactgaatctgaacagccccgaaaacctttacccaaaattcgcctcaccgtgggccagctccccttgtagaccacaagatattgatttccacgtcccaagcgaatatttgactaacatccatatccgtgataaactcgcagctataaaattagggcgatatggtgaggatctcctgttctatttatactatatgaacgggggcgatgtgctgcagctccttgccgccgttgagcttttcaaccgggattggcgctaccataaggaggagcgggtgtggataacaagggcgcctggaatggagccgacgatgaaaaccaacacgtatgagagaggaacatactacttctttgattgtctcaactggagaaaggtcgccaaggaattccacctagaatatgataaattagaggaacggccgcatttgccgtccaccttcaactacaatcccgcacaacaggctttttag

SEQ ID NO: 292570 - DNA, 576 bp, Artificial Sequence
  derived and/or modified sequence
atggtgacagaccagtttggcatgattggcctgctgaccttcatccgggctgctgagacagaccccggcatggtgcacctggccctgggcagtgacctgaccaccctgggcctgaacctgaacagccctgagaacctgtaccccaagtttgccagcccctgggccagcagcccctgccggccccaggacatcgacttccacgtgcccagcgagtacctgaccaacatccacatccgggacaagctggccgccatcaagctgggccgctacggggaggacctgctcttctacctgtactacatgaatggaggagatgtgctgcagctgctggccgctgtggagctgttcaacagagactggagataccacaaggaggagcgggtgtggatcacccgggcccctggcatggagcccaccatgaagaccaacacctatgagcggggcacctactacttctttgactgcctgaactggaggaaggtggccaaggagttccacctggagtatgacaagctggaggagcggccccacctgcccagcaccttcaactacaacccagcccagcaggccttctag

SEQ ID NO: 292571 - DNA, 576 bp, Artificial Sequence
  derived and/or modified sequence
atggtgaccgaccagttcggcatgatcggcctgctgaccttcatcagggcagcggagacagaccctggaatggtccaccttgctctgggctctgatctaaccacactgggactgaatctaaactctcctgagaatctgtatcccaagtttgctagtccttgggcatctagtccatgccgccctcaagatattgacttccatgtgccttccgaatacttaactaatatccacatacgcgataagttagctgctattaaacttggaaggtatggcgaggatctcctgttctacttatactatatgaatggcggagacgtgttgcaactactggcagccgtcgagcttttcaacagagactggcggtatcacaaggaggagagagtttggatcacaagagccccaggcatggaacctacgatgaagacaaatacctacgaaaggggcacttactacttcttcgattgcctaaactggcggaaagtggccaaggagtttcacctcgaatatgataaactggaggagcgaccacacctgccgtcgacatttaattacaaccccgcccagcaggcattttag

SEQ ID NO: 292572 - DNA, 576 bp, Artificial Sequence
  derived and/or modified sequence
atggtcaccgatcaatttggcatgatcggactgttgacatttatccgagctgcagagacagatcctgggatggtgcacctagcacttgggagcgatctgactacactcggcctcaatctgaattctcctgagaacctctatcccaaattcgcaagcccatgggctagcagcccttgtcggccacaggatatcgacttccacgtgccatccgaatacttaaccaacatccatattcgcgataagctcgctgctattaagttaggccgttatggggaggacctgctattttacctgtattacatgaatggaggcgacgtgcttcagttgctcgcagccgtggagctattcaatcgggactggcggtaccacaaagaggaacgcgtctggatcacacgggcaccaggcatggaacctacaatgaagactaatacctatgagagagggacttactatttcttcgactgtctaaattggaggaaagtggccaaagagttccatctcgaatatgacaagctcgaggagcgacctcaccttccctctaccttcaattacaaccccgctcagcaggccttctag

SEQ ID NO: 292573 - DNA, 4753 bp, Artificial Sequence
  derived and/or modified sequence
gtcaacaaagtaatcttgagataacagttactgtttgagattcttacagttgtgaaatttggagaaaactaaaaattaattgggaagtggcaaaataaattgaaaatggtaaaacaaaaattaaaagctatagcgcaggctaaaaggacggtagaaagttttcttcaaaaattaagaacccaaggttataagaatactaaaaagttaagaaattgagatgattaaaatagacaaagtagagaagttgggttaaattttaatttttaaaggaagccagctgattgttttaacttaaaatgaacaaaaatacatttaatttattctatatatatttattgagcgcctactgtgtaataggtaatataaacttctgggctttgtatcatatttctatatttcctatccatttaccatatatgggaaccctactgccaccctgttgtaccccaccctcaaaatgcgcacatgcgcacgcacacacgtttgtatatgaaagcggtcaattacaggtggaagtcctcagggcttctgcttcactgcctgtgcctcagctatatctttctggccatttgcaggaggcactatcattgtcaccatttgtgtgtaaccgaagcttcaagcattctagatataacctccatctgagcataatgaaaagacaagttatatcgtaacaatctccctcttgttagctcacaagctataattttaggttaccatcttccatgggggaaatatatgctttttattctctttgttacatctctaggatttggggtttctattatgctggttgcgtattcctttgctaaattgttcatggaattctttgacatgaaatcaatctgcaagtatcttttgagcacctacatacacctagtacagtgccgtgcattatttaggaagaaggcgcaatcatttcgaattatattatggttggtttttataatctcttaaaaaatatttgtagaatcaataaccagtgtcctttcttattatttagacggaagtgaaaatgtgacaggattggacctttcagatttcccagcattagcagaccgaaacaggagggaaggaagtggtaacccaactccattaataaaccccttggctggaagagctccttatggtaattaagctttttaatgatggccagtagaaagtttccattgtatgtgcacacacatatacatttacatgtacgtatacatatgcttgtgtgtgtacacatgtatgtttgcattttctaatcaggttagtgtaattttttcagaattgatatattagaagtgatttttcttcccagaataccatgatagcaaagttaaatgggaaaactttgtacaaaaacccaagaggaagtcctcattggtattcagaagttattttcttctgttatccctgccttagtttaccttaagtgttttattttgtggtctgccttttctctccttaattgatcacacattttttcaaaataatatattcctggtgattaataatgactgactatacattgaagatgtttttctgagccaaggtttttctcaacctccacactgttgacatttgggccaggtaattctttgtagagaggagatgtggggggctattgtgtttatacagaatgttaagcaatattcctggccttggcctacaagatgctagtagcactttctgtttctaacccccatagcctctattgtgacagacacaaatgttttcagacattggcagatgtcacctggggaaaaaaaattgccccctgttgaaaaccattgctcatgggtcatgtatagcttatgcagactcttggtctccgttaatatccttcatcaccctttttcactgtctctaatagataagaaatttggctaatcagggataaatggaaataaaggaggggaaacatatgcaataacaatataacaatgtagatatgaaaattctgtgacagcaatgtagctatactatttttatcacatagtttttttcttttgggaaaacctgatagagaccagtaacaaaacggtgaatttaaaagaatcagttcatccattattttaagatagaattaatatttgatcacattttcaaccaagaaggatttctgtgccattcagatatgaatacaaataacagtatatgaagaagggaaacatttattgtttatattctaaagtttccaaattagtctccccaaaataaaaaaaaaaatgatctgccctggaagttgagtacctagctacttgattctcagttcagactctaatgtttttaacctttcctcataggtccattttttcatccctttaatcattcccgttgctctccttggaccatctctagtttctccatatcgttcttgaattgtggagccccaaactggatattgttctccaataagggcccgactaatgccaagtatagtgggaggattatttcccagttcttgcatgttttacatctataacatggagtccaagaaaatctgaaataatatggagttgttttataattgattgcaatttgctcactctgtaagtcgctttcaagtagaatactgacatattcttttaaattttattttgttcatttgtatttgagagttaactggtatttataatatctagtcaaatatttaaataaaacaagcttttaaaccaaaattgttaataattaatccaatatcaaattaaatttttaagcacctacgcatgacatggattactgttgatttcccttgtattattttgtatgttgagttattaatcagtaaatgaaaatttagttcttcattgttaccctggatactaattttttgaagtacgctttcatagcattaaaaaaaagaaaccttttggtgtattatcatgaggaaagttaactttataatctgtagcaaaatatcataaatatcaattgcaattctccggattattttcattacatagttggaatggtaacaaaaccagcaaatgaacaatcccaggacttctcaatacacaatgaagattttccagcattaccaggctccagctataaagatccaacatcaagtaatgatgacagtaaatctgtaagtaactgagaagtgtgtatgtgagtgatgtagtttttcccttcagatttctcttatattaacaattacttactaaatactattacaaaactgttttatcttgatatctgtaataacctaacttctgaagaatgtggaaaagctttataacttagaagatagcctatttttttcctatttcatataggtttgcaaatttctgttgaacttctcagagttaatttagacttttattgtagtccctgtcagctggatcccatgaagtttgataatatagccttctaaggagctgtgtttttcttgagtaagttttctccttgaagaatttatacacatttttatacctgtgttgattcaaccaactcagcttcttctttctgacttaacaaatatgtttatttcttccacatttcactgaaaatagcttttctctgtgtgtgatgggagtttatatattattaaaataattgataaagaagatcggtaagaattaaaataagtacaaagttttaaagcttgtatgtctaacttatcttcaaggtagctttggtgattttaggtaatatactatatttagtttctcttttacatgaaagcattgaggagtgtaacttcaagtgtatcccaaagcataaagacctgagaaagagatagatttttttttttctgtgactgaagatctgagataaataagatattttcccttgatttctttttctttaaatactcaaatgtggatgatataggatttatttgtataccatggaacaatgatggaaacaattttctatagaacttgaaaaacaggtaataatttaactaccaatttaaatgtaataaagaataaatagcaaggtattaatatgtgaacttgaatttgtatacttaacaaattttaatgtcacatttaatttttttcatgctagaatttgaatacatctggcaagacaacttcaagtacagatggacccaaattccctggagataaaagttcaacaacacaaaataataaccagcagaaaaaagggatccaggtgttacctgatggtcgggttactaacattcctcaagggatggtgacggaccaatttggaatgattggcctgttaacatttatcagggcagcagagacagacccaggaatggtacatcttgcattaggaagtgacttaacaacattaggcctcaatctgaactctcctgaaaatctctaccccaaatttgcgtcaccctgggcatcttcaccttgtcgacctcaagacatagacttccatgttccatctgagtacttaacgaacattcacattagggataagctggctgcaataaaacttggccgatatggtgaagaccttctcttctatctctattacatgaatggaggagacgtattacaacttttagctgcagtggagctttttaaccgtgattggagataccacaaagaagaacgagtatggattaccagggcaccaggcatggagccaacaatgaaaaccaatacctatgagaggggaacatattacttctttgactgtcttaactggaggaaagtagctaaggagttccatctggaatatgacaaattagaagaacggcctcacctgccatccaccttcaactacaaccctgctcagcaagccttctaaaaaaaaaaaaaaaaaaaaaaaa

SEQ ID NO: 292574 - DNA, 576 bp, Artificial Sequence
  derived and/or modified sequence
atggtgaccgaccagttcggcatgatcggcctgctgaccttcatcagagccgccgagaccgaccccggcatggtgcacctggccctgggcagcgacctgaccaccctgggcctgaacctgaacagccccgagaacctgtaccccaagttcgccagcccctgggccagcagcccctgcagaccccaggacatcgacttccacgtgcccagcgagtacctgaccaacatccacatcagagacaagctggccgccatcaagctgggcagatacggcgaggacctgctgttctacctgtactacatgaacggcggcgacgtgctgcagctgctggccgccgtggagctgttcaacagagactggagataccacaaggaggagagagtgtggatcaccagagcccccggcatggagcccaccatgaagaccaacacctacgagagaggcacctactacttcttcgactgcctgaactggagaaaggtggccaaggagttccacctggagtacgacaagctggaggagagaccccacctgcccagcaccttcaactacaaccccgcccagcaggccttctag

SEQ ID NO: 292575 - protein, 340 aa, Artificial Sequence
  derived and/or modified sequence
MATGGYRTSSGLGGSTTDFLEEWKAKREKMRAKQNPPGPAPPGGGSSDAAGKPPAGALGTPAAAAANELNNNLPGGAPAAPAVPGPGGVNCAVGSAMLTRAAPGPRRSEDEPPAASASAAPPPQRDEEEPDGVPEKGKSSGPSARKGKGQIEKRKLREKRRSTGVVNIPAAECLDEYEDDEAGQKERKREDAITQQNTIQNEAVNLLDPGSSYLLQEPPRTVSGRYKSTTSVSEEDVSSRYSRTDRSGFPRYNRDANVSGTLVSSSTLEKKIEDLEKEVVRERQENLRLVRLMQDKEEMIGKLKEEIDLLNRDLDDIEDENEQLKQENKTLLKVVGQLTR

SEQ ID NO: 292576 - protein, 76 aa, Artificial Sequence
  derived and/or modified sequence
MATGGYRTSSGLGGSTTDFLEEWKAKREKMRAKQNPPGPAPPGGGSSDAAGKPPAGALGTPAAAAANELNNNLPGG

SEQ ID NO: 292577 - protein, 64 aa, Artificial Sequence
  derived and/or modified sequence
MATGGYRTSSGLGGSTTDFLEEWKAKREKMRAKQNPPGPAPPGGGSSDAAGKPPAGALGTPAAA

SEQ ID NO: 292578 - DNA, 1967 bp, Artificial Sequence
  derived and/or modified sequence
ctgtcctgggattgcctggagctccgcaccgcgagtttgccgcggcactttccgcgcggcggaagagcgcgcgccagcttcggcacacctgggagccggatcccagccctacgcctcgtcccctacaagctcctccaagccccgccggctgctgtgggagcggcggccgtccctctcctggaggtcgtctcctggcatcctcggggccgcaggaaggaagaggaggcagcggccggagccctggtgggcggcctgaggtgagagcccgaccggcccctttgggaatatggcgaccggtggctaccggaccagcagcggcctcggcggcagcaccacagacttcctggaggagtggaaggcgaaacgcgagaagatgcgcgccaagcagaaccccccgggcccggcccccccgggagggggcagcagcgacgccgctgggaagccccccgcgggggctctgggcaccccggcggccgccgctgccaacgagctcaacaacaacctcccgggcggcgcgccggccgcacctgccgtccccggtcccgggggcgtgaactgcgcggtcggctccgccatgctgacgcgggcggcccccggcccgcggcggtcggaggacgagcccccagccgcctctgcctcggctgcaccgccgccccagcgtgacgaggaggagccggacggcgtcccagagaagggcaagagctcgggccccagtgccaggaaaggcaaggggcagatcgagaagaggaagctgcgggagaagcggcgctccaccggcgtggtcaacatccctgccgcagagtgcttagatgagtacgaagatgatgaagcagggcagaaagagcggaaacgagaagatgcaattacacaacagaacactattcagaatgaagctgtaaacttactagatccaggcagttcctatctgctacaggagccacctagaacagtttcaggcagatataaaagcacaaccagtgtctctgaagaagatgtctcaagtagatattctcgaacagatagaagtgggttccctagatataacagggatgcaaatgtttcaggtactctggtttcaagtagcacactggaaaagaaaattgaagatcttgaaaaggaagtagtaagagaaagacaagaaaacctaagacttgtgagactgatgcaagataaagaggaaatgattggaaaactcaaagaagaaattgatttattaaatagagacctagatgacatagaagatgaaaatgaacagctaaagcaggaaaataaaactcttttgaaagttgtgggtcagctgaccaggtagaggattcaagactcaatgtggaaaaaatattttaaactactgattgaatgttaatggtcaatgctagcacaatattcctatgctgcaatacattaaaataactaagcaagtatatttatttctagcaaacagatgtttgttttcaaaatacttctttttcattattggttttaaaaaagcattatccttttatctcacaaataagtaatatctttcagttattaaatgatagataatgcctttttggttttgtgtggtattcaactaatacatggtttaaagtcacagccgtttgaatatattttatcttggtagtacattttctcccttaggaatatacatagtctttgtttacatgagttcaaatacttttgggatgttaccttcacatgtcctattactgatgtgtgcaaccttttatgtgttgatgactcactcataaaggtttttgtctactgtcatttgttctttccacttattctaagcatttagagtaatagagtcatacttttttataacagcaaccttttaaaaggaaagctcttataaagtcactgtcatgttttagttgactaaatataaatttaagagaatacttgaattgtgctatagtaaataaaaatttactattttgtgtttgaaaaaaaaaaaaaaaaaa

SEQ ID NO: 292579 - DNA, 1023 bp, Artificial Sequence
  derived and/or modified sequence
atggctacgggtggctaccgaacttctagcggactaggaggcagtacgacggactttctcgaagagtggaaagcaaaaagagaaaagatgagagccaagcaaaacccgcccggcccagcccctccggggggcggttctagcgatgcagcgggaaagccgccagctggggctctggggacgccggccgccgccgctgcaaacgagctgaataataacctcccagggggcgccccggccgccccagcggtcccaggccctgggggggtcaactgtgccgtgggatctgcaatgctgacccgggccgcccctggtccccgtaggagcgaagacgagcccccagcagcgagcgcctccgcggcacccccccctcagcgggacgaagaagagcccgacggggttcctgaaaagggcaagtcctcaggccctagtgcccgcaagggcaagggccaaatagaaaaaaggaaactgagggaaaagcggcggagtaccggcgtcgtcaacattccagcagcagaatgcctcgatgagtatgaggacgacgaagcaggtcaaaaggagcgcaagcgggaagacgcgatcacccagcagaatactattcaaaacgaagccgtgaaccttttagacccaggatcctcatatctgctgcaggagcctccaagaacagtgtccgggagatacaaatctactacctcagtctcagaggaggatgtgtctagtcggtactctagaacggaccgctcaggtttcccccgctataatagggacgccaacgtttccggcactctggtttcttcctctacgctggagaaaaagattgaagatctcgagaaggaggtagtaagggagcggcaagagaatctgcgactggtccggctgatgcaagataaagaagaaatgatcggaaaactgaaggaggaaatcgatctattgaacagggacttggatgatatcgaagatgagaatgaacagctgaagcaggagaacaagacattactgaaagtggtcggacagttgacccgatag

SEQ ID NO: 292580 - DNA, 1023 bp, Artificial Sequence
  derived and/or modified sequence
atggccactggaggctaccgcaccagcagcggcctgggcggcagcaccacagacttcctggaggagtggaaggccaagcgggagaagatgagggccaagcagaaccccccaggccctgcccctcctgggggcggcagcagtgatgctgctgggaagcccccagctggggccctgggcaccccagctgctgctgctgccaatgagctgaacaacaacctgcccggcggggccccagctgccccagctgtgcccggccctgggggcgtgaactgtgctgtgggcagcgccatgctgaccagggctgcccctggcccccggcggagtgaagatgagcccccagctgccagcgccagcgctgcccccccaccccagagagatgaggaggagccagatggagtgcctgagaagggcaagagcagcggccccagcgccaggaagggcaagggccagatcgagaagaggaagctgcgggagaagaggaggagcactggagtggtgaacatcccagctgctgagtgcctggatgaatatgaagatgatgaggccggccagaaggagaggaagcgggaggatgccatcacccagcagaacaccatccagaatgaagctgtgaacctgctggaccccggcagcagctacctgctgcaggagccccccaggacagtgtctggccgctacaagagcaccacctctgtgtctgaagaagatgtgagcagccgctacagcaggacagacagaagtggcttcccccgctacaacagagatgccaacgtgtctggcaccctggtgagcagcagcaccctggagaagaagattgaggacctggagaaggaggtggtgcgggagcggcaggagaacctgcggctggtgcggctgatgcaggacaaggaggagatgattggcaagctgaaggaggagattgacctgctgaacagagacctggatgacattgaagatgaaaatgagcagctgaagcaggagaacaagaccctgctgaaggtggtgggccagctgaccaggtag

SEQ ID NO: 292581 - DNA, 1023 bp, Artificial Sequence
  derived and/or modified sequence
atggccaccggcggctaccggaccagcagcggcctgggcggcagcaccacagacttcctggaggagtggaaagcgaagcgtgaaaaaatgcgggctaaacagaatcctccagggcccgccccacctggaggaggttcctcagacgccgcagggaagcctcccgctggagccctgggaacaccagcagctgctgctgctaatgagctcaacaataatctgcccgggggtgcccccgctgcacctgctgtgccaggccccggcggcgtgaactgcgcggtcggcagtgccatgttaacacgcgcagctccaggccctcggaggtccgaagacgaacccccggccgcttccgctagtgcagccccccctccccagcgggatgaggaagaaccggatggagttccagagaaaggcaaaagcagtggcccttctgcccgcaagggtaaaggccagatcgaaaaacgaaaactgagagaaaaacgacgcagtactggagtagttaacatccccgctgcggaatgtcttgatgaatacgaagacgatgaagccggccagaaagagcggaaaagagaagacgctatcacacagcagaatactatccaaaatgaagctgtaaatcttcttgaccccgggtctagctacctgctgcaggagcccccacgcaccgtgagcggacggtataaatccacaacttcagtgagcgaggaggatgttagtagtcggtattctcgtaccgaccggtcaggatttccccggtacaatcgcgacgccaacgttagtgggaccctagtgtcctcctctactctggagaagaagatagaggatctagagaaagaggtagttagagagaggcaggaaaatttgcgccttgttcgactgatgcaggataaggaggagatgatcggcaagctgaaagaggaaatcgatctccttaatagggatttagacgacattgaggatgagaatgagcagctgaagcaggaaaacaaaaccttgttgaaagtggtcggtcagctaacccgttag

SEQ ID NO: 292582 - DNA, 1023 bp, Artificial Sequence
  derived and/or modified sequence
atggcgacaggtggataccggacttcaagcggcttaggcggatctacaactgacttcttagaggaatggaaagcaaaaagagaaaaaatgcgcgcaaaacagaatcccccagggcctgccccacccggaggaggatcatcagacgccgctggcaaacccccagcaggcgcactggggactcccgctgccgctgcagctaatgagttgaacaataacctgccaggcggagcccctgccgctcctgctgttccgggaccaggaggagttaattgtgctgtgggtagcgccatgctgacgcgcgctgccccaggccctagacgatctgaagacgagcctcccgcagcatctgccagcgccgctcctccaccgcagagggacgaagaggaaccggatggggtccccgagaaaggtaagagttccggaccaagtgcccgaaaggggaaagggcaaattgagaaacgaaaactgcgggagaaacgaaggagtactggggtcgtgaacatccctgccgcagaatgcttagacgagtacgaagatgacgaggccggacagaaagaacggaagcgcgaggacgctatcacacagcagaatacgatccaaaatgaggccgttaatctgctagaccctggctctagttacctcctccaagaaccaccgagaacagtcagcggtcggtacaagtccactacctccgtgtctgaggaggacgtttcaagtcgttacagccgaacagaccgcagcggattcccgaggtacaatagagatgcaaatgtgtctggtacactggtgtccagttcaactctcgagaagaagattgaggatttggaaaaagaggtggtgagggagcgacaggaaaatctgagactagtgagactgatgcaagataaggaggagatgattggcaagctgaaggaagagatcgacttgttgaatcgcgacctcgatgatatcgaagatgaaaatgaacagctgaaacaggaaaacaagacattgctgaaagtggtaggccagctcactcggtag

SEQ ID NO: 292583 - DNA, 9129 bp, Artificial Sequence
  derived and/or modified sequence
ttttccgctcgtgcttcggcgccgctcggctcccttcccgcccctggctccctccctccctccctccctccttcttctccctccctcctgtcctgggattgcctggagctccgcaccgcgagtttgccgcggcactttccgcgcggcggaagagcgcgcgccagcttcggcacacctgggagccggatcccagccctacgcctcgtcccctacaagctcctccaagccccgccggctgctgtgggagcggcggccgtccctctcctggaggtcgtctcctggcatcctcggggccgcaggaaggaagaggaggcagcggccggagccctggtgggcggcctgaggtgagagcccgaccggcccctttgggaatatggcgaccggtggctaccggaccagcagcggcctcggcggcagcaccacagacttcctggaggagtggaaggcgaaacgcgagaagatgcgcgccaagcagaaccccccgggcccggcccccccgggagggggcagcagcgacgccgctgggaagccccccgcgggggctctgggcaccccggcggccgccgctgccaacgagctcaacaacaacctcccgggcggcgcgccggccgcacctgccgtccccggtcccgggggcgtgaactgcgcggtcggctccgccatgctgacgcgggcggcccccggcccgcggcggtcggaggacgagcccccagccgcctctgcctcggctgcaccgccgccccagcgtgacgaggaggagccggacggcgtcccagagaagggcaagagctcgggccccagtgccaggaaaggcaaggggcagatcgagaagaggaagctgcgggagaagcggcgctccaccggcgtggtcaacatccctgccgcagagtgcttagatgagtacgaagatgatgaagcagggcagaaagagcggaaacgagaagatgcaattacacaacagaacactattcagaatgaagctgtaaacttactagatccaggcagttcctatctgctacaggagccacctagaacagtttcaggcagatataaaagcacaaccagtgtctctgaagaagatgtctcaagtagatattctcgaacagatagaagtgggttccctagatataacagggatgcaaatgtttcaggtactctggtttcaagtagcacactggaaaagaaaattgaagatcttgaaaaggaagtagtaagagaaagacaagaaaacctaagacttgtgagactgatgcaagataaagaggaaatgattggaaaactcaaagaagaaattgatttattaaatagagacctagatgacatagaagatgaaaatgaacagctaaagcaggaaaataaaactcttttgaaagttgtgggtcagctgaccaggtagaggattcaagactcaatgtggaaaaaatattttaaactactgattgaatgttaatggtcaatgctagcacaatattcctatgctgcaatacattaaaataactaagcaagtatatttatttctagcaaacagatgtttgttttcaaaatacttctttttcattattggttttaaaaaagcattatccttttatctcacaaataagtaatatctttcagttattaaatgatagataatgcctttttggttttgtgtggtattcaactaatacatggtttaaagtcacagccgtttgaatatattttatcttggtagtacattttctcccttaggaatatacatagtctttgtttacatgagttcaaatacttttgggatgttaccttcacatgtcctattactgatgtgtgcaaccttttatgtgttgatgactcactcataaaggtttttgtctactgtcatttgttctttccacttattctaagcatttagagtaatagagtcatacttttttataacagcaaccttttaaaaggaaagctcttataaagtcactgtcatgttttagttgactaaatataaatttaagagaatacttgaattgtgctatagtaaataaaaatttactattttgtgtttgaatattgaaaaattgaatcactttaactcctgaaaaacatacaattgtaatttcaatgtaaaatttcttatgtaggtactacctttttttatcgttccaaggtttgctagtgaacacaggatattttaaaagttttttattcttcgggcctggaaagtgtacaaagtcagtgtaggagaaaaaaatccatatttttatattagcatgcacactaaaaaccaaaatattattcatacttaaaacattcatacaaaacaatatgtaagcagaaatagtactaaaatactttgcctaatttctaagttgaagaataacactgggacacagttttttcatatgagagaatattccgctatttcaaatttaagggattttcttcctaacattgaaattttaaaaacagagttacttctaaataattatacagattttttcttctattaaatattattatttagaattgtttttgtattacatattcatgttaagaaccccgtcttcccttaaaatacattaaaattatgacatttttgctttgtgattgaatttcaaatagcagtatggtatccttttatctagttaatatatgaaagtggcttgaatatagtcaaatccattttaggtactctactgactttttccttcacttgccaagcccttttattgttcactgttagaaaaatagagaaggtgagacagctgggggaaaatgtggagtaaatgataatcaaatgttgaattctaaaagtctctacatttacctaggttggctttctcccccagttcagaagtttccagcttggccaatcatcagaatcacttgaggaacttagaaagaactccctggctgtagctcctatgtaggtttaggttgagactctggattccacaatttttaaaggttaccatctgaggtttctgatcatagtctacttttgaagcagctgctgctgtttctttattccattgaacaccctggaattgacataattttatctatcagcatttctccccttttagtttatttaataattaacccggtctccagggcagttttcatatgaccatgtgtatattcactgctcacgaaaaagtttaatgttagattaccaaatttaatatagttacagaattactgcataagggcttcccttcttggagactcttacccagcatgggaacagtgatctgcccacatgacagggtggtatgccaggcatagttaactgcttttggttgtgaggtactcatcttcctttagttacccttagttatgtggcacacatgtccttattgcctagttcgtcatccacactttggatcttgtgaaaatgctgttagtatccaaccttaaaatatattagtatatgggtttttattaaaagaattactttgaattttctatttaattcatatgtaaataaaggaacatttcatttcacttaaaaaaattatatcagttattaggctgggtgcagtggctcatgcctgtaatcccagcactttgggaggccaaggcgggtggattaccagagttcgggagtttgagaccagcttgaccaacatggagaaaccccgtctctactaaaaatacaaaattagccaggtgtggtggcgcatgcctgtaatcctggctactcaggaggctgaggcaggagaatcgcttgaaaacccaggagacagaggttgcggtgagctgagattgcgccattgtactccagcctgggcaagaagagcgaaactctgtctccaaaaaaaaaaaaaaaaaaattattaatacttttaaagactgagctgtttaagaattttttggggaacatttctagcagtgatttttttggcctttaatgatagcgtaaagacaggagccttacaacttaggcaaagcatttcacatgcagtccttcttccatctcaaaatatgtacttattttacatacagaattttacactaaccattgaaaaataaagtaggatctgctacagtttcacctgaaaatttataaaaagtgttgagattggtagaaggtagtttttaagtacatgtgcactaccctaaaagacttgtctattgtcaataaagtgttagtatttgtgaaattattattcctgttcagaaatactatttcttaaatctcctgggaatttgtggcataataaagcacattcaaagttctaatgtatttatgagctcattttcaaaatagtaagtttgtcatctttaaaatgaacatgacttgcctccttgatttctgaaatgaattaattgaagattgctatagtaatctttatttcatctttctagagttgttgacaattttattatacaacagttaccattagagaaggagggaagggcttttgggtgtgtatttataggtactaagggatttactaaatatagtagattagcactgtcacacttgttcaagtagtttcaaacatagaaaattaagtatcaggtatgtggagcaatgtagtttttttttttcttcagtttaaaaaatttttaattgtggtagaagcaatgtattcttaaggtgaaaaacctacctcggttacatgtggtttgtgttttttggattaatctggattttataattagaaataaaaatgtaagattttgaatccacttaatttcttgaaaatagtacaagtcagtgtaatagagaagcattcatatattcaacactgtaagacaaaacagcagagaccttggatttgataattgatctgatatcctggacagtattcatatgtacagtgataggtatctttctttggagttttttttttgtgcatatgtgtatagttttatgggttctgagttggtgaccagtaagttgcatgtagtgctggcacttacttaataactattcatgatattgttaataacttgttataggattgtattcccaattacagtctctaagattgtaattgatattatctgagaggtagtgtgacaactttcttttgttgttacattaagccgaaaacataatactaatagacaactaacagtttgcttatcaggcacatcaactaaggcacctccccccatgctaagtttctcctggatatatggaagttgattgtttcccagtttaaaaacttgaactaatatctcctaagaaaatctgagtccatattgtttttattttacttagctagaatctcatagcatgttaaagtcatatccttatccccactaaaaataactatgtctatgtgagaggaatatagtatgtgggagctgtattaaatactattacaggtgttacagaatctttaaataaatggacatggaccaactttccatctagtagtgtacgatctatatagtgcatgtcagtagcacaaaatgcagtcttagcattagcctgtctaatctgaatagtttactcaaaagtacttctttgtgttaagtattcagccactgtttttagatctagttaataggttctatttaatttgctacaacatttactgaatggtggagtgaaaaaactgatgcatactgggaaatatctaccattttttaaagataatgttaattaggaaaagaacacttttaaggaatttatagcagtgatgaaatgaattcagttatatcagatacaccaaactgttgatggtatttaaatgtgacttcaagttagtatttctgtatatattattgattactggtttgtttttagatatgtaagtctgttctaatctacagttcacatatcgacagttactctggtaataatagaatgttagtgatgatcacttggtggatgttgattaagtgcctgtgttttgtttcctcctctggataccaaataggtgtatgctacttttttggtgaacttatttcttggaagatttggctatgctattcagggtttttattcttatgtttttcttctaaatttaagtagcatcctgctgctaccatattaaagctaaaatttaacttttgctgaagaatcagctaattcaggtaatccaaatatttgtggaaaaacatctggataatttattgaacacattagtattgtgttagacagctttgatcattcccatttcataggtttttattgtggaatagtcaacttaatatagattcactttcaatttgcatgtataaagtaatactcaataaaatttttttcatttatttttcaacagtggttattttttttcttcctgtactatcagtaaaatcctgactatgagttttacttttgaagctaaaggataatgctggtaatctaattatgtacctcttacagaaaccatatgcagcactttaaaaatctttatttggtatattattttaggtggacaatgatttaagactcaaagccatcatattaaggtctaaatacattagtggtggggtttctcgaataaatgaggaagtgcacaaaagttcagcctgactgaaaattttaattgtgttttaaaactacatgaataatttcttgattcaaaatcagaactcttataaactaaatctgatggtgtccaaagaatttcaggtccttcaaagtttgtaaaagataagtaggggcctaggaatataaaaatttagacttttttagtaaatggtttacataaccttttgtcttaatttgtcattcttcatacacaggcacaagctaatcagtcttctctacttctagaactctaaatcttctcagtaatgtcatacaagtctaacaagaggaaaagcatccttaagtcagtctatttagataaactcttcaagtccctatataaggacgtattccactagcaagccagtaaatttttccaaggtcacataatcttacatgaaatggaacctttcatcttagacttcatcaaactcaattttttcccttctagattcactttgtgtttatgcatgcatgcacgcgtgcacacaattctatcagcagctgtaaactacccacatattttcttaatctcattttttcagtttttcttcatctttaaaagaggttacatttcattcctggtcaactcttaaaaagaattatgtaatgttgggccttcatattaaagagagagactggttataagatcctttacagtccattcattttattctgatgtctaaccagatagacactagcaagcaaaacttccctcttaatcctggaccaaatgcataattttactgtcactttcaaaaatctgttatgactgaatcaaaatccttttaaagaaaggaaaaagctccttttgtgtcaaatagttgaacaacatgaaaacagtatgagccggttaaagatagattgaatttttactttacacatatgaaaaacagtaagttttgactgctgtgtatgttattcatgttaatatgtgctcagttattcactattgttaatccacatataatcagttgctatccctggttagacacactatggaacttgaaatgcacaatatttacattgttagaggcttctatccaaatatctgcattcctttaaaatgtgaactatttgctgtgattaaccaaaggtagattatgtcatcagtggacattttagctttatggaaacaaattattaagaaatgaatagaaaggtgtctttttctttgtgtagtgcaaaagcctaaagctatcagtcaaaggcctaagaaatccacatttgaaaaacgtaaatcatgattggtaagaatacattcatctgatagtattgagaaaagttgaaaaactgttagccttccataacacattaaacattttatgtatggatggctgaaagtattgagaaaagctgaaaaactgttagccttccataacacattaaacgttttgtgtatggatggcttaggacaataaacaacatcattaaagtaaaattatgtcagtctgttcatattaacttatttaaatcaatgaaaattttgatgagatgactaaatggatgctttggaaatgcaggattataggaggcctaaaagtgcatcttgtttcttgtaacccttttaaaaccaatatgcctggctaggtgcagtggctcatgcctgtaataccaacggggtaacacagggttatgccgtctatacaaaaaaataaatgagctgggcaagatggcatgcacctgtagtcccagctgcttggtaggctgagggggaaggattgcttgagcctgggaggtcgagactgcagtgagccaagatcacaccactgcactccagcctgggtgacagagcaagactctacctcaaaaataaaaataatcaatatagtttcaatgaagcaaagcatctcaggtaacaatttgagcataactttaaccataacttatgatagcataataacattcattagtaattcagtagccgtatgtgccaggctgtgttaggtgctttatatattgtttaatttttaaaaacttgtggagtgtacagattggtaaggtgacattgtatcacaaagctagtctttgagtccaaagttttgtggttttatgttatgatatacttttatcatggaattgtcttattaaatgttttgccagtggttcttaaagtgtgtttctgacaccagtagcattgacttcacttagaaacctgttagaaatacaaattatttggccccacccaacacttgagtcacaaactttgcagatggggctcaatctgttttaacaagcgcttcatgtaattttgatgcaggcctaagtttttgagccactgcagtatgcatttctatttttaagcaaagatcttggtctttctttttggacattgtagaaataacatgaacttgttttttgtttgtttttgttttgttttgttttaagctcctgatctttgttggttatgttgcaaaagattgtatcaggagaagcctcagcatggacattggcatcctgacataacccccattaatttagtattctttctgaaactcaaatggattctcaagtccaagagactatggaataaaatcattgtttgtctgtgttaagttttatctctgttattgcctgaagacttttggtaacaataatgcgctttcatcaaacttttaagacttgattggaaaaaataaatgtatgtttcatcagttatacaa

SEQ ID NO: 292584 - DNA, 1023 bp, Artificial Sequence
  derived and/or modified sequence
atggccaccggcggctacagaaccagcagcggcctgggcggcagcaccaccgacttcctggaggagtggaaggccaagagagagaagatgagagccaagcagaacccccccggccccgccccccccggcggcggcagcagcgacgccgccggcaagccccccgccggcgccctgggcacccccgccgccgccgccgccaacgagctgaacaacaacctgcccggcggcgcccccgccgcccccgccgtgcccggccccggcggcgtgaactgcgccgtgggcagcgccatgctgaccagagccgcccccggccccagaagaagcgaggacgagccccccgccgccagcgccagcgccgccccccccccccagagagacgaggaggagcccgacggcgtgcccgagaagggcaagagcagcggccccagcgccagaaagggcaagggccagatcgagaagagaaagctgagagagaagagaagaagcaccggcgtggtgaacatccccgccgccgagtgcctggacgagtacgaggacgacgaggccggccagaaggagagaaagagagaggacgccatcacccagcagaacaccatccagaacgaggccgtgaacctgctggaccccggcagcagctacctgctgcaggagccccccagaaccgtgagcggcagatacaagagcaccaccagcgtgagcgaggaggacgtgagcagcagatacagcagaaccgacagaagcggcttccccagatacaacagagacgccaacgtgagcggcaccctggtgagcagcagcaccctggagaagaagatcgaggacctggagaaggaggtggtgagagagagacaggagaacctgagactggtgagactgatgcaggacaaggaggagatgatcggcaagctgaaggaggagatcgacctgctgaacagagacctggacgacatcgaggacgagaacgagcagctgaagcaggagaacaagaccctgctgaaggtggtgggccagctgaccagatag

SEQ ID NO: 292585 - DNA, 231 bp, Artificial Sequence
  derived and/or modified sequence
atggccactggaggatacaggacctcttccggcctgggggggtcgacgaccgacttcctcgaggaatggaaggctaagcgtgagaagatgcgtgcaaagcagaatcctccgggacccgcccctcccggcggaggaagtagcgatgctgcgggcaagccgccagcaggggctctggggacacctgcggcagccgccgcaaatgagctgaacaacaacctccctggcgggtag

SEQ ID NO: 292586 - DNA, 195 bp, Artificial Sequence
  derived and/or modified sequence
atggctacaggcggatatagaaccagcagtggcctcggaggcagcaccactgatttcctcgaggagtggaaggcaaagcgcgagaagatgagagcgaaacagaatccaccgggaccagctccccctggcggcggaagctccgatgctgcgggtaagccacctgccggagctctcgggacccccgcagcggcctag

SEQ ID NO: 292587 - DNA, 231 bp, Artificial Sequence
  derived and/or modified sequence
atggccactggaggctaccgcaccagcagcggcctgggcggcagcaccacagacttcctggaggagtggaaggccaagcgggagaagatgagggccaagcagaaccccccaggccctgcccctcctgggggcggcagcagtgatgctgctgggaagcccccagctggggccctgggcaccccagctgctgctgctgccaatgagctgaacaacaacctgcccggcggctag

SEQ ID NO: 292588 - DNA, 195 bp, Artificial Sequence
  derived and/or modified sequence
atggccactggaggctaccgcaccagcagcggcctgggcggcagcaccacagacttcctggaggagtggaaggccaagcgggagaagatgagggccaagcagaaccccccaggccctgcccctcctgggggcggcagcagtgatgctgctgggaagcccccagctggggccctgggcaccccagctgctgcctag

SEQ ID NO: 292589 - DNA, 231 bp, Artificial Sequence
  derived and/or modified sequence
atggccaccggcggctaccggaccagcagcggcctgggcggcagcaccaccgactttctggaggaatggaaagctaagcgagagaagatgagagccaaacaaaacccaccaggacctgccccacctggcggaggatcatctgacgccgccggcaaacctcccgccggggccctgggaacacctgcagcagcggcggcaaacgagttgaacaacaacctgcccggagggtag

SEQ ID NO: 292590 - DNA, 195 bp, Artificial Sequence
  derived and/or modified sequence
atggccaccggcggctaccggaccagcagcggcctgggcggcagcaccactgacttcctcgaagaatggaaggccaaaagagagaaaatgcgagcaaagcagaatcccccaggacctgccccacccggaggcggatcatctgacgccgcaggaaagcccccagccggggcgctaggaacgcctgccgctgcctag

SEQ ID NO: 292591 - DNA, 231 bp, Artificial Sequence
  derived and/or modified sequence
atggccactggtggttaccgaacttcgagtggcttgggaggctccacaacggattttttggaggaatggaaagctaagcgcgaaaagatgcgcgctaagcagaaccctcctggacccgctccccctggcggtggatctagcgacgccgcaggcaaacctccagctggtgccctgggaactccagccgcagctgccgctaacgagttaaataataatctgcccggtggttag

SEQ ID NO: 292592 - DNA, 195 bp, Artificial Sequence
  derived and/or modified sequence
atggcaacagggggataccgaaccagcagtgggctcggtggatcaacaacagattttttggaagagtggaaggccaaaagggaaaaaatgcgggctaagcagaatccacctggcccagccccacctggaggcggttcctccgacgctgctggcaaacctcccgctggagccctcgggacgcccgcagctgcctag

SEQ ID NO: 292593 - DNA, 494 bp, Artificial Sequence
  derived and/or modified sequence
gcctcctctgcgaaccggctaggagctccgcgcctcgccttgggagtggggttgtagctgacggggacctcggaccggcggtggctagagcgcggagcaggcgatacgacgagccgacagccccgccggctgctgtgggagcggcggccgtccctctcctggaggtcgtctcctggcatcctcggggccgcaggaaggaagaggaggcagcggccggagccctggtgggcggcctgaggtgagagcccgaccggcccctttgggaatatggcgaccggtggctaccggaccagcagcggcctcggcggcagcaccacagacttcctggaggagtggaaggcgaaacgcgagaagatgcgcgccaagcagaaccccccgggcccggcccccccgggagggggcagcagcgacgccgctgggaagccccccgcgggggctctgggcaccccggcggccgccgctgccaacgagctcaacaacaacctcccgggcgg

SEQ ID NO: 292594 - DNA, 364 bp, Artificial Sequence
  derived and/or modified sequence
ggcgatcgtcggggtccgtactgtagccccgccggctgctgtgggagcggcggccgtccctctcctggaggtcgtctcctggcatcctcggggccgcaggaaggaagaggaggcagcggccggagccctggtgggcggcctgaggtgagagcccgaccggcccctttgggaatatggcgaccggtggctaccggaccagcagcggcctcggcggcagcaccacagacttcctggaggagtggaaggcgaaacgcgagaagatgcgcgccaagcagaaccccccgggcccggcccccccgggagggggcagcagcgacgccgctgggaagccccccgcgggggctctgggcaccccggcggccgc

SEQ ID NO: 292595 - DNA, 231 bp, Artificial Sequence
  derived and/or modified sequence
atggccaccggcggctacagaaccagcagcggcctgggcggcagcaccaccgacttcctggaggagtggaaggccaagagagagaagatgagagccaagcagaacccccccggccccgccccccccggcggcggcagcagcgacgccgccggcaagccccccgccggcgccctgggcacccccgccgccgccgccgccaacgagctgaacaacaacctgcccggcggctag

SEQ ID NO: 292596 - DNA, 195 bp, Artificial Sequence
  derived and/or modified sequence
atggccaccggcggctacagaaccagcagcggcctgggcggcagcaccaccgacttcctggaggagtggaaggccaagagagagaagatgagagccaagcagaacccccccggccccgccccccccggcggcggcagcagcgacgccgccggcaagccccccgccggcgccctgggcacccccgccgccgcctag

SEQ ID NO: 292597 - protein, 18 aa, Artificial Sequence
  derived and/or modified sequence
MRKGVLKDPEIADLFYKD

SEQ ID NO: 292598 - protein, 21 aa, Artificial Sequence
  derived and/or modified sequence
MRKGVLKDPEIADLFYKDDPE

SEQ ID NO: 292599 - protein, 62 aa, Artificial Sequence
  derived and/or modified sequence
MRKGVLKDPEIADLFYKDDPEELFIGLHEIGHGSFGAVYFATNAHTSEVVAIKKMSYSGKQT

SEQ ID NO: 292600 - protein, 36 aa, Artificial Sequence
  derived and/or modified sequence
MRKGVLKDPEIADLFYKDDPEELFIGLHEIGHGSFG

SEQ ID NO: 292601 - protein, 57 aa, Artificial Sequence
  derived and/or modified sequence
MRKGVLKDPEIADLFYKDDPEELFIGLHEIGHGSFGAVYFATNAHTSEVVAIKKMSY

SEQ ID NO: 292602 - DNA, 411 bp, Artificial Sequence
  derived and/or modified sequence
atgagaaagggcgtgctgaaggaccccgagatcgccgacctgttctacaaggacgaccccgaggagctgttcatcggcctgcacgagatcggccacggcagcttcggcgccgtgtacttcgccaccaacgcccacaccagcgaggtggtggccatcaagaagatgagctacagcggcaagcagacccacgagaagtggcaggacatcctgaaggaggtgaagttcctgagacagctgaagcaccccaacaccatcgagtacaagggctgctacctgaaggagcacaccgcctggctggtgatggagtactgcctgggcagcgccagcgacctgctggaggtgcacaagaagcccctgcaggaggtggagatcgccgccatcacccacggcgccctgcacggcctggcctag

SEQ ID NO: 292603 - DNA, 282 bp, Artificial Sequence
  derived and/or modified sequence
atgagaaagggcgtgctgaaggaccccgagatcgccgacctgttctacaaggacgaccccgaggagctgttcatcggcctgcacgagatcggccacggcagcttcggcgccgtgtacttcgccaccaacgcccacaccagcgaggtggtggccatcaagaagatgagctacagcggcaagcagacccacgagaagtggcaggacatcctgaaggaggtgaagttcctgagacagctgaagcaccccaacaccatcgagtacaagggctgctacctgaagtag

SEQ ID NO: 292604 - DNA, 189 bp, Artificial Sequence
  derived and/or modified sequence
atgagaaagggcgtgctgaaggaccccgagatcgccgacctgttctacaaggacgaccccgaggagctgttcatcggcctgcacgagatcggccacggcagcttcggcgccgtgtacttcgccaccaacgcccacaccagcgaggtggtggccatcaagaagatgagctacagcggcaagcagacctag

SEQ ID NO: 292605 - DNA, 174 bp, Artificial Sequence
  derived and/or modified sequence
atgagaaagggcgtgctgaaggaccccgagatcgccgacctgttctacaaggacgaccccgaggagctgttcatcggcctgcacgagatcggccacggcagcttcggcgccgtgtacttcgccaccaacgcccacaccagcgaggtggtggccatcaagaagatgagctactag

SEQ ID NO: 292606 - DNA, 411 bp, Artificial Sequence
  derived and/or modified sequence
atgcggaaaggcgtactcaaagaccccgaaatcgccgacctgttttacaaggacgaccccgaagaactgttcatcggcctgcacgagattggccacggaagctttggggcggtctacttcgcgaccaatgctcatacctctgaggtggtggccattaagaagatgagctactccggaaagcaaacccatgaaaaatggcaggatatcttaaaagaggtcaagttcctccgtcagctgaaacacccaaataccattgagtataaggggtgttatctgaaggaacacaccgcctggctggtaatggagtattgtctggggagcgcatcagacctgctggaagtgcataagaaaccccttcaggaagtggaaattgccgctataacacacggcgccctgcatggcctggcttag

SEQ ID NO: 292607 - DNA, 282 bp, Artificial Sequence
  derived and/or modified sequence
atgcggaagggggttttgaaggacccagagatagcagatctcttttacaaggatgatccagaggagttattcatagggctgcacgagattggacacgggtccttcggcgccgtctacttcgcgaccaacgctcatactagcgaggtggtcgcgataaaaaaaatgtcttatagcggtaaacagactcacgagaaatggcaggatattttgaaagaagtaaagttcctgagacagcttaaacaccctaacaccatcgaatacaaggggtgctatttaaagtag

SEQ ID NO: 292608 - DNA, 189 bp, Artificial Sequence
  derived and/or modified sequence
atgcggaagggagtgcttaaagacccagaaatcgcagacctgttttacaaggatgatcccgaggagctgttcatagggttgcatgaaatcggtcatggctcatttggcgcagtgtactttgcaacaaacgcccatacctcggaggttgtggctatcaaaaaaatgtcttactctggaaaacaaacctag

SEQ ID NO: 292609 - DNA, 174 bp, Artificial Sequence
  derived and/or modified sequence
atgaggaaaggcgtcctgaaagatcccgagattgctgatctgttctacaaggacgatcctgaagagttattcatcggcctgcatgagattggccacgggtcgttcggggcagtctatttcgcaacaaatgcccatacatcagaagtcgtggcgattaagaaaatgtcttattag

SEQ ID NO: 292610 - DNA, 411 bp, Artificial Sequence
  derived and/or modified sequence
atgaggaaaggagtgctgaaggaccctgagattgctgacctcttctacaaggatgatcctgaggagctgttcatcggcctgcacgagatcggccacggcagctttggagctgtgtactttgccaccaatgcccacaccagcgaggtggtggccatcaagaagatgagctacagcggcaagcagacccatgagaagtggcaggacatcctgaaggaggtgaagttcctgcggcagctgaagcaccccaacaccatcgagtacaagggctgctacctgaaggagcacacagcctggctggtgatggagtactgcctgggcagcgccagtgacctgctggaggtgcacaagaagcccctgcaggaggtggagattgctgccatcacccatggagccctgcacggcctggcctag

SEQ ID NO: 292611 - DNA, 282 bp, Artificial Sequence
  derived and/or modified sequence
atgaggaaaggagtgctgaaggaccctgagattgctgacctcttctacaaggatgatcctgaggagctgttcatcggcctgcacgagatcggccacggcagctttggagctgtgtactttgccaccaatgcccacaccagcgaggtggtggccatcaagaagatgagctacagcggcaagcagacccatgagaagtggcaggacatcctgaaggaggtgaagttcctgcggcagctgaagcaccccaacaccatcgagtacaagggctgctacctgaagtag

SEQ ID NO: 292612 - DNA, 189 bp, Artificial Sequence
  derived and/or modified sequence
atgaggaaaggagtgctgaaggaccctgagattgctgacctcttctacaaggatgatcctgaggagctgttcatcggcctgcacgagatcggccacggcagctttggagctgtgtactttgccaccaatgcccacaccagcgaggtggtggccatcaagaagatgagctacagcggcaagcagacctag

SEQ ID NO: 292613 - DNA, 174 bp, Artificial Sequence
  derived and/or modified sequence
atgaggaaaggagtgctgaaggaccctgagattgctgacctcttctacaaggatgatcctgaggagctgttcatcggcctgcacgagatcggccacggcagctttggagctgtgtactttgccaccaatgcccacaccagcgaggtggtggccatcaagaagatgagctactag

SEQ ID NO: 292614 - DNA, 411 bp, Artificial Sequence
  derived and/or modified sequence
atgcggaagggcgtgctgaaggaccccgagatcgccgacctgttctacaaggacgaccccgaggaactcttcataggcctgcacgagattgggcacgggtccttcggcgcagtgtattttgcaaccaatgctcacacctccgaggtggttgcaatcaagaaaatgtcatatagcgggaaacaaacacacgagaaatggcaggatatccttaaagaagtgaagttcttgaggcagcttaagcacccaaacactatcgagtataaggggtgctatctgaaggagcacaccgcatggctggtgatggaatactgcctgggctccgccagtgatttactggaggtgcacaagaaacctttacaggaagtcgagatcgccgcgattacacatggcgccctgcacggtctagcctag

SEQ ID NO: 292615 - DNA, 282 bp, Artificial Sequence
  derived and/or modified sequence
atgcggaagggcgtgctgaaggaccccgagatcgccgacctgttctataaggatgacccggaggagctttttattgggctgcacgagatcggacacggaagcttcggggccgtctatttcgctaccaatgctcacacctcagaagtcgtggcaattaagaaaatgtcttactcaggaaagcagactcatgaaaaatggcaggacattttgaaggaggttaaattcctccgccagctcaagcaccccaataccattgagtacaaaggttgctatctgaaatag

SEQ ID NO: 292616 - DNA, 189 bp, Artificial Sequence
  derived and/or modified sequence
atgcggaagggcgtgctgaaggaccccgagatcgccgacctgttctataaggatgatccagaagagctcttcatcgggctccacgagatcggccacggctcattcggtgccgtgtattttgccaccaatgctcataccagtgaagtggtggcaataaagaagatgtcttacagtggaaaacagacctag

SEQ ID NO: 292617 - DNA, 174 bp, Artificial Sequence
  derived and/or modified sequence
atgcggaagggcgtgctgaaggaccccgagatcgccgacctgttctacaaagatgaccccgaagagctgttcatcgggctgcatgaaatcgggcatggctcgtttggtgcagtctatttcgcaactaacgcccacacaagcgaagtggtcgctatcaagaaaatgtcatattag

SEQ ID NO: 292618 - DNA, 411 bp, Artificial Sequence
  derived and/or modified sequence
atgagaaaaggagtgctcaaggatccagagattgccgatctgttttataaagatgaccccgaggaactgttcatcggactgcacgagattggacatggctccttcggggctgtttattttgccactaacgcgcacacctccgaagttgtggctattaagaagatgtcctattccggtaagcaaacccacgaaaagtggcaggacatcctcaaagaggttaagtttttacgacaattgaaacacccaaatactatcgagtacaaggggtgttacctgaaggagcatacggcctggctcgtaatggagtactgccttggctcggcttcagaccttttggaagtccataaaaagcccctgcaggaggtggaaattgcagccattactcacggcgctctccacggcctcgcatag

SEQ ID NO: 292619 - DNA, 282 bp, Artificial Sequence
  derived and/or modified sequence
atgagaaagggagtgctgaaggatcccgagatagctgacctgttctataaagacgatcctgaggagttgttcatagggctgcacgaaattggacatggtagtttcggtgctgtgtattttgcaacaaatgcccacacttctgaagtcgtggctattaaaaagatgtcctactccggcaagcagactcatgaaaaatggcaggacatcctgaaggaggttaagttcttgcgtcagctcaagcaccccaatactatcgagtacaaaggttgttacttgaaatag

SEQ ID NO: 292620 - DNA, 189 bp, Artificial Sequence
  derived and/or modified sequence
atgcgcaagggtgtgcttaaggacccagagatcgcagatctcttctacaaagacgatccagaggaattgttcatcggactgcatgagatcggtcacggcagttttggcgcagtatattttgccacgaatgcacacacctccgaagtcgtcgctatcaagaagatgtcgtacagcggaaagcaaacctag

SEQ ID NO: 292621 - DNA, 174 bp, Artificial Sequence
  derived and/or modified sequence
atgcggaaaggtgtcctgaaggaccctgaaattgccgacttattctacaaggatgaccccgaggagttgtttatcggcctgcatgaaatcgggcatgggagttttggcgctgtctatttcgccactaacgctcatacctcagaagtcgtggcgatcaaaaaaatgagctactag

SEQ ID NO: 292622 - DNA, 597 bp, Artificial Sequence
  derived and/or modified sequence
caggctggagtgcaatggctcaatctcggctcaccgcaacctcagcctcccgggttcaagcgattctcctgcctcagcctccctagtagctgggattacaggtactgaagatttaccccccaaaaaaaattgtcaatgagaaataaagctaactgatatcaaaaagcagagcctgctctactggccatcatgcgtaaaggggtgctgaaggacccagagattgccgatctattctacaaagatgatcctgaggaactttttattggtttgcatgaaattggacatggaagttttggagcagtttattttgctacaaatgctcacaccagtgaggtggtggcaattaagaagatgtcctatagtgggaagcagacccatgagaaatggcaagatattcttaaggaagttaaatttttacgacaattgaagcatcctaatactattgagtacaaaggctgttacttgaaagaacacactgcttggttggtgatggaatattgcttaggctcagcctctgatttattagaagttcataaaaaaccacttcaggaagtggagatcgctgccattactcatggagccttgcatggactagcc

SEQ ID NO: 292623 - DNA, 881 bp, Artificial Sequence
  derived and/or modified sequence
tgctgatagcctggggtgttcttataacttaagttcagttttttctttcctgtgaggaagaggcagttttttaaatgaagccatctctggggaaatcgtattgattgttgtagctaaatacggaatttttaaagtctttagtatgttgaactggaaatataggacatgcgtttgagatctactgtgaggcaacttttaccttgatctcttctgatatgactgaggcctatatccatcctttaaaaaattcttattaatcatgcggaagaagaaatctttccaggagcagcaaactcaggaccggagagataagataaatatataaagcttcagggtatgaagccatacacatagtagaaactgaggcaaaggaaagagttcatgtcccgcctgaaggcagtcaaatcaggttgcatcataaatacaaaggactgaagttataaaagagaaaagagaagtttgctgctaaaatgaatctgagcaatatggaatattttgtgccacacacaaaaaggtactgaagatttaccccccaaaaaaaattgtcaatgagaaataaagctaactgatatcaaaaagcagagcctgctctactggccatcatgcgtaaaggggtgctgaaggacccagagattgccgatctattctacaaagatgatcctgaggaactttttattggtttgcatgaaattggacatggaagttttggagcagtttattttgctacaaatgctcacaccagtgaggtggtggcaattaagaagatgtcctatagtgggaagcagacccatgagaaatggcaagatattcttaaggaagttaaatttttacgacaattgaagcatcctaatactattgagtacaaaggctgttacttgaaa

SEQ ID NO: 292624 - DNA, 578 bp, Artificial Sequence
  derived and/or modified sequence
gttgtaacaggaaatacttcagcttgcaatactgatagtaatgtgtggcacccagatcacgctgtttttatctgcagttcctttttagtattgtacaaagtttcttgaagatttttaaatacataagtttaaaagagaattaactttcaatttgcaaattaaaatgagaatggttgccttttcttcattatcaagagatggttgcatcataaatacaaaggactgaagttataaaagagaaaagagaagtttgctgctaaaatgaatctgagcaatatggaatattttgtgccacacacaaaaaggtactgaagatttaccccccaaaaaaaattgtcaatgagaaataaagctaactgatatcaaaaagcagagcctgctctactggccatcatgcgtaaaggggtgctgaaggacccagagattgccgatctattctacaaagatgatcctgaggaactttttattggtttgcatgaaattggacatggaagttttggagcagtttattttgctacaaatgctcacaccagtgaggtggtggcaattaagaagatgtcctatagtgggaagcagac

SEQ ID NO: 292625 - DNA, 641 bp, Artificial Sequence
  derived and/or modified sequence
agcagcagcggcggcggccgcgggagggtccttgtggcgccgggcggcggggtcctgcgtggagagtgggacgcaacgccgagaccgcgagcagaggctgcgcacagccggatccggcactcagcgaccggacccaaggatccgccggggaacaagccacaggagagcgactcaggaacaagtgtgggagaggaagcggcggcggcggcgccgggcccgggggtggtgacagcaggtctgaggctggagtgcagtggcatgattttggctgactgcaacctctgcctcccaggttcaagcaattctccggcctcagcctcccgaggagctgggactacaggttgcatcataaatacaaaggactgaagttataaaagagaaaagagaagtttgctgctaaaatgaatctgagcaatatggaatattttgtgccacacacaaaaaggtactgaagatttaccccccaaaaaaaattgtcaatgagaaataaagctaactgatatcaaaaagcagagcctgctctactggccatcatgcgtaaaggggtgctgaaggacccagagattgccgatctattctacaaagatgatcctgaggaactttttattggtttgcatgaaattggacatggaagttttgga

SEQ ID NO: 292626 - DNA, 613 bp, Artificial Sequence
  derived and/or modified sequence
ctctttaagcctcacttaaaaaactaagtgtctgtaataacttcctttctcgggatgaaggtgctgatagcctggggtgttcttataacttaagttcagttttttctttcctgtgaggaagaggcagttttttaaatgaagccatctctggggaaatcgtattgattgttgtagctaaatacggaatttttaaagtctttagtatgttgaactggaaatataggacatgcgtttgagatctactgtgagttgcatcataaatacaaaggactgaagttataaaagagaaaagagaagtttgctgctaaaatgaatctgagcaatatggaatattttgtgccacacacaaaaaggtactgaagatttaccccccaaaaaaaattgtcaatgagaaataaagctaactgatatcaaaaagcagagcctgctctactggccatcatgcgtaaaggggtgctgaaggacccagagattgccgatctattctacaaagatgatcctgaggaactttttattggtttgcatgaaattggacatggaagttttggagcagtttattttgctacaaatgctcacaccagtgaggtggtggcaattaagaagatgtcctata

SEQ ID NO: 292627 - DNA, 1074 bp, Artificial Sequence
  derived and/or modified sequence
atggacgccctgaaggactctgacttgttgcactggaagcattctcttagcgagctgattgacatcagtattgcccaaaaaaccgcaatttggagattgtacggaaggtccaccatggccttgcagcaggcacagatgcttctgagtatgaactctctcgaggccgtgaacgctggggtgcagcagaataacacggaaagcttcgccgtggcgctgtgccacctggccgaactgcacgccgagcaaggttgcttcgccgctgcgtctgaggtgctgaagcatttgaaagaacgctttccccctaattctcagcacgcccaactgtggatgttgtgcgatcagaaaatccagtttgaccgagccatgaatgatgggaagtaccacctggctgattcccttgtgacgggcatcaccgctcttaacagcatcgaaggcgtctatcggaaagccgttgtgctccaggcccagaaccaaatgtctgaagcccataagctgctacagaagctgttggtgcactgccagaagcttaaaaatacagaaatggtgatcagcgtgctgctcagcgtggcagagctctactggagaagtagctcccccaccatcgccttacccatgctcctgcaggccctcgccctctctaaagagtaccgcttgcagtacctggcctctgaaacagtcctcaatttggcttttgcgcagctcattctgggaatcccagaacaggccctgtctcttcttcatatggccatcgaaccaattttagctgatggtgcaatactggataaaggacgcgccatgtttctggtggctaagtgtcaggtcgcatctgcagccagttatgaccagcccaagaaggcagaggctctggaagcagccattgaaaatctgaacgaagccaagaactatttcgccaaagtggattgtaaggagagaattagagacgtcgtttactttcaagcacgcctctaccacactttggggaaaacccaggagagaaaccgttgcgccatgctatttagacaactgcaccaagagctgccaagtcatggcgtacctctgattaatcacctgtag

SEQ ID NO: 292628 - DNA, 1074 bp, Artificial Sequence
  derived and/or modified sequence
atggatgccctgaaggacagcgacctgctgcactggaagcacagcctgtctgagctgattgacatcagcatcgcccagaagacagccatctggaggctgtatggccgcagcaccatggccctgcagcaggcccagatgctgctgtccatgaacagcctggaggccgtgaatgctggggtgcagcagaacaacacagagagctttgctgtggccctgtgccacctggccgagctgcacgccgagcagggctgctttgctgctgccagcgaggtgctgaagcacctgaaggagcgcttcccccccaacagccagcacgcccagctgtggatgctgtgtgaccagaagatccagtttgaccgggccatgaatgatggcaagtaccacctggccgacagcctggtgacaggcatcacagccctgaacagcattgaaggagtgtacaggaaggctgtggtgctgcaggcccagaaccagatgtctgaggcccacaagctgctgcagaagctgctggtgcactgccagaagctgaagaacacagagatggtgatctctgtgctgctgtctgtggccgagctgtactggaggagcagcagccccaccatcgccctgcccatgctgctgcaggccctggccctgagcaaggagtaccgcctgcagtacctggccagcgagaccgtgctgaacctggcctttgcccagctgatcctgggcatccctgagcaggccctgagcctgctgcacatggccatcgagcccatcctggctgatggagccatcctggacaagggccgggccatgttcctggtggccaagtgccaggtggccagcgctgccagctatgaccagcccaagaaggccgaggccctggaggccgccatcgagaacctgaatgaggccaagaactactttgccaaggtggactgcaaggagcgcatcagagatgtggtgtacttccaggcccggctgtaccacaccctgggcaagacccaggagaggaacagatgtgccatgctgttccggcagctgcaccaggagctgcccagccatggagtgcccctcatcaaccacctgtag

SEQ ID NO: 292629 - DNA, 1074 bp, Artificial Sequence
  derived and/or modified sequence
atggacgccctgaaggacagcgacctgctgcactggaagcacagcctaagtgagctgatagacatcagtatagctcagaaaactgcaatttggcgcctatacggcaggtctacaatggccttgcaacaggcccagatgttgctcagtatgaactctctggaggcagtcaacgcaggagtgcaacaaaacaacacggagagcttcgcagtcgcgctctgtcatctggccgaactccacgcggaacaaggttgtttcgccgccgcaagcgaggtgctcaagcacctcaaggagcgttttcctccaaactcccagcatgcgcagctgtggatgctctgcgatcaaaagatccagtttgatagagcaatgaatgacggaaaataccatctggccgactcactggtaaccggcatcacagccctcaattctatcgagggcgtctacaggaaggcggtcgtgctgcaggcacagaaccagatgtccgaagcacacaagctccttcagaaactgctcgttcactgtcagaagctgaaaaacaccgagatggtaatttcagtgttgctcagtgtcgcagagctctattggcgaagtagcagccctaccattgcactacctatgctgctgcaggccctagccctgtcgaaagagtatcgtctgcaatatctggccagcgaaaccgtactgaacctcgcctttgcccagctgattctggggataccggagcaggctctgtctttgctgcacatggccattgaaccgattctggcggacggggccattcttgacaaaggcagggcaatgttccttgtcgctaagtgccaggtggcttcagctgctagttacgatcaacctaagaaggcagaagctttagaggcagccattgagaacctgaatgaagcaaagaattatttcgccaaggtagactgtaaagagcggatacgggacgtagtctactttcaggcacggctgtatcacacactgggcaaaacccaggaacgaaataggtgtgctatgttatttcgacagctgcaccaggagctgccatcacacggcgtcccactgattaatcatttatag

SEQ ID NO: 292630 - DNA, 1074 bp, Artificial Sequence
  derived and/or modified sequence
atggacgccctgaaggattccgaccttctgcactggaaacactccctgagcgaactaattgacatttctattgcacaaaaaacagccatttggaggctgtatggccgatcaaccatggccctccaacaggcccagatgctcttatctatgaacagcctcgaagctgtgaacgcaggcgtccaacagaacaatacagagtccttcgccgtggcattatgtcacttagctgaactgcacgcggagcagggctgttttgccgctgcttctgaagtcctgaagcacttaaaggaacgttttcctcctaattcgcagcatgcacagctgtggatgctgtgtgatcagaaaattcagtttgacagagccatgaatgacggcaaatatcatctggctgacagcctagttacaggaataactgccctgaatagcattgagggagtttacaggaaagctgtggtactgcaagctcagaatcagatgtctgaggctcacaagctgctacagaagcttctggtccactgtcagaaattaaaaaataccgaaatggtcatttcagtattgttaagtgtggcagaactgtattggcgcagtagctctcccacaatcgcactgcctatgttgctccaagccctggctctcagtaaggagtacaggctccaatacttagcctctgagaccgtgctgaacctggcgtttgcccaacttatactgggaataccagaacaggccctgtcattgctacatatggcaatcgagcccatacttgcagacggggctatcttggataagggacgagccatgtttctcgtcgctaagtgtcaggtggccagcgctgcctcttatgatcagcccaaaaaagccgaggcactggaggcggctatcgagaatctaaacgaggccaaaaattacttcgctaaggtcgattgcaaagaaagaattagggacgtcgtgtattttcaagcccgtttataccatactctgggaaaaacacaggaacggaatcggtgtgcaatgctgtttcgccagctgcaccaggaactgcctagtcacggtgtgcctcttatcaatcacctctag

SEQ ID NO: 292631 - DNA, 1074 bp, Artificial Sequence
  derived and/or modified sequence
atggacgccctgaaggacagcgacctgctgcactggaagcacagcctgagcgagctgatcgacatcagcatcgcccagaagaccgccatctggagactgtacggcagaagcaccatggccctgcagcaggcccagatgctgctgagcatgaacagcctggaggccgtgaacgccggcgtgcagcagaacaacaccgagagcttcgccgtggccctgtgccacctggccgagctgcacgccgagcagggctgcttcgccgccgccagcgaggtgctgaagcacctgaaggagagattcccccccaacagccagcacgcccagctgtggatgctgtgcgaccagaagatccagttcgacagagccatgaacgacggcaagtaccacctggccgacagcctggtgaccggcatcaccgccctgaacagcatcgagggcgtgtacagaaaggccgtggtgctgcaggcccagaaccagatgagcgaggcccacaagctgctgcagaagctgctggtgcactgccagaagctgaagaacaccgagatggtgatcagcgtgctgctgagcgtggccgagctgtactggagaagcagcagccccaccatcgccctgcccatgctgctgcaggccctggccctgagcaaggagtacagactgcagtacctggccagcgagaccgtgctgaacctggccttcgcccagctgatcctgggcatccccgagcaggccctgagcctgctgcacatggccatcgagcccatcctggccgacggcgccatcctggacaagggcagagccatgttcctggtggccaagtgccaggtggccagcgccgccagctacgaccagcccaagaaggccgaggccctggaggccgccatcgagaacctgaacgaggccaagaactacttcgccaaggtggactgcaaggagagaatcagagacgtggtgtacttccaggccagactgtaccacaccctgggcaagacccaggagagaaacagatgcgccatgctgttcagacagctgcaccaggagctgcccagccacggcgtgcccctgatcaaccacctgtag

SEQ ID NO: 292632 - protein, 153 aa, Artificial Sequence
  derived and/or modified sequence
MEQDNSPRKIQFTVPLLEPHLDPEAAEQIRRRRPTPATLVLTSDQSSPEIDEDRIPNPHLKKLQNASLKLTREAVRNPAQKNPQPIYHHWIPREPTRCHRRGGTGGQKSVGGFPCSTHTLAPFYVFTRSILLLKRGERMSHPLEPRDDPTKMP

SEQ ID NO: 292633 - DNA, 462 bp, Artificial Sequence
  derived and/or modified sequence
atggaacaagacaatagccctaggaagatccagtttaccgtgcccctcttagagcctcaccttgatccggaggccgctgaacagatccggaggcgccgccctactccagcaactttggtgctcacctccgaccaaagcagccccgaaattgacgaggacagaattcccaatcctcacctgaaaaagcttcagaacgcgtcacttaagctaacccgagaggctgtgcgtaatccggctcagaagaatccacagcctatttatcaccactggatccctagggaaccaacaagatgtcaccgcagagggggtactggtgggcaaaaaagcgtaggcggatttccatgttcgacccatactttggcccctttttacgttttcacgcgaagtattctgctgctgaaacgcggagaaagaatgagccatccgttagaaccaagggacgatccaaccaagatgccatag

SEQ ID NO: 292634 - DNA, 462 bp, Artificial Sequence
  derived and/or modified sequence
atggagcaggacaacagccccaggaagatccagttcaccgtgcccctgctggagccccacctggaccctgaggccgctgagcagatcagaagaagaagacccaccccagccaccctggtgctgaccagtgaccagagcagccctgagattgatgaggaccgcatccccaacccccacctgaagaagctgcagaatgccagcctgaagctgacccgggaggccgtgaggaacccagcccagaagaacccccagcccatctaccaccactggatcccccgggagcccacccgctgccaccggcggggcggcaccggcggccagaagtctgtgggcggcttcccctgcagcacccacaccctggcccccttctacgtgttcaccaggagcatcctgctgctgaagagaggagagaggatgagccaccccctggagcccagagatgaccccaccaagatgccctag

SEQ ID NO: 292635 - DNA, 462 bp, Artificial Sequence
  derived and/or modified sequence
atggagcaggacaacagcccccggaagatccagttcaccgtgcccttattggagccacacctagatcctgaagccgccgaacagataagacggagaagacccacccctgccactcttgtgctgacctcggaccagtcctctccagagattgacgaagatcggatccccaatccccacttgaagaagttacagaacgcaagcctgaaacttactcgggaagctgtaagaaatccagcacagaaaaacccccagcccatttatcatcattggattcccagagagcctaccagatgtcatcggagaggcggcaccggcggacaaaaatctgttgggggcttcccttgctctacccacacactggcgcccttctatgttttcacacgcagtattcttctactaaagcgtggggagcgcatgtcccatcccctggaaccacgggacgaccccactaagatgccctag

SEQ ID NO: 292636 - DNA, 462 bp, Artificial Sequence
  derived and/or modified sequence
atggaacaggataattcccctcgcaagatccaattcacggttccacttctcgaaccacacctggatcccgaggcagccgagcagattagaaggaggaggcccacccccgctacgctagtcctcaccagtgaccagagctcacccgagatcgatgaagatcggattcctaatccgcacctgaaaaaactgcagaatgcatcactcaagctgacacgagaggccgtacgtaaccccgcacagaaaaaccctcaacctatttatcaccattggatacctcgggaacccacacggtgtcacagacgaggcggtacaggtgggcagaagagcgtcggaggattcccctgctccactcatacactggcgccattttacgtgttcacgcgctctatcttgctgctaaagagaggggaaaggatgtcccatccgctcgagcctcgagacgatcccacaaagatgccttag

SEQ ID NO: 292637 - DNA, 633 bp, Artificial Sequence
  derived and/or modified sequence
agagtccccggagccgcgagctgggagcgctgtgccgggagccgggagccgagcgcgccgggctggggccggggccggagcggagcggagagggagcgcgcccgccccagccccgagtcccgccgccttccctcccgccgcagcgcgggcccaccggccgccgccccagccatggagcaagacaacagcccccgaaagatccagttcacggtcccgctgctggagccgcaccttgaccccgaggcggcggagcagattcggaggcgccgccccacccctgccaccctcgtgctgaccagtgaccagtcatccccagagatagatgaagaccggatccccaacccacatctcaagaaactgcagaatgcatccctaaaactcacgagagaggcagtaaggaacccagcacaaaagaaccctcaacccatataccaccactggattccaagggagccaactcggtgtcataggagaggagggactgggggacagaagagcgtgggaggatttccctgctccacccacactttggctccattctatgtcttcactcgctccattttactgctcaaaaggggagagagaatgtcgcatccactggagcccagagacgacccaacaaagatgccatga

SEQ ID NO: 292638 - DNA, 462 bp, Artificial Sequence
  derived and/or modified sequence
atggagcaggacaacagccccagaaagatccagttcaccgtgcccctgctggagccccacctggaccccgaggccgccgagcagatcagaagaagaagacccacccccgccaccctggtgctgaccagcgaccagagcagccccgagatcgacgaggacagaatccccaacccccacctgaagaagctgcagaacgccagcctgaagctgaccagagaggccgtgagaaaccccgcccagaagaacccccagcccatctaccaccactggatccccagagagcccaccagatgccacagaagaggcggcaccggcggccagaagagcgtgggcggcttcccctgcagcacccacaccctggcccccttctacgtgttcaccagaagcatcctgctgctgaagagaggcgagagaatgagccaccccctggagcccagagacgaccccaccaagatgccctag

SEQ ID NO: 292639 - protein, 394 aa, Artificial Sequence
  derived and/or modified sequence
MGPRCPVQTVGQWLESIGLPQYENHLMANGFDNVQFMGSNVMEDQDLLEIGILNSGHRQRILQAIQLLPKMRPIGHDGYHPTSVAEWLDSIELGDYTKAFLINGYTSMDLLKKIWEVELINVLKINLIGHRKRILASLGDRLHDDPPQKPPRSITLRTGDWGEPSITLRPPNEATASTPVQYWQHHPEKLIFQSCDYKAFYLGSMLIKELRGTESTQDACAKMRANCQKSTEQMKKVPTIILSVSYKGVKFIDATNKNIIAEHEIRNISCAAQDPEDLSTFAYITKDLKSNHHYCHVFTAFDVNLAYEIILTLGQAFEVAYQLALQARKGGHSSTLPESFENKPSKPIPKPRVSIRKSVIDPSEQKTLANLPWIVEPGQEAKRGINTKYETTIF

SEQ ID NO: 292640 - protein, 763 aa, Artificial Sequence
  derived and/or modified sequence
SFQESYPKKRNYTMEIVPSASLDTFPSENENFLCDLMDTAVTKKPCSLEIARAPSPRTDNASEVAVTTPGTSNHRNSSTGPTPDCSPPSPDTALKNIVKVIRPQPKQRTSIVSSLDFHRMNHNQEYFEINTSTGCTSFTASPPASPPTSSVGTTEVKNEGTNHTDDLSRQDDNDPPKEYDPGQFAGLLHGSSPACESPENPFHLYGKREQCEKGQDEVSLANSPLPFKQSPIENNSEPLVKKIKPKVVSRTIFHKKSNQLENHTIVGTRSTRSGSRNGDQWVMNAGGFVERACTLGRIRSLPKALIDMHLSKSVSKSDSDLIAYPSNEKTSRVNWSESSTAEHSSKGNSERTPSFTSEWEEIDKIMSSIDVGINNELKEMNGPRCPVQTVGQWLESIGLPQYENHLMANGFDNVQFMGSNVMEDQDLLEIGILNSGHRQRILQAIQLLPKMRPIGHDGYHPTSVAEWLDSIELGDYTKAFLINGYTSMDLLKKIWEVELINVLKINLIGHRKRILASLGDRLHDDPPQKPPRSITLRTGDWGEPSITLRPPNEATASTPVQYWQHHPEKLIFQSCDYKAFYLGSMLIKELRGTESTQDACAKMRVMCVKSTEQMKKVPTIILSVSYKGVKFIDATNKNIIAEHEIRNISCAAQDPEDLSTFAYITKDLKSNHHYCHVFTAFDVNLAYEIILTLGQAFEVAYQLALQARKGGHSSTLPESFENKPSKPIPKPRVSIRKSVDLLHASHTGQEPSERHTEEALRKF

SEQ ID NO: 292641 - protein, 764 aa, Artificial Sequence
  derived and/or modified sequence
MLAQESYPKKRNYTMEIVPSASLDTFPSENENFLCDLMDTAVTKKPCSLEIARAPSPRTDNASEVAVTTPGTSNHRNSSTGPTPDCSPPSPDTALKNIVKVIRPQPKQRTSIVSSLDFHRMNHNQEYFEINTSTGCTSFTASPPASPPTSSVGTTEVKNEGTNHTDDLSRQDDNDPPKEYDPGQFAGLLHGSSPACESPENPFHLYGKREQCEKGQDEVSLANSPLPFKQSPIENNSEPLVKKIKPKVVSRTIFHKKSNQLENHTIVGTRSTRSGSRNGDQWVMNAGGFVERACTLGRIRSLPKALIDMHLSKSVSKSDSDLIAYPSNEKTSRVNWSESSTAEHSSKGNSERTPSFTSEWEEIDKIMSSIDVGINNELKEMNGPRCPVQTVGQWLESIGLPQYENHLMANGFDNVQFMGSNVMEDQDLLEIGILNSGHRQRILQAIQLLPKMRPIGHDGYHPTSVAEWLDSIELGDYTKAFLINGYTSMDLLKKIWEVELINVLKINLIGHRKRILASLGDRLHDDPPQKPPRSITLRTGDWGEPSITLRPPNEATASTPVQYWQHHPEKLIFQSCDYKAFYLGSMLIKELRGTESTQDACAKMRANCQKSTEQMKKVPTIILSVSYKGVKFIDATNKNIIAEHEIRNISCAAQDPEDLSTFAYITKDLKSNHHYCHVFTAFDVNLAYEIILTLGQAFEVAYQLALQARKGGHSSTLPESFENKPSKPIPKPRVSIRKSVDLLHASHTGQEPSERHTEEALRKF

SEQ ID NO: 292642 - DNA, 2292 bp, Artificial Sequence
  derived and/or modified sequence
tcattccaggagtcctacccgaagaagcgtaactataccatggaaatcgtgccttctgcgtccctggatacatttccgtccgagaatgaaaactttctgtgtgatctcatggacaccgctgtcacaaagaaaccatgctccttagaaatcgcgcgggcaccttctcctcgtactgataacgctagtgaggtcgctgttaccactccgggtaccagcaatcacagaaatagctcgactggccctacacctgattgtagccctccatcacccgacacagctctgaaaaacattgtgaaagtcattaggcctcagcctaaacaacgaacgtctatcgtgtcctctttagatttccaccggatgaatcacaaccaggagtacttcgaaattaacactagcactggctgcacatcctttactgcttcgcccccggcttctcctccaacatcaagtgtgggcactaccgaggtcaaaaatgagggtaccaaccacaccgacgacctcagtcggcaggacgacaacgaccccccaaaggaatacgaccctggccagttcgccggtttactgcatggctcaagtcctgcttgcgaatctcccgagaatccctttcacctctatggtaagagagagcagtgcgaaaaaggtcaggacgaggtgtctctggctaacagtccgctcccctttaagcaaagtcctattgagaacaactctgaacctctggtcaaaaagatcaagccaaaagttgtgtcccgaacgatctttcataagaaaagcaatcaactcgagaaccatacaatcgtgggaactcgctcaaccagaagtggttcaagaaatggggatcagtgggtgatgaacgctggaggatttgtcgaacgggcttgcacactgggccgtattcggtctttaccgaaggccctcattgatatgcatctgtccaaatccgtttccaaaagtgactccgatctcatagcctatccctctaacgagaagacatcccgagtcaattggtctgaatcttccacggcagagcacagctcaaagggcaactcagagaggaccccatccttcacctccgagtgggaggaaatcgataaaattatgtcatcaatcgacgtcggcattaacaacgagctgaaggagatgaatgggccccggtgtcccgtgcagacagtgggccagtggctggagtctatcggattgcctcagtacgaaaatcatctgatggccaacgggttcgataacgtacaatttatggggtcaaatgtgatggaagatcaggacctgctggagatcgggatcctgaacagcggacaccgccagagaatcttgcaggcaatccagctccttccaaaaatgaggccaataggacacgacgggtaccacccaacgtccgttgcagagtggctagacagtattgagctcggagattataccaaggcctttttgatcaacggctacactagcatggacctcttaaagaaaatctgggaggttgaattgataaatgtactaaagatcaatctcattggacatcggaagagaattttagcttccttaggggatagattgcacgacgaccccccacagaaaccccccaggagcatcaccctccgcacgggggattggggggagccatccataacactccgaccccctaatgaagcaacagccagcaccccagtccaatattggcagcaccacccggagaagcttatctttcaaagctgtgactataaggccttctatctggggagcatgctcattaaagagctacgcgggaccgagtcaactcaggatgcttgcgcaaagatgagagtcatgtgcgtgaagagtacggagcagatgaagaaggtccccaccataattttatccgtcagctataaaggtgtgaaatttatagacgccacaaataagaacattatcgctgaacacgagattagaaacatctcatgcgctgctcaggatccagaggatcttagcacattcgcgtatataactaaagacctcaagagtaatcatcattattgccatgtgtttaccgcgttcgatgtgaatctggcctacgagatcattctgaccctggggcaagcattcgaggtcgcttatcaactagcactccaggctcgcaaagggggccattcaagtactttgcctgagagctttgaaaataagccatctaagcctatccctaagcctcgggtttctattcgtaagtccgttgatttgctgcatgcgtcacacaccggccaggagcctagtgaaaggcatactgaggaagctcttaggaagttttag

SEQ ID NO: 292643 - DNA, 2295 bp, Artificial Sequence
  derived and/or modified sequence
atgctcgcccaagaatcttatcccaaaaagagaaactacactatggagatcgtgccctccgcatccctggatacatttccttcagagaacgaaaactttctttgcgatttgatggacaccgctgtaaccaagaagccctgcagtctcgagatcgcccgcgctccatccccacgcactgacaatgcctcagaggttgcggtgaccacgcccggaaccagcaatcaccgcaactcctctacaggtcccacacccgattgttcccccccaagtcccgacacagctttgaaaaacatcgtcaaggtaatcaggcctcaaccaaaacaaaggacgtctattgtgtcttctttggattttcataggatgaaccacaatcaggagtatttcgaaataaacacttccactggctgtacttcgtttactgcatccccgcccgcctctccccccaccagctcagtaggtacaactgaggtcaaaaacgagggcacaaaccacacagacgatctcagtaggcaggatgataacgaccctccaaaggaatacgaccccgggcagttcgccggactgctgcatggatcttcccctgcatgcgagagtccagaaaatccatttcatctatatggcaaacgggagcagtgcgagaaaggtcaagatgaggtttcactggccaatagcccgttacccttcaaacagtctcccatcgagaacaattctgaacctttagttaaaaagataaagcccaaagtagtgtcacggaccatcttccacaaaaagagcaatcagcttgaaaaccataccatcgtgggtacacggtcaaccaggtccggatcaaggaacggcgatcagtgggtcatgaacgccggaggcttcgttgaaagggcatgcacattggggaggatccgttctttgcctaaggcccttattgacatgcatctttctaagtctgtcagtaagtctgacagcgacttgattgcctatccatccaatgaaaaaacaagcagggttaactggtccgaatcttcgactgccgaacacagcagtaaaggcaattctgagcggacaccttcgttcacctctgaatgggaggagattgacaaaataatgagctccattgacgtgggaattaacaacgagttgaaggagatgaacggtccacggtgccccgttcagacagtaggacaatggctggagagtattgggctgccccaatacgaaaatcatttaatggctaacggattcgataacgtgcagttcatggggagtaatgtcatggaagaccaggacctgctggagatagggattttgaatagtggccacaggcagcgcatactccaggccatacaactgttgcctaagatgcgtcctattggacacgatggctatcaccccacttcagttgcggaatggctggattcgattgaattgggtgactacaccaaggcattcctgattaatggctatacgagcatggacttgcttaagaaaatttgggaggtggaactcattaatgtactaaaaattaacctgataggccatagaaaacgaatcttggcctctcttggagacagacttcatgatgacccacctcagaaacccccgaggtcaataactctgagaacaggagactggggtgagccctcaattacattgcgtcctccaaacgaagccacagcttcaactcctgttcagtactggcagcatcacccggaaaagcttattttccaatcatgcgactacaaggctttctacctgggaagtatgctgataaaagagctgcgaggaacggagagtactcaggacgcctgcgccaaaatgagagccaactgccagaagtccacagagcagatgaaaaaagtgcccaccatcatcctgtcggtgtcgtataagggagtcaaattcatcgatgccaccaataaaaatattatagccgaacacgagatacggaatatttcttgcgccgcccaggacccggaagacctatctactttcgcttacattaccaaggatctcaaatcgaaccaccattattgccatgtgttcacagcattcgacgtgaatctcgcttacgagataatcttaacactaggtcaggcgttcgaggtggcttatcagcttgccctccaggcgcggaagggtggccattcttcaaccctgcccgaaagcttcgagaataaaccgtctaaacccatccctaagccccgagtgtctatcagaaagagcgtggaccttctacacgcatcccacacgggccaggaacctagtgagcgccacaccgaggaggctctccggaaattttag

SEQ ID NO: 292644 - DNA, 2292 bp, Artificial Sequence
  derived and/or modified sequence
tccttccaggagagctaccccaagaagaggaactacaccatggagatcgtgcccagcgccagcctggacaccttccccagtgaaaatgaaaacttcctgtgtgacctgatggacacagctgtgaccaagaagccctgcagcctggagatcgcccgggcccccagccccaggacagacaatgccagcgaggtggccgtgaccaccccaggcaccagcaaccacaggaacagcagcacaggccccaccccagactgcagcccccccagcccagacacagccctgaagaacatcgtgaaggtgatccggccccagcccaagcagaggaccagcatcgtgagcagcctggacttccacaggatgaaccacaaccaggagtactttgagatcaacaccagcacaggctgcaccagcttcaccgccagccccccagccagcccccccaccagctctgtgggcaccacagaggtgaagaatgaaggcaccaaccacacagatgacctgagccggcaggatgacaatgacccccccaaggagtatgaccccggccagtttgctggcctgctgcacggcagcagccctgcctgtgagagccctgagaaccccttccacctgtatggcaagcgggagcagtgtgagaagggccaggatgaggtgtccctggccaacagccccctgcccttcaagcagagccccatcgagaacaacagcgagcccctggtgaagaagatcaagcccaaggtggtgtccaggaccatcttccacaagaagagcaaccagctggagaaccacaccatcgtgggcaccaggagcaccaggagcggcagcagaaatggagaccagtgggtgatgaatgccggcggctttgtggagcgggcctgcaccctgggccgcatccgcagcctgcccaaggccctgattgacatgcacctgagcaagtctgtgtccaagagtgacagcgacctgattgcctaccccagcaatgagaagaccagccgggtgaactggagcgagagcagcacagctgagcacagcagcaagggcaacagcgagaggacccccagcttcaccagcgagtgggaggagattgacaagatcatgagcagcattgatgtgggcatcaacaatgagctgaaggagatgaatggcccccgctgccctgtgcagacagtgggccagtggctggagagcatcggcctgccccagtatgagaaccacctgatggccaatggatttgacaacgtgcagttcatgggcagcaatgtgatggaggaccaggacctgctggagatcggcatcctgaacagcggccaccggcagaggatcctgcaggccatccagctgctgcccaagatgaggcccatcggccatgatggctaccaccccacctctgtggccgagtggctggacagcattgagctgggggactacaccaaggccttcctgatcaatggctacacctccatggacctgctgaagaagatctgggaggtggagctgatcaacgtgctgaagatcaacctgattggccacaggaagaggatcctggccagcctgggggaccggctgcatgatgaccccccccagaagccacccaggagcatcaccctgaggactggagactggggcgagcccagcatcaccctgcggcccccaaatgaggccacagccagcacccctgtgcagtactggcagcaccaccctgagaagctgatcttccagagctgtgactacaaggccttctacctgggctccatgctgatcaaggagctgcggggcacagagagcacccaggatgcctgtgccaagatgagggtgatgtgtgtgaagagcacagagcagatgaagaaggtgcccaccatcatcctgtctgtgtcctacaagggcgtgaagttcattgatgccaccaacaagaacatcatcgccgagcacgagatccggaacatcagctgtgccgcccaggaccctgaggacctgagcacctttgcctacatcaccaaggacctgaagagcaaccaccactactgccacgtgttcaccgcctttgatgtgaacctggcctatgagatcatcctgaccctgggccaggcctttgaggtggcctaccagctggccctgcaggccaggaaaggaggccacagcagcaccctgcctgagagctttgagaacaagcccagcaagcccatccccaagccccgggtgtccatcaggaagtctgtggacctgctgcacgccagccacacaggccaggagcccagcgagcggcacacagaggaggccctgaggaagttctag

SEQ ID NO: 292645 - DNA, 2295 bp, Artificial Sequence
  derived and/or modified sequence
atgctggcccaggagagctaccccaagaagaggaactacaccatggagatcgtgcccagcgccagcctggacaccttccccagtgaaaatgaaaacttcctgtgtgacctgatggacacagctgtgaccaagaagccctgcagcctggagatcgcccgggcccccagccccaggacagacaatgccagcgaggtggccgtgaccaccccaggcaccagcaaccacaggaacagcagcacaggccccaccccagactgcagcccccccagcccagacacagccctgaagaacatcgtgaaggtgatccggccccagcccaagcagaggaccagcatcgtgagcagcctggacttccacaggatgaaccacaaccaggagtactttgagatcaacaccagcacaggctgcaccagcttcaccgccagccccccagccagcccccccaccagctctgtgggcaccacagaggtgaagaatgaaggcaccaaccacacagatgacctgagccggcaggatgacaatgacccccccaaggagtatgaccccggccagtttgctggcctgctgcacggcagcagccctgcctgtgagagccctgagaaccccttccacctgtatggcaagcgggagcagtgtgagaagggccaggatgaggtgtccctggccaacagccccctgcccttcaagcagagccccatcgagaacaacagcgagcccctggtgaagaagatcaagcccaaggtggtgtccaggaccatcttccacaagaagagcaaccagctggagaaccacaccatcgtgggcaccaggagcaccaggagcggcagcagaaatggagaccagtgggtgatgaatgctgggggctttgtggagcgggcctgcaccctgggccgcatccgcagcctgcccaaggccctgattgacatgcacctgagcaagtctgtgtccaagagtgacagcgacctgattgcctaccccagcaatgagaagaccagccgggtgaactggagcgagagcagcacagctgagcacagcagcaaaggaaacagcgagaggacccccagcttcaccagcgagtgggaggagattgacaagatcatgagcagcattgatgtgggcatcaacaatgagctgaaggagatgaatggcccccgctgccctgtgcagacagtgggccagtggctggagagcatcggcctgccccagtatgagaaccacctgatggccaacggctttgacaacgtgcagttcatgggcagcaatgtgatggaggaccaggacctgctggagatcggcatcctgaacagcggccaccggcagaggatcctgcaggccatccagctgctgcccaagatgaggcccatcggccatgatggctaccaccccacctctgtggccgagtggctggacagcattgagctgggggactacaccaaggccttcctgatcaatggctacacctccatggacctgctgaagaagatctgggaggtggagctgatcaacgtgctgaagatcaacctgattggccacaggaagaggatcctggccagcctgggggaccggctgcatgatgatcctccccagaagcccccaagaagcatcaccctgaggactggagactggggcgagcccagcatcaccctgcggcccccaaatgaggccacagccagcacccctgtgcagtactggcagcaccaccctgagaagctgatcttccagagctgtgactacaaggccttctacctgggctccatgctgatcaaggagctgcggggcacagagagcacccaggatgcctgtgccaagatgagggccaactgccagaagagcacagagcagatgaagaaggtgcccaccatcatcctgtctgtgtcctacaagggcgtgaagttcattgatgccaccaacaagaacatcatcgccgagcacgagatccggaacatcagctgtgccgcccaggaccctgaggacctgagcacctttgcctacatcaccaaggacctgaagagcaaccaccactactgccacgtgttcaccgcctttgatgtgaacctggcctatgagatcatcctgaccctgggccaggcctttgaggtggcctaccagctggccctgcaggccaggaagggcggccacagcagcaccctgcctgagagctttgagaacaagcccagcaagcccatccccaagccccgggtgtccatcaggaagtctgtggacctgctgcacgccagccacacaggccaggagcccagcgagcggcacacagaggaggccctgaggaagttctag

SEQ ID NO: 292646 - DNA, 2292 bp, Artificial Sequence
  derived and/or modified sequence
agcttccaggagagctaccccaagaagcggaactacaccatggagatagtgcccagcgccagcctcgacaccttcccgtcagaaaacgaaaatttcctgtgcgacctgatggacaccgcagtgacgaagaagccatgtagccttgagattgcacgtgcgccttctccgcgaactgacaacgcaagtgaagtggcagtcactacacctggtacaagcaatcaccgcaacagttctaccgggccaacacctgactgcagtcctccgagtccagacacagccctgaaaaatatcgtgaaggtcatccgcccacaacctaaacagcggacatctatcgtgagttccttggattttcacagaatgaatcataaccaggagtattttgagatcaacacctctaccggttgcacctccttcaccgcttccccgcccgcttccccccccacgtcgagtgttggcacgacagaggttaaaaatgaggggactaaccatactgatgacctgtctcgacaggatgacaatgaccccccaaaggaatacgatcccggccagttcgctgggcttcttcacggcagcagccctgcttgtgagtcaccagaaaatccattccacctctacggaaagagagagcagtgcgaaaaggggcaggatgaagtgtcacttgctaacagcccgctgcctttcaagcaatcaccgattgagaacaactcggagccgctggtgaaaaaaatcaaaccaaaggtcgtgtcccgcacaatatttcataaaaagtccaatcagctggagaaccacacaatcgtgggcacaaggtctacacgatccggaagcaggaacggagaccagtgggtgatgaacgccgggggattcgtggagcgcgcctgcacactcggtagaatacggagtctgccaaaagccctcattgatatgcatctctctaagtccgtgtctaaatcagacagcgacctgatagcttacccaagtaacgaaaagactagtcgcgtgaactggagtgaaagttctaccgcagagcacagctctaaaggaaactcagaaaggacaccttccttcacttccgaatgggaagagatcgataaaatcatgagtagcattgatgtggggattaacaatgagctgaaggaaatgaacgggccacgttgccccgtacagaccgtaggccagtggctggaaagcataggcctgccccagtacgaaaatcacttaatggctaacggctttgacaatgtccagttcatgggaagtaacgttatggaagatcaggacttgttagaaattgggattctgaatagcggacacagacagcgaatcttacaggctatccagctgctgccgaagatgcgtccaatcggacacgatgggtaccacccgacaagtgtggccgagtggttggacagtattgagttaggcgactacaccaaggcctttctaatcaacgggtataccagtatggacctgcttaaaaaaatttgggaggttgagctgataaatgttttaaagatcaatctaatcggtcacagaaagaggatactggcatcgcttggcgaccgactacacgacgatcctccacagaagccccccaggtcgattaccttgaggacaggggattggggagaaccgtctattactcttcggccgccaaacgaggccaccgcttcaacccccgttcagtactggcaacaccatcccgaaaagctcattttccagtcttgtgattataaggcattctatctcggaagcatgctgataaaagaactgagggggaccgaatcaacccaggacgcctgcgctaagatgagggtgatgtgtgtgaaatctaccgagcagatgaagaaagtgcctaccattattctgtctgtgtcctacaaaggagtcaaattcattgatgccacgaacaagaacatcatagcagagcacgaaattagaaacattagttgtgctgcacaagacccagaggatctcagtaccttcgcttatattacgaaggacctcaaaagtaaccatcactactgccatgtgttcaccgcctttgatgtgaatttagcttatgagattatcctcactcttgggcaggcgttcgaggttgcgtatcagttagcactgcaggcacggaaaggaggccactctagcacgctacctgaatcgttcgagaacaagcccagcaagccaattccaaaaccccgcgttagcatcaggaaatccgtcgacttgctacacgccagccatactggccaagagcctagtgagagacacaccgaggaagctttaagaaagttttag

SEQ ID NO: 292647 - DNA, 2295 bp, Artificial Sequence
  derived and/or modified sequence
atgctggcccaggagagctaccccaagaagcggaactacaccatggaaatcgtcccgtccgccagtttggatacattcccttccgagaacgaaaactttctgtgtgacctgatggacacggcagtcactaagaagccctgttcgctcgagatcgctcgggcgccttcacctcggactgataacgcctcagaagtggctgtcacaactcctgggactagcaaccacaggaacagctcgaccgggcccacgccagactgttcaccccccagccccgataccgccttaaagaacattgtgaaggtaattcgtccccagcctaagcagcggacctccatcgtctcctcacttgatttccacagaatgaaccacaaccaagagtatttcgaaatcaatacaagcacaggctgcacatcttttaccgcatccccacccgcaagcccacctacgagctcggtgggaaccacggaagtgaaaaatgaaggcactaaccatacagacgacttgtctcggcaagacgataacgatccgcccaaggagtacgaccccgggcagtttgctgggttgcttcacggtagctccccagcctgtgagtccccagagaatcctttccacctctacggcaaaagagagcagtgcgaaaaaggccaggatgaggtctcgctcgctaacagtcccctcccgttcaagcagtcccctatcgaaaataacagtgagcctttagttaaaaaaataaagcccaaggtggtgtcccgcaccattttccacaaaaaaagtaatcagctggaaaaccatacaattgtgggtactcgaagtaccagatcaggaagtcggaacggagatcaatgggtgatgaacgccggagggttcgtggagagggcgtgtacattgggacgaattcgcagcctaccgaaggcgctaatcgatatgcatctaagtaagagcgtttcaaaatctgattcagatctgattgcctatccgtccaatgaaaagacctctagggtaaattggtccgagtcttctaccgctgagcattcttcaaaaggcaatagcgagagaacgccctccttcaccagtgaatgggaggagatcgataaaatcatgtcttctattgatgtcggaatcaacaacgaactaaaagagatgaatggtccacgatgccctgtccagactgtcggccagtggctcgaaagtatcggactgcctcagtacgaaaaccatctgatggctaacgggttcgacaatgtgcaattcatggggtcaaatgtgatggaggaccaggacctcctggagattggtattctgaatagtggtcatcgccaacgcatcctccaggccatccagctcctgcccaagatgcgtccaattggccatgatgggtatcaccccacgtccgtggctgagtggttagatagcattgaactcggcgattataccaaggcgttcctgattaatggctacacatcgatggatctgctgaagaagatctgggaagtggaacttattaacgtgctgaagattaacctgatcgggcaccgaaagaggattctggcctccctgggcgatagactccatgatgacccacctcaaaagccccctaggtctattacactccgcactggggattggggggagccgagtattactctgagaccccccaacgaggcaaccgcaagtacccccgtgcaatattggcagcatcaccctgaaaaattgattttccaatcatgcgactacaaagcattttatctagggtccatgctgataaaagagttgagggggaccgagtccacccaggacgcctgtgcgaagatgcgagccaattgtcaaaaaagtaccgaacagatgaaaaaggtgcctacgatcattctgtccgtctcctacaagggagtgaaatttattgacgccactaacaaaaacataatagcagagcatgagatccggaacatctcttgcgccgctcaggaccctgaagatctgagtacatttgcctacatcacaaaggatctcaagagtaaccatcactactgccacgtgttcactgcctttgacgtgaaccttgcctatgaaatcattttaactctaggacaggcattcgaagtggcatatcagctcgcgttgcaggccaggaagggtgggcactcctctacccttcctgagagttttgaaaataagccgagcaaaccaattccaaagcccagagtatccatccgcaaatccgtggaccttctgcatgccagtcatacaggtcaggaacctagtgagcggcacactgaggaggccctccgtaaattctag

SEQ ID NO: 292648 - DNA, 2292 bp, Artificial Sequence
  derived and/or modified sequence
tcttttcaggagtcctatccaaagaagagaaattacactatggaaattgtaccatctgcttctctggatacatttccttcagaaaatgagaactttctgtgtgatctcatggacacagctgttacaaagaaaccttgctccttagaaattgcaagggcaccttccccaagaactgataatgcctctgaggtagcagttactactccaggaactagtaaccatagaaacagctcaacaggcccaacacctgattgttcacctccatcccctgatactgccctcaaaaatattgtaaaagtcattcgaccccagcctaaacagcgaacatccattgtgtcttctctggattttcaccgaatgaatcacaaccaagaatattttgaaatcaacacatctacagggtgcacaagctttactgccagtcctcctgctagtccacccacctcttctgtgggaaccacagaagtcaagaatgagggaactaaccatacagatgacctctcccgacaggatgacaatgatcccccaaaagaatatgatcctgggcaatttgcaggcctgctccatggatcctctccagcctgtgagtcccctgaaaatccatttcatctctatgggaaaagagaacaatgtgaaaaaggacaagatgaagtcagtttggcaaacagtcctttgcctttcaagcagtctccaatagaaaataactcagaacctttggtaaagaaaattaaacccaaagtggtcagtagaacaatttttcacaaaaaaagcaaccaactcgaaaaccataccattgttggcacaagatcaaccaggagtggatctcggaatggggaccagtgggttatgaacgcagggggatttgtggagagagcctgtactctggggagaataaggtcattgcctaaagccttgatcgacatgcatttgtcaaaaagtgtctctaaatctgattctgatctcattgcctatccttccaatgagaaaacatcaagagttaactggagtgaatcttccactgctgaacacagttctaaagggaattctgaaagaacaccatccttcacatcggaatgggaagaaattgacaaaataatgagttccatagatgttggaatcaacaacgaacttaaagagatgaatggacccagatgccctgtccaaacagtgggacaatggttggaaagcattgggctacctcagtacgagaaccacctgatggctaatggatttgacaatgtgcagtttatgggaagcaatgttatggaagatcaggatttgttggaaattggaatccttaattctgggcacagacaaagaattctacaggcaatccagctccttccaaagatgagacccattgggcatgatggctaccatcccacctctgtagctgagtggctggattccattgaactgggcgactacaccaaagcctttctaattaatggctacacttcgatggacctgttgaaaaaaatctgggaggttgaacttattaatgttttaaaaatcaatttgattggccacaggaaacgtattttggcatctctgggagacaggctgcacgacgatcccccacagaagccccctcggtccatcaccctcaggacaggagactggggagaaccttccattaccttgcgacctccgaatgaagccacagcctctaccccggtacagtactggcagcatcacccagaaaagcttatcttccagtcgtgtgattacaaagctttttatttaggttctatgctgataaaagagcttagggggacagaatcaacccaagatgcttgtgcaaaaatgcgggtaatgtgcgtgaagtctacagagcaaatgaagaaggtccctactattattctttctgtctcatataaaggagtcaaatttattgatgcaacaaataagaacataattgctgagcatgaaattcgtaatatctcctgtgctgcccaggacccagaagacctctcaacatttgcctatatcacaaaagatttgaagtctaatcaccactactgtcatgtgtttactgcctttgatgtgaatttagcctatgaaatcatcctaaccctgggacaggcattcgaagtcgcttaccagctagcactacaagcaagaaaagggggacactcctccacacttccagaaagctttgaaaacaaaccctccaaacccatccccaagccccgcgttagcattcgcaagtccgtggatcttcttcatgccagccataccgggcaggaaccatcagagagacacactgaggaggcactcagaaaattttga

SEQ ID NO: 292649 - DNA, 2595 bp, Artificial Sequence
  derived and/or modified sequence
ggcaaggactctgtgggggagtcggtgagagactatggggaaggaccaggagctgctggaagctgctcgcactggaaatgtggctctggtggagaaactcctgtctggcaggaaaggagggatcctgggcggtggatccggacccctgcccctgtctaatctgctaagagaacctcatctacaatcaatttgtcaccaggagaagtggaagaagaggatgatgatgaaaatacgtgtgggccatcaggactttgggaagcattaactccgtgtaatggatgtaggaaccttggcttccccatgcttgcccaggagtcctatccaaagaagagaaattacactatggaaattgtaccatctgcttctctggatacatttccttcagaaaatgagaactttctgtgtgatctcatggacacagctgttacaaagaaaccttgctccttagaaattgcaagggcaccttccccaagaactgataatgcctctgaggtagcagttactactccaggaactagtaaccatagaaacagctcaacaggcccaacacctgattgttcacctccatcccctgatactgccctcaaaaatattgtaaaagtcattcgaccccagcctaaacagcgaacatccattgtgtcttctctggattttcaccgaatgaatcacaaccaagaatattttgaaatcaacacatctacagggtgcacaagctttactgccagtcctcctgctagtccacccacctcttctgtgggaaccacagaagtcaagaatgagggaactaaccatacagatgacctctcccgacaggatgacaatgatcccccaaaagaatatgatcctgggcaatttgcaggcctgctccatggatcctctccagcctgtgagtcccctgaaaatccatttcatctctatgggaaaagagaacaatgtgaaaaaggacaagatgaagtcagtttggcaaacagtcctttgcctttcaagcagtctccaatagaaaataactcagaacctttggtaaagaaaattaaacccaaagtggtcagtagaacaatttttcacaaaaaaagcaaccaactcgaaaaccataccattgttggcacaagatcaaccaggagtggatctcggaatggggaccagtgggttatgaacgcagggggatttgtggagagagcctgtactctggggagaataaggtcattgcctaaagccttgatcgacatgcatttgtcaaaaagtgtctctaaatctgattctgatctcattgcctatccttccaatgagaaaacatcaagagttaactggagtgaatcttccactgctgaacacagttctaaagggaattctgaaagaacaccatccttcacatcggaatgggaagaaattgacaaaataatgagttccatagatgttggaatcaacaacgaacttaaagagatgaatggacccagatgccctgtccaaacagtgggacaatggttggaaagcattgggctacctcagtacgagaaccacctgatggctaatggatttgacaatgtgcagtttatgggaagcaatgttatggaagatcaggatttgttggaaattggaatccttaattctgggcacagacaaagaattctacaggcaatccagctccttccaaagatgagacccattgggcatgatggctaccatcccacctctgtagctgagtggctggattccattgaactgggcgactacaccaaagcctttctaattaatggctacacttcgatggacctgttgaaaaaaatctgggaggttgaacttattaatgttttaaaaatcaatttgattggccacaggaaacgtattttggcatctctgggagacaggctgcacgacgatcccccacagaagccccctcggtccatcaccctcaggacaggagactggggagaaccttccattaccttgcgacctccgaatgaagccacagcctctaccccggtacagtactggcagcatcacccagaaaagcttatcttccagtcgtgtgattacaaagctttttatttaggttctatgctgataaaagagcttagggggacagaatcaacccaagatgcttgtgcaaaaatgcgggctaactgtcagaagtctacagagcaaatgaagaaggtccctactattattctttctgtctcatataaaggagtcaaatttattgatgcaacaaataagaacataattgctgagcatgaaattcgtaatatctcctgtgctgcccaggacccagaagacctctcaacatttgcctatatcacaaaagatttgaagtctaatcaccactactgtcatgtgtttactgcctttgatgtgaatttagcctatgaaatcatcctaaccctgggacaggcattcgaagtcgcttaccagctagcactacaagcaagaaaagggggacactcctccacacttccagaaagctttgaaaacaaaccctccaaacccatccccaagccccgcgttagcattcgcaagtccgtggatcttcttcatgccagccataccgggcaggaaccatcagagagacacactgaggaggcactcagaaaattttga

SEQ ID NO: 292650 - DNA, 2292 bp, Artificial Sequence
  derived and/or modified sequence
tcctttcaagaatcatacccaaagaaaagaaactacacgatggaaatcgtgccctcagccagcctggacacttttccctctgagaacgagaattttctgtgtgatctaatggatactgcagtgaccaagaagccgtgctcactcgagatcgcgcgtgccccaagcccaaggacagacaatgcctctgaggtcgctgttacaacgcctgggacctccaatcacaggaatagctctaccgggcctacccccgactgcagtccaccatctccagacacggccctcaaaaacatcgtgaaggttattagaccacagccaaaacagaggacctccattgtaagcagcttggattttcaccgcatgaaccacaatcaggagtacttcgagataaacactagcacaggctgcaccagtttcacagcctctccacccgcaagccctcctacaagttctgtggggaccaccgaagtgaaaaatgagggaacaaatcacactgacgacctgtctaggcaggatgataacgaccctccaaaggaatacgaccccggtcagttcgccggtctgcttcacggaagctccccagcctgtgaatctcccgagaaccctttccacctctatgggaaaagagagcagtgtgaaaagggacaagatgaggttagcctggccaattccccgctgccctttaagcagagtcccattgaaaataacagtgagccacttgtgaagaaaattaaacctaaggtggttagccgaactatctttcacaagaaaagcaaccagctagaaaaccatacgattgtgggaaccagatccacccgcagtggaagtaggaacggcgaccagtgggtgatgaatgccggtggctttgtggagcgggcttgcacgttaggtcgtatccggtctctccctaaggcccttatcgatatgcacctgagcaaatcagtgagtaagagcgattcggacctgattgcctatccatccaacgagaaaacgtctagggttaattggtccgagtcctctaccgccgagcattcatcaaagggaaactcggaaagaactccgagtttcacaagtgaatgggaagagattgacaagataatgtcctctatcgatgttggcatcaataatgaactaaaagaaatgaacgggccacggtgtcccgttcagacagtgggacagtggcttgagtccattggcctcccccagtacgaaaaccacctgatggccaatggctttgacaatgtgcagtttatgggctctaatgtgatggaggatcaggatcttctggagataggaatcttaaattctggacaccggcagagaatccttcaggccatacagctgctcccgaagatgagacccattggccacgacgggtatcatccaacgagcgtggccgaatggctcgacagcatcgagctgggagactacaccaaagcgtttttaataaatggttatactagtatggatttgttgaagaaaatttgggaagttgaactgattaacgtgttaaagatcaatttgattggccaccgcaagcgaatcttagcgagtttgggcgaccgcctgcacgacgacccaccgcaaaaaccgcctcggtcaataaccctccgcaccggagattggggagaaccaagcatcaccttacgcccacctaatgaggctaccgcgtccacaccagtgcagtattggcaacaccaccctgaaaagctgattttccagtcttgcgactataaagctttctacctgggctcgatgttaattaaggagctgcgaggaacagagtcaactcaggatgcatgcgctaaaatgcgcgtgatgtgtgtcaagtctactgagcagatgaagaaggtgcctaccataatcctgtcggtcagctataaaggcgtcaagttcatagacgcaaccaacaagaatatcatcgcggaacacgaaattagaaatatctcgtgtgccgctcaggatcccgaggacctgtccacctttgcgtacattactaaagacctgaagtctaaccatcattattgccacgtgttcacagctttcgatgtgaatcttgcatatgagatcatactgactctcggacaggccttcgaggtcgcttaccagctcgccctgcaggccagaaagggtggacacagctcaacactcccggagtcattcgaaaacaagccgtcaaagccaatccccaagccgcgtgtgagcatcaggaaatcagtggacttattgcatgcctcacacaccggacaggagccatctgagaggcacactgaagaggcccttcgcaaattttag

SEQ ID NO: 292651 - DNA, 2295 bp, Artificial Sequence
  derived and/or modified sequence
atgctggcccaggaatcgtacccaaaaaagcgcaattatacgatggaaattgtgccgagcgcctctctggatacattccccagcgaaaacgagaacttcctttgcgacctaatggacaccgctgtcaccaaaaaaccttgctcccttgagatcgccagggctccaagcccgagaactgacaacgcctcagaggttgctgtaacaacacccggaacctccaaccaccggaacagttccaccggcccaacccctgactgttcgcctccttctcctgacacagccctcaaaaacatagttaaagtgataaggccgcagcctaaacagcgtacatcaatagtaagttcactcgattttcatagaatgaaccataaccaagagtacttcgagattaatacttccacggggtgtactagttttaccgcatctccacctgcatctccaccaacctccagcgtcgggactacagaagtaaagaacgaaggcaccaatcacacggatgacttgtcaaggcaagacgacaatgaccctccaaaagagtacgatcccggacagtttgcaggtttactgcatggaagctcccccgcttgcgagtcacctgagaatccatttcatctgtacggtaaacgggaacagtgcgagaaggggcaggatgaggtatccctggctaactcgcctttgccctttaaacaaagcccaattgaaaataactctgaacctctggtcaaaaaaataaagcccaaggtggtttccagaacaatcttccacaagaaatctaatcaactcgaaaatcacaccatcgtaggcaccaggagcaccagatcaggatctcgaaatggggaccagtgggttatgaatgccggaggtttcgtggaaagagcctgcactctcggacgaattagaagcttaccaaaagcgctgattgacatgcacctgtccaaatccgtgtcaaagagcgattctgatctgatagcctatccatcaaacgagaaaacgtcccgtgttaattggtccgagtccagtactgcagagcactctagtaaaggaaactcagagcgcacaccatcattcactagtgaatgggaggagatagacaagattatgtcttcaatcgacgttggcatcaataacgaactgaaggagatgaatggcccacgatgcccagttcagaccgttggtcagtggctggagagcatcggactgccacaatatgagaatcacctgatggccaatggtttcgacaacgtccaattcatgggctcaaatgtaatggaggaccaggacttgctggaaattgggatcctcaatagtggccacagacaacgtatactccaggccatccaactcctgccaaagatgagacctatcggtcacgatggctaccatcccacctctgtggcagaatggctggatagtatcgagctgggagactatactaaggcatttcttattaacggctacacctcaatggacctcttgaaaaagatatgggaggtggaattgataaacgtcctgaagatcaatctgatcgggcacagaaagaggatcttagcctctttgggggaccgccttcatgatgacccccctcaaaagcctccacgaagtatcactctccggaccggcgactggggtgaaccctctattactctgcggccaccaaacgaagcaaccgcttccacccctgtccaatactggcagcaccaccccgagaaactgatctttcaatcttgcgactacaaagccttttatctaggctcaatgctgattaaagagctcagggggaccgaatcaactcaagacgcctgtgccaagatgcgcgctaactgccaaaaaagtactgaacaaatgaaaaaagttccaaccataatcctgtctgtgtcttacaagggagttaagttcatcgacgccacaaacaaaaatatcatcgccgagcatgaaattaggaatatatcatgtgctgcccaggacccagaggacttgtctacctttgcgtacattacgaaagacctcaagagcaatcatcactactgtcatgtgttcacagccttcgacgtgaacctagcgtatgagatcattctgacgctcggacaggcttttgaagttgcataccagctcgccctccaggccagaaagggtggccacagttccacactgcccgagagtttcgaaaataaaccctccaagcctattcccaaaccacgtgtgtcaattcgcaagtctgtcgatctgctccacgcctctcatactggccaggagccctccgaaaggcataccgaggaggctttgcgtaaattttag

SEQ ID NO: 292652 - DNA, 2292 bp, Artificial Sequence
  derived and/or modified sequence
agcttccaggagagctaccccaagaagagaaactacaccatggagatcgtgcccagcgccagcctggacaccttccccagcgagaacgagaacttcctgtgcgacctgatggacaccgccgtgaccaagaagccctgcagcctggagatcgccagagcccccagccccagaaccgacaacgccagcgaggtggccgtgaccacccccggcaccagcaaccacagaaacagcagcaccggccccacccccgactgcagcccccccagccccgacaccgccctgaagaacatcgtgaaggtgatcagaccccagcccaagcagagaaccagcatcgtgagcagcctggacttccacagaatgaaccacaaccaggagtacttcgagatcaacaccagcaccggctgcaccagcttcaccgccagcccccccgccagcccccccaccagcagcgtgggcaccaccgaggtgaagaacgagggcaccaaccacaccgacgacctgagcagacaggacgacaacgacccccccaaggagtacgaccccggccagttcgccggcctgctgcacggcagcagccccgcctgcgagagccccgagaaccccttccacctgtacggcaagagagagcagtgcgagaagggccaggacgaggtgagcctggccaacagccccctgcccttcaagcagagccccatcgagaacaacagcgagcccctggtgaagaagatcaagcccaaggtggtgagcagaaccatcttccacaagaagagcaaccagctggagaaccacaccatcgtgggcaccagaagcaccagaagcggcagcagaaacggcgaccagtgggtgatgaacgccggcggcttcgtggagagagcctgcaccctgggcagaatcagaagcctgcccaaggccctgatcgacatgcacctgagcaagagcgtgagcaagagcgacagcgacctgatcgcctaccccagcaacgagaagaccagcagagtgaactggagcgagagcagcaccgccgagcacagcagcaagggcaacagcgagagaacccccagcttcaccagcgagtgggaggagatcgacaagatcatgagcagcatcgacgtgggcatcaacaacgagctgaaggagatgaacggccccagatgccccgtgcagaccgtgggccagtggctggagagcatcggcctgccccagtacgagaaccacctgatggccaacggcttcgacaacgtgcagttcatgggcagcaacgtgatggaggaccaggacctgctggagatcggcatcctgaacagcggccacagacagagaatcctgcaggccatccagctgctgcccaagatgagacccatcggccacgacggctaccaccccaccagcgtggccgagtggctggacagcatcgagctgggcgactacaccaaggccttcctgatcaacggctacaccagcatggacctgctgaagaagatctgggaggtggagctgatcaacgtgctgaagatcaacctgatcggccacagaaagagaatcctggccagcctgggcgacagactgcacgacgaccccccccagaagccccccagaagcatcaccctgagaaccggcgactggggcgagcccagcatcaccctgagaccccccaacgaggccaccgccagcacccccgtgcagtactggcagcaccaccccgagaagctgatcttccagagctgcgactacaaggccttctacctgggcagcatgctgatcaaggagctgagaggcaccgagagcacccaggacgcctgcgccaagatgagagtgatgtgcgtgaagagcaccgagcagatgaagaaggtgcccaccatcatcctgagcgtgagctacaagggcgtgaagttcatcgacgccaccaacaagaacatcatcgccgagcacgagatcagaaacatcagctgcgccgcccaggaccccgaggacctgagcaccttcgcctacatcaccaaggacctgaagagcaaccaccactactgccacgtgttcaccgccttcgacgtgaacctggcctacgagatcatcctgaccctgggccaggccttcgaggtggcctaccagctggccctgcaggccagaaagggcggccacagcagcaccctgcccgagagcttcgagaacaagcccagcaagcccatccccaagcccagagtgagcatcagaaagagcgtggacctgctgcacgccagccacaccggccaggagcccagcgagagacacaccgaggaggccctgagaaagttctag

SEQ ID NO: 292653 - DNA, 2295 bp, Artificial Sequence
  derived and/or modified sequence
atgctggcccaggagagctaccccaagaagagaaactacaccatggagatcgtgcccagcgccagcctggacaccttccccagcgagaacgagaacttcctgtgcgacctgatggacaccgccgtgaccaagaagccctgcagcctggagatcgccagagcccccagccccagaaccgacaacgccagcgaggtggccgtgaccacccccggcaccagcaaccacagaaacagcagcaccggccccacccccgactgcagcccccccagccccgacaccgccctgaagaacatcgtgaaggtgatcagaccccagcccaagcagagaaccagcatcgtgagcagcctggacttccacagaatgaaccacaaccaggagtacttcgagatcaacaccagcaccggctgcaccagcttcaccgccagcccccccgccagcccccccaccagcagcgtgggcaccaccgaggtgaagaacgagggcaccaaccacaccgacgacctgagcagacaggacgacaacgacccccccaaggagtacgaccccggccagttcgccggcctgctgcacggcagcagccccgcctgcgagagccccgagaaccccttccacctgtacggcaagagagagcagtgcgagaagggccaggacgaggtgagcctggccaacagccccctgcccttcaagcagagccccatcgagaacaacagcgagcccctggtgaagaagatcaagcccaaggtggtgagcagaaccatcttccacaagaagagcaaccagctggagaaccacaccatcgtgggcaccagaagcaccagaagcggcagcagaaacggcgaccagtgggtgatgaacgccggcggcttcgtggagagagcctgcaccctgggcagaatcagaagcctgcccaaggccctgatcgacatgcacctgagcaagagcgtgagcaagagcgacagcgacctgatcgcctaccccagcaacgagaagaccagcagagtgaactggagcgagagcagcaccgccgagcacagcagcaagggcaacagcgagagaacccccagcttcaccagcgagtgggaggagatcgacaagatcatgagcagcatcgacgtgggcatcaacaacgagctgaaggagatgaacggccccagatgccccgtgcagaccgtgggccagtggctggagagcatcggcctgccccagtacgagaaccacctgatggccaacggcttcgacaacgtgcagttcatgggcagcaacgtgatggaggaccaggacctgctggagatcggcatcctgaacagcggccacagacagagaatcctgcaggccatccagctgctgcccaagatgagacccatcggccacgacggctaccaccccaccagcgtggccgagtggctggacagcatcgagctgggcgactacaccaaggccttcctgatcaacggctacaccagcatggacctgctgaagaagatctgggaggtggagctgatcaacgtgctgaagatcaacctgatcggccacagaaagagaatcctggccagcctgggcgacagactgcacgacgaccccccccagaagccccccagaagcatcaccctgagaaccggcgactggggcgagcccagcatcaccctgagaccccccaacgaggccaccgccagcacccccgtgcagtactggcagcaccaccccgagaagctgatcttccagagctgcgactacaaggccttctacctgggcagcatgctgatcaaggagctgagaggcaccgagagcacccaggacgcctgcgccaagatgagagccaactgccagaagagcaccgagcagatgaagaaggtgcccaccatcatcctgagcgtgagctacaagggcgtgaagttcatcgacgccaccaacaagaacatcatcgccgagcacgagatcagaaacatcagctgcgccgcccaggaccccgaggacctgagcaccttcgcctacatcaccaaggacctgaagagcaaccaccactactgccacgtgttcaccgccttcgacgtgaacctggcctacgagatcatcctgaccctgggccaggccttcgaggtggcctaccagctggccctgcaggccagaaagggcggccacagcagcaccctgcccgagagcttcgagaacaagcccagcaagcccatccccaagcccagagtgagcatcagaaagagcgtggacctgctgcacgccagccacaccggccaggagcccagcgagagacacaccgaggaggccctgagaaagttctag

SEQ ID NO: 292654 - protein, 392 aa, Artificial Sequence
  derived and/or modified sequence
MAERGLEPSPAAVAALPPEVRAQLAELELELSEGDITQKGYEKKRSKLLSPYSPQTQETDSAVQKELRNQTPAPSAAQTSAPSKYHRTRSGGARDERYRSEFSLVRIYSEDIHTEAVQAALAKHKEQKMALPMPTKRRSTFVQSPADACTPPDTSSASEDEGSLRRQAALSAALQQSLQNAESWINRSIQGSSTSSSASSTLSHGEVKGTSGSLADVFANTRIENFSAPPDVTTTTSSSSSSSSIRPANIDLPPSGIVKGMHKGSNRSSLMDTADGVPVSSRVSTKIQQLLNTLKRPKRPPLKEFFVDDSEEIVEVPQPDPNQPKPEGRQMTPVKGEPLGVICNWPPALESALQRWGTTQAKCSCLTALDMTGKPVYTLTYGESARFQILLS

SEQ ID NO: 292655 - DNA, 1179 bp, Artificial Sequence
  derived and/or modified sequence
atggcagaacgggggctggaacctagccccgccgccgtggcggcacttcctccagaagttcgcgcgcagttggctgaacttgagttggaacttagcgagggcgatataactcaaaagggatatgagaagaagcgctctaaactgctgagtccctatagcccccagactcaggaaactgattcagcagttcaaaaggaactccgaaaccagacccccgcccccagcgccgcccaaacaagcgctcctagcaaataccaccggacgagaagcggtggggctcgcgacgagcggtatcgaagcgagttttcactagtccgcatctactcagaagatatccacactgaagccgtacaggcggcactcgcaaaacacaaggagcaaaaaatggctctgccaatgccaaccaagcggaggtcaacattcgtccagagccctgctgatgcctgcaccccacctgacacgagcagtgccagtgaggatgagggctccctaaggagacaggcagccctttccgcagctctgcaacagagcctgcaaaacgcggaaagttggatcaatcggagtatccagggatccagtacgtcgagctccgcgtcctcaactctcagccacggtgaagtgaaaggcacatccggatctctggccgatgtgttcgcaaataccagaattgagaatttttcagcacctccagacgtgaccaccaccacgtcaagctcttccagcagcagtagcatccggccagctaatattgatttacccccatcaggcatagtcaaaggtatgcacaagggcagtaacaggagttcactgatggacaccgcggacggcgtgcctgttagctctcgtgtgtccaccaaaattcaacagttgctcaatactctaaaaagaccaaagagaccacctttgaaagaatttttcgtggacgactccgaggaaatcgtagaagtgccccagcccgaccctaaccaaccgaagccagaggggagacagatgacccccgttaagggcgaaccattaggggttatttgcaactggccacctgcactcgagtccgccctgcagagatggggcaccacccaggccaagtgttcctgcttgacggcgctggatatgaccggtaaaccagtatacaccctcacttacggtgaatctgcccgatttcagattctactgagttag

SEQ ID NO: 292656 - DNA, 1179 bp, Artificial Sequence
  derived and/or modified sequence
atggccgagcggggcctggagcccagccctgctgctgtggccgccctgcccccagaggtgcgggcccagctggccgagctggagctggagctgtctgagggggacatcacccagaagggctatgagaagaagaggagcaagctgctgagcccctacagcccccagacccaggagacagattctgctgtgcagaaggagctgaggaaccagaccccagcccccagcgctgcccagaccagcgcccccagcaagtaccacaggaccaggtctgggggcgccagagatgagcgctacagaagtgagttcagcctggtgcgcatctacagcgaggacatccacacagaggccgtgcaggccgccctggccaagcacaaggagcagaagatggccctgcccatgcccaccaagagaagaagcacctttgtgcagagccctgcagatgcctgcaccccaccagacaccagcagcgcctctgaagatgagggcagcctgcggcggcaggccgccctgtctgctgccctgcagcagagcctgcagaatgctgagagctggatcaacagaagcatccagggcagcagcaccagcagcagcgccagcagcaccctgagccacggggaggtgaagggcaccagcggcagcctggctgatgtgtttgccaacaccagaattgagaacttcagcgcccccccagatgtgaccaccaccaccagcagcagcagcagcagcagcagcatccggcctgccaacatcgacctgcccccatctggaattgtgaagggcatgcacaagggcagcaacagaagcagcctgatggacacagcagatggagtgcctgtgagcagccgggtgtccaccaagatccagcagctgctgaacaccctgaagaggcccaagaggcctcccctgaaggagttctttgtggatgacagcgaggagatcgtggaggtgccccagcctgaccccaaccagcccaagccagagggccggcagatgacccctgtgaagggggagcccctgggcgtcatctgcaactggcccccagccctggagagcgccctgcagcgctggggcaccacccaggccaagtgcagctgcctgacagccctggacatgaccgggaagcctgtgtacaccctgacctatggagagagcgcccgcttccagatcctgctgtcctag

SEQ ID NO: 292657 - DNA, 1179 bp, Artificial Sequence
  derived and/or modified sequence
atggccgagcggggcctggagcccagccccgccgccgtggccgcccttccgcctgaggtgcgggcccagctggctgagttggagctggagctgagcgaaggagacataacacagaaaggctatgagaagaagcgatctaagctcctgtctccatattctccacagacccaagaaacggactcggcagtccagaaagagttgaggaatcaaactcccgctcccagcgcagcacaaactagtgccccaagcaaatatcatcggactaggtccgggggagcccgcgacgagagataccgcagcgagtttagtctcgtccgcatttactccgaggacatccacactgaagcagtgcaggctgcacttgcaaaacacaaggaacaaaaaatggccctgcctatgcccaccaagcggcgcagcacctttgttcaatctccagccgatgcctgtacccctccagatacctcgtcagcttccgaagatgaggggagcttgaggcggcaggcggctctgtccgccgcattacaacaaagcctacagaatgccgaatcatggataaataggagcatacagggctcctctacatcttcatcagcaagcagtacgctttcccacggtgaagtgaaagggacctcgggatctctcgctgacgtgtttgcaaacacacgcatcgagaatttttctgcccctcctgatgtgaccaccaccacatcgagcagctcctcgtcctcgtccatccggcccgctaatattgacctccctccctctgggattgtaaagggcatgcacaagggaagtaatagatcgtccctgatggacacagcagatggcgtgccagtgagtagccgggtttcgactaaaattcaacagctcctgaacacactcaaacgccccaaaagaccccctttgaaggagtttttcgtcgacgatagcgaagagatcgtggaggttccccagccagatccaaaccaacctaagcctgagggccggcagatgacgccagtgaagggcgaacctctgggggtgatatgcaactggccccccgcccttgaatcagccctacaacgatgggggacaacccaggccaagtgttcttgcttaacggctctggacatgaccggaaagcccgtatatacgctgacttatggagagtcagcaagattccagatcctgctgagctag

SEQ ID NO: 292658 - DNA, 1179 bp, Artificial Sequence
  derived and/or modified sequence
atggccgagcgtggattggaacccagcccagctgcggtggcagctctgccgcctgaggttagggcgcagctggccgagctggagctcgagctgtctgaaggggacatcactcagaaaggttacgaaaagaagagatctaagctactgtctccatattccccacaaactcaggagacggactcggctgtgcagaaagaactcaggaaccagacacctgctccttcagcggctcagacatcagctccctctaaatatcaccgtacaaggtctggtggagcacgggatgaacgctaccgaagtgagttcagtcttgtccgtatctattctgaagatattcataccgaagccgttcaggccgcattggccaagcacaaagagcaaaaaatggccttaccaatgcccacaaaaaggagatccaccttcgtgcagtcccccgctgacgcatgtacgccccctgacacaagcagcgcctctgaagacgagggctcccttaggagacaggctgcgctttcagcggctctgcagcagtccctgcaaaatgctgaatcatggatcaatcggagcatccagggctcatctacatcaagtagcgcgtccagcacgttatcccacggggaagtcaaaggtacctcagggagcctggcagatgtgtttgcaaatactcgaatagagaactttagcgctccccctgatgtcactaccaccactagctcctcctcttctagcagctccatccgccctgctaacatcgacctcccaccttctggtatcgttaaggggatgcataaaggatcaaatcgctcctccttgatggatacagccgacggcgtgcccgtgtcatctcgagtgtccactaagatacagcaactcctcaacacgctgaagcgccctaagcgccctcccctgaaggagttttttgttgatgattcagaggagattgttgaagtgccccaacccgaccctaatcagccgaagcccgaaggacggcagatgaccccggtgaaaggggagcctttaggcgttatttgtaattggccgccagccttggagtccgcactccagagatggggcaccacgcaggctaagtgttcatgcttaacggctttggacatgacggggaagcccgtgtatactctgacatatggcgaatcagcacggttccagattctgctgtcctag

SEQ ID NO: 292659 - DNA, 1179 bp, Artificial Sequence
  derived and/or modified sequence
atggccgagagaggcctggagcccagccccgccgccgtggccgccctgccccccgaggtgagagcccagctggccgagctggagctggagctgagcgagggcgacatcacccagaagggctacgagaagaagagaagcaagctgctgagcccctacagcccccagacccaggagaccgacagcgccgtgcagaaggagctgagaaaccagacccccgcccccagcgccgcccagaccagcgcccccagcaagtaccacagaaccagaagcggcggcgccagagacgagagatacagaagcgagttcagcctggtgagaatctacagcgaggacatccacaccgaggccgtgcaggccgccctggccaagcacaaggagcagaagatggccctgcccatgcccaccaagagaagaagcaccttcgtgcagagccccgccgacgcctgcaccccccccgacaccagcagcgccagcgaggacgagggcagcctgagaagacaggccgccctgagcgccgccctgcagcagagcctgcagaacgccgagagctggatcaacagaagcatccagggcagcagcaccagcagcagcgccagcagcaccctgagccacggcgaggtgaagggcaccagcggcagcctggccgacgtgttcgccaacaccagaatcgagaacttcagcgccccccccgacgtgaccaccaccaccagcagcagcagcagcagcagcagcatcagacccgccaacatcgacctgccccccagcggcatcgtgaagggcatgcacaagggcagcaacagaagcagcctgatggacaccgccgacggcgtgcccgtgagcagcagagtgagcaccaagatccagcagctgctgaacaccctgaagagacccaagagaccccccctgaaggagttcttcgtggacgacagcgaggagatcgtggaggtgccccagcccgaccccaaccagcccaagcccgagggcagacagatgacccccgtgaagggcgagcccctgggcgtgatctgcaactggccccccgccctggagagcgccctgcagagatggggcaccacccaggccaagtgcagctgcctgaccgccctggacatgaccggcaagcccgtgtacaccctgacctacggcgagagcgccagattccagatcctgctgagctag

SEQ ID NO: 292660 - DNA, 1335 bp, Artificial Sequence
  derived and/or modified sequence
acgtgacctttgctcatggcggcggcggcggcggcggcggtgctggtggtgctcggcggccggagccggatcctgtagccgggtgtgggcccgtgtctgtccgtccctccttcggccccctctcttgtcttccggagtgtggctggcggagctgggatggcggaacgaggcctggagccgtcgccggccgcggtggcggcgctgccgcctgaagtgcgggcgcagctggcggagctggagctggagctctcggagggggacatcacccagaagggctatgaaaagaaaaggtccaaactcctatctccttacagcccgcagacacaagaaactgattcagcagtacagaaagaacttagaaaccagacacctgctccatctgcagctcaaacttctgctccctctaagtaccaccgaactcgatctgggggagccagggatgaacgatatcgatcagaattctctcttgtcagaatttactctgaagatatccacacagaagcagttcaggctgcactggcaaagcataaagaacagaagatggctttgcccatgccaaccaaaaggcgatccacatttgttcagtctcctgcagatgcctgcacacctcctgacacatcttcggcctctgaggatgagggctctctgagacgccaagctgcgctctctgctgccttgcaacagagcttacagaatgctgagtcctggatcaaccgttcaattcagggatcgtccacttcttcatccgcatcttctacgctgtcccacggagaggtcaaaggaaccagtgggtctctagctgatgtatttgccaatactcgaatagagaatttctctgctcctcctgatgtcactacaactacctcttcctcctcatcatcttcctcaattcgcccagcaaacattgacctgcccccctcggggatagttaaaggcatgcacaaaggatccaacaggtccagccttatggatacagctgatggtgttcctgtcagtagcagagtatctacaaaaatccagcagcttctgaacactctgaaacgacccaaaaggcctcccttaaaggaattttttgtggatgactctgaagaaattgtggaagtacctcagccagaccccaaccagcccaagccggagggacggcagatgacccctgtgaaaggagagcctttaggagtcatctgtaactggcctcctgctcttgaatctgccctgcagcgctggggtaccactcaagcaaaatgctcctgtctgactgcactggacatgacagggaaaccagtttacactcttacatatggtgagtctgcaagattccagatccttctctcctga

SEQ ID NO: 292661 - protein, 216 aa, Artificial Sequence
  derived and/or modified sequence
MTSRRWFHPNITGVEAENLLLTRGVDGSFLARPSKSNPGDFTLSVRRNGAVTHIKIQNTGDYYDLYGGEKFATLAELVQYYMEHHGQLKEKNGDVIELKYPLNCADPTSERWFHGHLSGKEAEKLLTEKGKHGSFLVRESQSHPGDFVLSVRTGDDKGESNDGKSKVTHVMIRCQELKYDVGGGERFDSLTDLVEHYKKNPMVETLGTVLQLKQPL

SEQ ID NO: 292662 - protein, 233 aa, Artificial Sequence [sequence omitted]

SEQ ID NO: 292663 - protein, 288 aa, Artificial Sequence [sequence omitted]

SEQ ID NO: 292664 - protein, 105 aa, Artificial Sequence
  derived and/or modified sequence
MAGEKVEKPDTKEKKPEAKKVDAGGKVKKGNLKAKKPKKGKPHCSRNPVLVRGIGRYSRSAMYSRKAMYKRKYSAAKSKVEKKKKEKVLATVTKPVGGDKNGGTR

SEQ ID NO: 292665 - protein, 72 aa, Artificial Sequence
  derived and/or modified sequence
MAGEKVEKPDTKEKKPEAKKVDAGGKVKKGNLKAKKPKKGKPHCSRNPVLVRGIGRYSRSAMYSRKAMYKRK

SEQ ID NO: 292666 - protein, 159 aa, Artificial Sequence
  derived and/or modified sequence
MAGEKVEKPDTKEKKPEAKKVDAGGKVKKGNLKAKKPKKGKPHCSRNPVLVRGIGRYSRSAMYSRKAMYKRKYSAAKSKVEKKKKEKVLATVTKPVGGDKNGGTRVVKLRKMPRYYPTEDVPRKLLSHGKKPFSQHVRKLRASITPGTILIILTGRHRG

SEQ ID NO: 292667 - protein, 114 aa, Artificial Sequence
  derived and/or modified sequence
MAGEKVEKPDTKEKKPEAKKVDAGGKVKKGNLKAKKPKKGKPHCSRNPVLVRGIGRYSRSAMYSRKAMYKRKYSAAKSKVEKKKKEKVLATVTKPVGGDKNGGTRVVKLRKMVR

SEQ ID NO: 292668 - DNA, 867 bp, Artificial Sequence
  derived and/or modified sequence
atggctggcgaaaaagtcgagaaacccgacacaaaggaaaagaagccagaggccaagaaagtggacgccggagggaaagttaagaaaggaaatctgaaggccaagaaacccaagaaagggaagccccattgttccagaaatcccgtgttggttcggggaatcgggaggtactcccgatccgccatgtacagccgaaaggccatgtacaaaaggaaatattcagccgctaagagtaaggtggagaagaaaaagaaggagaaggtgctagctaccgtgactaaacccgttggaggcgataaaaacggagggacacgagtggtgaagctgagaaagatgcctcggtactaccccactgaggacgtgccacgcaaactcctcagccacggaaagaaaccgtttagccagcatgttcgtaaattaagggcgagcatcacccccggcaccatactcatcatcctgaccggccgacacaggggcaaaagagtcgtcttcctgaagcagctggcctcaggcctgctcctggtcactggcccactcgtgttgaaccgcgtgcccctgcgtagaacccatcaaaagttcgtgatagccactagcacgaaaatcgacatatctaatgtgaaaattcctaagcacctgacagatgcatactttaaaaaaaaaaagttgcggaaacctaggcaccaggaaggggagattttcgatacagagaaggagaagtacgagattacagagcagcgcaagattgatcagaaggctgtggattcccagatactgcccaagataaaggccattccccaactgcaaggctacctgagaagcgtgttcgccttgaccaacggcatctatccccacaaactggtcttttag

SEQ ID NO: 292669 - DNA, 867 bp, Artificial Sequence
  derived and/or modified sequence
atggccggagagaaggtcgagaagcctgacactaaggaaaaaaaacccgaagccaagaaggtggacgctggtggcaaggtgaagaagggaaacctgaaagccaaaaaaccaaagaaggggaaaccacactgtagccgaaaccccgtgctcgtaagaggaatcggacggtactctcggtctgcaatgtattctagaaaggcgatgtacaagaggaaatacagtgccgccaagagcaaagttgaaaaaaagaagaaagagaaagttctcgctactgtcactaagccggtgggtggagacaaaaacggggggactcgagtggtaaaacttaggaaaatgccgcgttactatccaactgaagatgtccctaggaagctgctctcccacggaaagaagcctttttctcagcacgtcaggaagcttcgcgcttccatcaccccgggcaccatccttattatccttacagggcgtcatcgagggaagagagtggtgtttttaaaacagctggcatctgggctccttctggtaaccggtccactcgtgcttaaccgtgttcctctgcgaagaacacatcagaagttcgtgatagcgacctccacaaagattgacatctccaacgtgaagattcccaaacatctgaccgacgcctatttcaagaagaaaaaactgaggaaaccccgacatcaggaaggggagatctttgataccgaaaaggagaagtacgaaattactgaacagcggaagatcgatcagaaagcagtggattcacagatcctccccaagattaaagccattcctcaattacagggttacctgcgcagcgtattcgccttgacaaatgggatctatcctcacaagttggtgttttag

SEQ ID NO: 292670 - DNA, 318 bp, Artificial Sequence
  derived and/or modified sequence
atggctggggaaaaagtcgagaagccagacactaaggagaagaagcctgaagccaagaaagtggatgccggcggaaaggtgaaaaagggcaatctaaaggctaagaaacctaagaaaggaaagccacattgctcaagaaaccccgtgttggtgcggggtatcggaaggtactccagatccgcaatgtacagcaggaaagcaatgtacaagcggaaatactctgccgctaaaagtaaggttgaaaagaagaagaaagagaaggtcctcgccacagtgaccaagcctgtggggggggataaaaacggaggtacacgttag

SEQ ID NO: 292671 - DNA, 219 bp, Artificial Sequence
  derived and/or modified sequence
atggctggcgagaaagtggaaaaacccgataccaaagaaaagaaaccggaggcaaaaaaggtcgatgccggcggcaaggtgaaaaagggcaacctaaaggccaagaagcccaagaaaggcaagccacactgttcaagaaacccagtgctcgtcagaggaataggacgctattctcgctctgcgatgtactccaggaaagcaatgtataagcgcaagtag

SEQ ID NO: 292672 - DNA, 480 bp, Artificial Sequence
  derived and/or modified sequence
atggcaggcgaaaaggtggaaaagcccgacacgaaagagaagaagcctgaagccaagaaggtggacgctggcggtaaggtgaaaaagggaaatctgaaggcaaaaaagcctaagaaaggcaagccacactgcagtaggaatccagtgctggtcagaggtatcggtaggtactcccgaagcgctatgtattccaggaaagctatgtataagcggaagtactcagccgctaagtctaaagtggagaagaaaaagaaggaaaaagtgttagctacggtgacaaaaccagtgggtggagacaagaacggtggcacgagggtggtcaagctgagaaagatgccaaggtattatccaacggaagacgtgccccgcaaacttctgtcacacgggaaaaagccattttctcagcatgtgcggaaattgcgggctagcattacgccaggcaccatcctaataatcctgaccggccggcaccgcggctag

SEQ ID NO: 292673 - DNA, 345 bp, Artificial Sequence
  derived and/or modified sequence
atggctggcgagaaagtcgaaaagccggacactaaggaaaagaaacccgaagcaaaaaaggtcgacgccggcggaaaagttaagaagggcaatttgaaagccaaaaagccaaagaagggcaagcctcattgttcaagaaatcccgtactggtacggggtattgggaggtactcaagatctgccatgtattctcggaaagctatgtataagagaaaatattcagccgccaagtccaaagtcgagaaaaaaaaaaaggaaaaggttctggccaccgttacaaagcctgtggggggagacaaaaacggtggaacacgtgtggtcaaactgaggaagatggtccgatag

SEQ ID NO: 292674 - DNA, 345 bp, Artificial Sequence
  derived and/or modified sequence
atggctggcgagaaggtggagaaaccggatacgaaagaaaaaaagcctgaagctaagaaagtggatgcagggggcaaggtcaagaaaggcaatcttaaggccaagaaaccaaagaagggaaagcctcattgtagccgtaaccccgtgctggtgcggggaatcggcagatatagtagatccgctatgtacagtcgaaaagcaatgtataaaagaaagtacagtgcagctaaatccaaagtggagaaaaagaaaaaagagaaagtcctggctaccgtgactaagcctgtcggcggagataaaaatgggggaacccgcgtggtaaaactgagaaagatggtacgctag

SEQ ID NO: 292675 - DNA, 867 bp, Artificial Sequence
  derived and/or modified sequence
atggccggggagaaggtggagaagccagacaccaaggagaagaagccagaggccaagaaggtggatgctgggggcaaggtgaagaagggcaacctgaaggccaagaagcccaagaagggcaagccccactgcagcaggaaccctgtgctggtgcggggcatcggccgctacagccgcagcgccatgtacagcaggaaggccatgtacaagaggaagtacagcgctgccaagagcaaggtggagaagaagaagaaggagaaggtgctggccaccgtgaccaagcctgtgggcggggacaagaatggaggcaccagggtggtgaagctgaggaagatgccccgctactaccccacagaagatgtgcccaggaagctgctgagccacggcaagaagcccttcagccagcacgtgaggaagctgcgggccagcatcaccccaggcaccatcctgatcatcctgaccggccgccaccggggcaagagggtggtgttcctgaagcagctggccagcggcctgctgctggtgacaggccccctggtgctgaacagagtgcccctgcggaggacccaccagaagtttgtgattgccaccagcaccaagattgacatcagcaatgtgaagatccccaagcacctgacagatgcctacttcaagaagaagaagctgaggaagcccaggcaccaggagggggagatctttgacacagagaaggagaagtatgagatcacagagcagaggaagattgaccagaaggctgtggacagccagatcctgcccaagatcaaggccatcccccagctgcagggctacctgcggtctgtgtttgccctgaccaacggcatctacccccacaagctggtgttctag

SEQ ID NO: 292676 - DNA, 318 bp, Artificial Sequence
  derived and/or modified sequence
atggccggggagaaggtggagaagccagacaccaaggagaagaagccagaggccaagaaggtggatgctgggggcaaggtgaagaagggcaacctgaaggccaagaagcccaagaagggcaagccccactgcagcaggaaccctgtgctggtgcggggcatcggccgctacagccgcagcgccatgtacagcaggaaggccatgtacaagaggaagtacagcgctgccaagagcaaggtggagaagaagaagaaggagaaggtgctggccaccgtgaccaagcctgtgggcggggacaagaatggaggcaccaggtag

SEQ ID NO: 292677 - DNA, 219 bp, Artificial Sequence
  derived and/or modified sequence
atggccggggagaaggtggagaagccagacaccaaggagaagaagccagaggccaagaaggtggatgctgggggcaaggtgaagaagggcaacctgaaggccaagaagcccaagaagggcaagccccactgcagcaggaaccctgtgctggtgcggggcatcggccgctacagccgcagcgccatgtacagcaggaaggccatgtacaagaggaagtag

SEQ ID NO: 292678 - DNA, 480 bp, Artificial Sequence
  derived and/or modified sequence
atggccggggagaaggtggagaagccagacaccaaggagaagaagccagaggccaagaaggtggatgctgggggcaaggtgaagaagggcaacctgaaggccaagaagcccaagaagggcaagccccactgcagcaggaaccctgtgctggtgcggggcatcggccgctacagccgcagcgccatgtacagcaggaaggccatgtacaagaggaagtacagcgctgccaagagcaaggtggagaagaagaagaaggagaaggtgctggccaccgtgaccaagcctgtgggcggggacaagaatggaggcaccagggtggtgaagctgaggaagatgccccgctactaccccacagaagatgtgcccaggaagctgctgagccacggcaagaagcccttcagccagcacgtgaggaagctgcgggccagcatcaccccaggcaccatcctgatcatcctgaccggccgccaccggggctag

SEQ ID NO: 292679 - DNA, 345 bp, Artificial Sequence
  derived and/or modified sequence
atggccggggagaaggtggagaagccagacaccaaggagaagaagccagaggccaagaaggtggatgctgggggcaaggtgaagaagggcaacctgaaggccaagaagcccaagaagggcaagccccactgcagcaggaaccctgtgctggtgcggggcatcggccgctacagccgcagcgccatgtacagcaggaaggccatgtacaagaggaagtacagcgctgccaagagcaaggtggagaagaagaagaaggagaaggtgctggccaccgtgaccaagcctgtgggcggggacaagaatggaggcaccagggtggtgaagctgaggaagatggtgaggtag

SEQ ID NO: 292680 - DNA, 867 bp, Artificial Sequence
  derived and/or modified sequence
atggccggcgagaaggtggagaagcccgacaccaaggagaagaagcccgaggcaaaaaaggtggatgccggcggcaaggttaagaagggaaacctgaaggccaaaaagccgaagaagggcaagccacattgttcgagaaacccagtgctggtccgggggattgggcggtatagcagaagcgcgatgtattccagaaaagctatgtataaaagaaaatattctgctgcaaaatcaaaagtggaaaagaagaagaaagaaaaagtcctggccacggtgaccaagcccgttggcggggataaaaacggtggcactcgtgtcgtgaagctgcgaaagatgccacggtactacccaaccgaagacgtccctaggaagctcctgtctcatggtaaaaagcccttctctcagcatgtccgaaaacttagggccagtattactccaggtacgatcttgataatccttactggacgccaccggggcaaacgggtcgtctttctcaagcagttggccagcgggctactcctcgtgaccggaccattggtgctgaaccgcgtgcccttacgtcggactcatcagaagtttgtgatcgcgacctctaccaaaatcgacatcagcaacgtgaagatcccgaaacacttgacagacgcgtactttaagaaaaaaaaactgagaaagcctagacaccaggagggtgaaatcttcgataccgagaaagagaaatacgaaattacagagcagcgcaagattgatcagaaggctgtggatagccagattctgcccaagatcaaagcaatccctcagttacaggggtatctgcgttctgtttttgcactcactaatgggatctatccgcacaaactagtcttctag

SEQ ID NO: 292681 - DNA, 867 bp, Artificial Sequence
  derived and/or modified sequence
atggccggcgagaaggtggagaagcccgacaccaaggagaagaagccagaggctaaaaaggtagacgccggcggaaaagtgaaaaaggggaacctcaaggccaaaaagccaaaaaaaggcaagccacattgttcaaggaacccagtactcgttcgaggcatcggccgatactcccggtctgccatgtattccaggaaggcaatgtacaagagaaaatactctgcagcaaagagcaaagttgagaagaagaaaaaagagaaggtgctggcaacggtgacgaagcccgtaggaggagataagaacggaggcacccgcgttgtcaaactccggaagatgcctagatattaccctaccgaagatgtcccaaggaagctgctcagccacgggaagaagccatttagccagcacgttcgaaagctccgggcatcaatcacacccggtactattttaataatccttacaggccgtcaccgcggcaaacgtgtggtgtttctgaaacaactggcctcaggcttgctcctcgtcacaggtcctttggtgctaaaccgggtgccattaagaaggacacaccagaagttcgtcatcgcaacaagcactaaaattgatatttctaacgtgaagattcctaagcatctgaccgacgcttactttaagaagaaaaaactgcgtaagcctcgtcaccaagagggtgagatcttcgatacagagaaggagaaatatgagattacggagcagcggaagattgatcaaaaggccgtagattcccaaattctgcctaaaatcaaagccatcccacagttacagggatatctcaggtcggtgttcgccctaaccaacggtatatatccacacaagctggtcttttag

SEQ ID NO: 292682 - DNA, 318 bp, Artificial Sequence
  derived and/or modified sequence
atggccggcgagaaggtggagaagcccgacaccaaggagaagaagcccgaagccaaaaaagtggatgctggagggaaagtgaaaaagggaaacctcaaggcaaaaaaacccaagaaagggaagcctcactgcagccgcaacccggttcttgtgcggggcatagggaggtactctcgttcagcaatgtattccaggaaggccatgtacaagcggaagtatagcgcggctaagtcaaaggtggaaaagaagaagaaagagaaagtgttggccacagtgactaaacccgtgggcggtgacaagaatggcggaacccgctag

SEQ ID NO: 292683 - DNA, 219 bp, Artificial Sequence
  derived and/or modified sequence
atggccggcgagaaggtggagaagcccgacaccaaggagaagaagccagaggcgaaaaaagtggacgccggggggaaagttaagaaaggcaacctaaaagctaaaaagccaaagaaaggcaaaccacattgctctcgaaaccctgtactagtgcggggaatcggccgctactcacgctcagctatgtattctcgcaaagccatgtacaaaagaaaatag

SEQ ID NO: 292684 - DNA, 480 bp, Artificial Sequence
  derived and/or modified sequence
atggccggcgagaaggtggagaagcccgacaccaaggagaagaagcctgaagcaaagaaggtggatgcaggaggcaaagttaagaagggaaatttgaaggcgaagaaacccaagaagggcaaaccccattgcagccggaatccggtactcgtcagaggtataggacgctactctcgttcagcgatgtactcccggaaggccatgtacaagagaaaatatagcgctgcaaaaagcaaggttgagaagaagaaaaaagaaaaggtgcttgcgactgtgacaaagccggtggggggcgacaaaaatggcggaacaagagttgtgaagctgagaaaaatgccccgctattaccctaccgaagacgtcccaaggaaacttttatcgcatgggaagaagccgttcagccagcatgtccggaagctcagggccagcatcacgcccgggacgatcttgatcattctcacagggcgacaccgcggctag

SEQ ID NO: 292685 - DNA, 345 bp, Artificial Sequence
  derived and/or modified sequence
atggccggcgagaaggtggagaagcccgacaccaaggagaagaagccagaggcgaagaaagttgacgcgggtggaaaggtgaaaaagggcaacctcaaagcgaagaagccaaagaaagggaaaccgcattgctcacggaacccagtcttggttcggggaattgggagatatagtagaagcgctatgtattctcggaaggccatgtacaaaaggaaatattccgccgcaaaatccaaagtggagaagaagaaaaaagagaaggtcctggcaacagttactaaaccagtcgggggagataagaatgggggcactcgtgtggtaaagcttcgcaaaatggtacggtag

SEQ ID NO: 292686 - DNA, 345 bp, Artificial Sequence
  derived and/or modified sequence
atggccggcgagaaggtggagaagcccgacaccaaggagaagaagcccgaagctaagaaggtcgatgccggcggcaaggtaaaaaagggtaaccttaaagctaagaaacccaagaagggcaagcctcattgctcccggaatcccgtgctcgttcgcggaatcgggcggtatagccgctccgccatgtattctcggaaggccatgtataagcgcaagtattccgcagccaagtccaaggtcgagaagaagaagaaggagaaggtgctcgcaacagttactaagcctgtgggtggtgataagaatgggggaacaagagtcgtgaagctgcggaaaatggtgcgctag

SEQ ID NO: 292687 - DNA, 867 bp, Artificial Sequence
  derived and/or modified sequence
atggccggagaaaaagtcgagaaacctgataccaaagagaagaaaccagaggctaagaaggtggatgcaggaggaaaagtaaaaaagggaaatctgaaggccaaaaaaccaaagaaggggaaacctcattgctctcggaatccagttctggtgagagggattggaagatactcccgttccgccatgtattcccgcaaagctatgtacaaacgaaaatatagcgccgcaaagtctaaggtcgagaaaaagaaaaaggagaaggttctggctacagtaactaaacctgttggcggagataaaaacggcggaaccagagtagtcaaacttcgaaaaatgccacggtactatccaaccgaggacgtccctcgcaagctcctcagccacggaaaaaaaccattctctcagcacgtgaggaagttacgagcaagcattactcctgggaccattcttatcattctcacaggacgacataggggaaagcgtgtagtgtttctcaagcagctcgcttcgggcctgctgttagtaacgggaccccttgtgcttaaccgggtgccactgagaagaacccaccagaaatttgtgatcgccaccagcacgaagatagatatctcaaatgtgaagatccctaaacatctaactgacgcgtatttcaagaagaaaaagttgcggaaacctcgccatcaagagggcgaaattttcgacacagagaaagaaaaatatgagatcacagaacaaagaaaaatagaccagaaggcggttgactcccagatcctccctaagatcaaggcaattccccagcttcaggggtacctgaggtctgtctttgccctaacaaacggaatataccctcacaaactggtcttctag

SEQ ID NO: 292688 - DNA, 867 bp, Artificial Sequence
  derived and/or modified sequence
atggctggggagaaggttgagaagcccgatacgaaagaaaagaagcctgaggctaaaaaggtagatgctggaggtaaagtgaaaaaaggaaatctcaaggctaaaaaacccaagaagggtaagcctcactgttctagaaatcccgtactcgtgcgcggaatcgggaggtattctcggtccgccatgtactccagaaaggctatgtataagaggaagtactcagctgctaagtcaaaggtggagaaaaaaaagaaagagaaagtcttggcaaccgtgaccaaacccgtgggcggtgataagaatggcggaacaagagttgtcaagttgcgaaagatgccacggtactacccaacagaggacgtgcccagaaaactgcttagccacggtaagaagcccttctcccaacatgtgcgtaagctgcgggcttctattacccccggaaccatcttaatcattctcacgggaaggcaccggggaaaacgtgtggtgttcctgaaacagttagcaagcgggttgcttttagtcaccggccctttggttctcaatcgggtaccattacgaaggactcatcaaaagtttgtgatcgcgacatcaaccaagattgacattagcaatgtcaaaatccccaagcacctcacagatgcttacttcaagaagaagaaactgagaaagcccaggcatcaggaaggcgagatatttgacactgaaaaagagaaatatgagataacggaacagcggaagatcgaccagaaggctgttgattcacagatactaccaaagattaaagcaatcccacagctgcaaggttatctccgatctgtttttgctctcaccaacgggatatacccacataaactcgtgttttag

SEQ ID NO: 292689 - DNA, 318 bp, Artificial Sequence
  derived and/or modified sequence
atggcgggtgaaaaagtggagaagcccgacacgaaagagaaaaagcctgaagctaaaaaggtcgatgctggcggaaaggttaaaaaaggcaatcttaaggctaaaaagccgaagaagggcaagccccactgtagtcgcaaccccgtgctcgtcaggggaattggcagatattcacggtcagcaatgtactctagaaaggccatgtacaaaagaaagtacagcgctgccaagtcaaaggtggagaaaaagaagaaggaaaaagtcctggccaccgtaaccaagccagtgggcggagacaagaacggaggcacccggtag

SEQ ID NO: 292690 - DNA, 219 bp, Artificial Sequence
  derived and/or modified sequence
atggctggggagaaggttgagaaacccgatacaaaagaaaagaagccagaggccaaaaaggtagatgctgggggaaaagtgaaaaaaggaaatcttaaggcaaagaaacctaagaaaggcaagccccactgctcccggaatcctgtcctggtgagaggcatcgggagatatagccggagcgcgatgtactccagaaaagccatgtataagcgtaagtag

SEQ ID NO: 292691 - DNA, 480 bp, Artificial Sequence
  derived and/or modified sequence
atggctggagagaaggtcgagaagccagacacaaaggaaaaaaaaccagaggcaaaaaaagtcgacgctggtggtaaagtgaagaaggggaacctaaaggccaaaaagcccaaaaaaggcaagcctcactgcagtcggaatcctgtactcgtgcggggaataggacgctattcaaggagcgcaatgtatagccggaaggccatgtataaacggaagtatagcgctgccaagtccaaagtagagaagaagaaaaaagaaaaagtgttagccacagtgaccaaaccagtgggcggtgacaagaatggaggcacccgcgtcgttaagttaaggaagatgcctagatactaccccactgaggacgtgccacggaagctcctgagccacggcaagaaacccttcagccagcacgtcaggaagcttcgcgcaagtatcactcccggaaccatccttattatcctcacggggcgacataggggctag

SEQ ID NO: 292692 - DNA, 345 bp, Artificial Sequence
  derived and/or modified sequence
atggccggtgagaaggtcgaaaagcccgacacgaaagaaaagaagcctgaggctaagaaagtggacgccggagggaaagtgaagaaaggcaacttaaaagccaagaaaccaaagaagggcaagccacattgctctcgcaaccccgtgctggttcgaggcatcggacgttactcccgctccgctatgtactcccgtaaagcgatgtataagcgtaaatactcggccgcaaaatcgaaagtggaaaagaagaaaaaggagaaggtactggccacagtgactaagccagtgggcggagataaaaacgggggaactagggtggttaagctcaggaagatggtgagatag

SEQ ID NO: 292693 - DNA, 345 bp, Artificial Sequence
  derived and/or modified sequence
atggcgggtgagaaggtagaaaaacccgacacaaaagagaaaaagccagaggcaaaaaaggttgatgccggaggcaaggttaaaaaaggcaatctcaaagctaagaagcccaaaaaaggtaaaccgcattgtagcaggaatccagtcctcgtgcgtggtatagggaggtactcaaggagcgcaatgtacagccggaaggcgatgtataagcgaaaatatagcgccgctaagtcaaaggtcgaaaagaagaaaaaggaaaaggtgctcgcaaccgtaactaagcccgttggaggagataaaaacgggggtacacgcgtggtcaagctgcgcaaaatggttcgctag

SEQ ID NO: 292694 - DNA, 947 bp, Artificial Sequence
  derived and/or modified sequence
atgattgcttatagaccggaagccgggaccttaattctctttcccatcttgcaagatggcgggtgaaaaagttgagaagccagatactaaagagaagaaacccgaagccaagaaggttgatgctggtggcaaggtgaaaaagggtaacctcaaagctaaaaagcccaagaaggggaagccccattgcagccgcaaccctgtccttgtcagaggaattggcaggtattcccgatctgccatgtattccagaaaggccatgtacaagaggaagtactcagccgctaaatccaaggttgaaaagaaaaagaaggagaaggttctcgcaactgttacaaaaccagttggtggtgacaagaacggcggtacccgggtggttaaacttcgcaaaatgcctagatattatcctactgaagatgtgcctcgaaagctgttgagccacggcaaaaaacccttcagtcagcacgtgagaaaactgcgagccagcattacccccgggaccattctgatcatcctcactggacgccacaggggcaagagggtggttttcctgaagcagctggctagtggcttattacttgtgactggacctctggtcctcaatcgagttcctctacgaagaacacaccagaaatttgtcattgccacttcaaccaaaatcgatatcagcaatgtaaaaatcccaaaacatcttactgatgcttacttcaagaagaagaagctgcggaagcccagacaccaggaaggtgagatcttcgacacagaaaaagagaaatatgagattacggagcagcgcaagattgatcagaaagctgtggactcacaaattttaccaaaaatcaaagctattcctcagctccagggctacctgcgatctgtgtttgctctgacgaatggaatttatcctcacaaattggtgttctaaatgtcttaagaacctaattaaatag

SEQ ID NO: 292695 - DNA, 1074 bp, Artificial Sequence
  derived and/or modified sequence
atcttgcaaggtaagaatcgcgggcctgtctgcaagacttgagttcaggactcccaatccttcgccatccgaacctggagggcatccagtcgacacctacaggggtcggacatgtccaaggctaactgagaggccttccagacgcttcatttttgttgtttgggtttgcggcagggcacaaagaggatggcgggtgaaaaagttgagaagccagatactaaagagaagaaacccgaagccaagaaggttgatgctggtggcaaggtgaaaaagggtaacctcaaagctaaaaagcccaagaaggggaagccccattgcagccgcaaccctgtccttgtcagaggaattggcaggtattcccgatctgccatgtattccagaaaggccatgtacaagaggaagtactcagccgctaaatccaaggttgaaaagaaaaagaaggagaaggttctcgcaactgttacaaaaccagttggtggtgacaagaacggcggtacccgggtggttaaacttcgcaaaatgcctagatattatcctactgaagatgtgcctcgaaagctgttgagccacggcaaaaaacccttcagtcagcacgtgagaaaactgcgagccagcattacccccgggaccattctgatcatcctcactggacgccacaggggcaagagggtggttttcctgaagcagctggctagtggcttattacttgtgactggacctctggtcctcaatcgagttcctctacgaagaacacaccagaaatttgtcattgccacttcaaccaaaatcgatatcagcaatgtaaaaatcccaaaacatcttactgatgcttacttcaagaagaagaagctgcggaagcccagacaccaggaaggtgagatcttcgacacagaaaaagagaaatatgagattacggagcagcgcaagattgatcagaaagctgtggactcacaaattttaccaaaaatcaaagctattcctcagctccagggctacctgcgatctgtgtttgctctgacgaatggaatttatcctcacaaattggtgttctaaatgtcttaagaacctaattaa

SEQ ID NO: 292696 - DNA, 612 bp, Artificial Sequence
  derived and/or modified sequence
aaataatggttgtacggacttctgaccgctcagtatttggcaaaaaacctaataggtgtgaggtagtttcaaattctcaaaaaaaaagtttatagtgtattggggagacaaaccccaaatgagtcatagtgaaggttggagtagaatgggtagagtttgagaggaaggcctgtatcttaccgggggagggattgtagtctggggagcccagcccattcatgtacaggttcattattgtcttgttagagagatgactggtgaaatgcctttttttatctacaaaaaaatatttttagatggcgggtgaaaaagttgagaagccagatactaaagagaagaaacccgaagccaagaaggttgatgctggtggcaaggtgaaaaagggtaacctcaaagctaaaaagcccaagaaggggaagccccattgcagccgcaaccctgtccttgtcagaggaattggcaggtattcccgatctgccatgtattccagaaaggccatgtacaagaggaagtactcagccgctaaatccaaggttgaaaagaaaaagaaggagaaggttctcgcaactgttacaaaaccagttggtggtgacaagaacggcggtacccggg

SEQ ID NO: 292697 - DNA, 488 bp, Artificial Sequence
  derived and/or modified sequence
ggtgggtgttagaggaagcggggagacggcgcgtgcactgtgttcctggtcctgggttccagaggatgacactgagcctgtcgcagccacgttggggttccgcactgaagccaaaaggtttcgcgtctcccagcgtccccgaccggaagtcgcctcttggtctttgcgatctttttctctggctcaatttgggctgattccgtttgtgtccgcaattcctaaatcgagtttcttgaaaagagacactggtcttaagggttaagacgaaagatggcgggtgaaaaagttgagaagccagatactaaagagaagaaacccgaagccaagaaggttgatgctggtggcaaggtgaaaaagggtaacctcaaagctaaaaagcccaagaaggggaagccccattgcagccgcaaccctgtccttgtcagaggaattggcaggtattcccgatctgccatgtattccagaaaggccatgtacaagaggaagta

SEQ ID NO: 292698 - DNA, 588 bp, Artificial Sequence
  derived and/or modified sequence
ttagaggaagcggggagacggcgcgtgcactgtgttcctggtcctgggttccagaggatgacactgagcctgtcgcagccacgttggggttccgcactgaagccaaaagatggcgggtgaaaaagttgagaagccagatactaaagagaagaaacccgaagccaagaaggttgatgctggtggcaaggtgaaaaagggtaacctcaaagctaaaaagcccaagaaggggaagccccattgcagccgcaaccctgtccttgtcagaggaattggcaggtattcccgatctgccatgtattccagaaaggccatgtacaagaggaagtactcagccgctaaatccaaggttgaaaagaaaaagaaggagaaggttctcgcaactgttacaaaaccagttggtggtgacaagaacggcggtacccgggtggttaaacttcgcaaaatgcctagatattatcctactgaagatgtgcctcgaaagctgttgagccacggcaaaaaacccttcagtcagcacgtgagaaaactgcgagccagcattacccccgggaccattctgatcatcctcactggacgccacaggggcaa

SEQ ID NO: 292699 - DNA, 682 bp, Artificial Sequence
  derived and/or modified sequence
gtcagcggaggaccgagcgacggccgggaatggcagcgcgggggctccgcggaggcgccacgcacagtgtccaaagcatccttgcttcctcctggaaaccgcggccgccagtgaatcagaaccagaaaaaggctaaatgattcccagagacacagccatgaagcaggtggtttcgatctgaaaaaatcaaggtgaaaagctctagcaaccagaaagaaacgaatggaggaaaatggaaaacgcaagctagaagacagagtctcattctgtaggccaggccggaggacgggaatgagaaaggccatgtacaagaggaagtagtcagccgctaaatccaagatggcgggtgaaaaagttgagaagccagatactaaagagaagaaacccgaagccaagaaggttgatgctggtggcaaggtgaaaaagggtaacctcaaagctaaaaagcccaagaaggggaagccccattgcagccgcaaccctgtccttgtcagaggaattggcaggtattcccgatctgccatgtattccagaaaggccatgtacaagaggaagtactcagccgctaaatccaaggttgaaaagaaaaagaaggagaaggttctcgcaactgttacaaaaccagttggtggtgacaagaacggcggtacccgggtggttaaacttcgcaaaatggtaagat

SEQ ID NO: 292700 - DNA, 425 bp, Artificial Sequence
  derived and/or modified sequence
ggcctgtctgcaagacttgagttcaggactcccaatccttcgccatccgaacctggagggcatccagtcgacacctacagggatggcgggtgaaaaagttgagaagccagatactaaagagaagaaacccgaagccaagaaggttgatgctggtggcaaggtgaaaaagggtaacctcaaagctaaaaagcccaagaaggggaagccccattgcagccgcaaccctgtccttgtcagaggaattggcaggtattcccgatctgccatgtattccagaaaggccatgtacaagaggaagtactcagccgctaaatccaaggttgaaaagaaaaagaaggagaaggttctcgcaactgttacaaaaccagttggtggtgacaagaacggcggtacccgggtggttaaacttcgcaaaatggtaagat

SEQ ID NO: 292701 - DNA, 867 bp, Artificial Sequence
  derived and/or modified sequence
atggccggcgagaaggtggagaagcccgacaccaaggagaagaagcccgaggccaagaaggtggacgccggcggcaaggtgaagaagggcaacctgaaggccaagaagcccaagaagggcaagccccactgcagcagaaaccccgtgctggtgagaggcatcggcagatacagcagaagcgccatgtacagcagaaaggccatgtacaagagaaagtacagcgccgccaagagcaaggtggagaagaagaagaaggagaaggtgctggccaccgtgaccaagcccgtgggcggcgacaagaacggcggcaccagagtggtgaagctgagaaagatgcccagatactaccccaccgaggacgtgcccagaaagctgctgagccacggcaagaagcccttcagccagcacgtgagaaagctgagagccagcatcacccccggcaccatcctgatcatcctgaccggcagacacagaggcaagagagtggtgttcctgaagcagctggccagcggcctgctgctggtgaccggccccctggtgctgaacagagtgcccctgagaagaacccaccagaagttcgtgatcgccaccagcaccaagatcgacatcagcaacgtgaagatccccaagcacctgaccgacgcctacttcaagaagaagaagctgagaaagcccagacaccaggagggcgagatcttcgacaccgagaaggagaagtacgagatcaccgagcagagaaagatcgaccagaaggccgtggacagccagatcctgcccaagatcaaggccatcccccagctgcagggctacctgagaagcgtgttcgccctgaccaacggcatctacccccacaagctggtgttctag

SEQ ID NO: 292702 - DNA, 318 bp, Artificial Sequence
  derived and/or modified sequence
atggccggcgagaaggtggagaagcccgacaccaaggagaagaagcccgaggccaagaaggtggacgccggcggcaaggtgaagaagggcaacctgaaggccaagaagcccaagaagggcaagccccactgcagcagaaaccccgtgctggtgagaggcatcggcagatacagcagaagcgccatgtacagcagaaaggccatgtacaagagaaagtacagcgccgccaagagcaaggtggagaagaagaagaaggagaaggtgctggccaccgtgaccaagcccgtgggcggcgacaagaacggcggcaccagatag

SEQ ID NO: 292703 - DNA, 219 bp, Artificial Sequence
  derived and/or modified sequence
atggccggcgagaaggtggagaagcccgacaccaaggagaagaagcccgaggccaagaaggtggacgccggcggcaaggtgaagaagggcaacctgaaggccaagaagcccaagaagggcaagccccactgcagcagaaaccccgtgctggtgagaggcatcggcagatacagcagaagcgccatgtacagcagaaaggccatgtacaagagaaagtag

SEQ ID NO: 292704 - DNA, 480 bp, Artificial Sequence
  derived and/or modified sequence
atggccggcgagaaggtggagaagcccgacaccaaggagaagaagcccgaggccaagaaggtggacgccggcggcaaggtgaagaagggcaacctgaaggccaagaagcccaagaagggcaagccccactgcagcagaaaccccgtgctggtgagaggcatcggcagatacagcagaagcgccatgtacagcagaaaggccatgtacaagagaaagtacagcgccgccaagagcaaggtggagaagaagaagaaggagaaggtgctggccaccgtgaccaagcccgtgggcggcgacaagaacggcggcaccagagtggtgaagctgagaaagatgcccagatactaccccaccgaggacgtgcccagaaagctgctgagccacggcaagaagcccttcagccagcacgtgagaaagctgagagccagcatcacccccggcaccatcctgatcatcctgaccggcagacacagaggctag

SEQ ID NO: 292705 - DNA, 345 bp, Artificial Sequence
  derived and/or modified sequence
atggccggcgagaaggtggagaagcccgacaccaaggagaagaagcccgaggccaagaaggtggacgccggcggcaaggtgaagaagggcaacctgaaggccaagaagcccaagaagggcaagccccactgcagcagaaaccccgtgctggtgagaggcatcggcagatacagcagaagcgccatgtacagcagaaaggccatgtacaagagaaagtacagcgccgccaagagcaaggtggagaagaagaagaaggagaaggtgctggccaccgtgaccaagcccgtgggcggcgacaagaacggcggcaccagagtggtgaagctgagaaagatggtgagatag

SEQ ID NO: 292706 - protein, 471 aa, Artificial Sequence
  derived and/or modified sequence
MKMQVFCKSIEDMTVKAEQSQQEAAKKHEEEKKELERKLSDLEKKMETSHNQCQELKARYERATSETKTKHEEILQNLQKTLLDTEDKLKGAREENSGLLQELEELRKQADKAKAAQTAEDAMQIMEQMTKEKTETLASLEDTKQTNAKLQNELDTLKENNLKNVEELNKSKELLTVENQKMEEFRKEIETLKQAAAQKSQQLSALQEENVKLAEELGRSRDEVTSHQKLEEERSVLNNQLLEMKKRESKFIKDADEEKASLQKSISITSALLTEKDAELEKLRNEVTVLRGENASAKSLHSVVQTLESDKVKLELKVKNLELQLKENKRQLSSSSGNTDTQADEDERAQESQVMIDFLNSVIVDLQRKNQDLKMKVEMMSEAALNGNGDDLNNYDSDDQEKQSKKKPRLFCDICDCFDLHDTEDCPTQAQMSEDPPHSTHHGSRGEERPYCEICEMFGHWATNCNDDETF

SEQ ID NO: 292707 - DNA, 1416 bp, Artificial Sequence
  derived and/or modified sequence
atgaagatgcaggtgttctgcaagagcatcgaggacatgaccgtgaaggccgagcagagccagcaggaggccgccaagaagcacgaggaggagaagaaggagctggagagaaagctgagcgacctggagaagaagatggagaccagccacaaccagtgccaggagctgaaggccagatacgagagagccaccagcgagaccaagaccaagcacgaggagatcctgcagaacctgcagaagaccctgctggacaccgaggacaagctgaagggcgccagagaggagaacagcggcctgctgcaggagctggaggagctgagaaagcaggccgacaaggccaaggccgcccagaccgccgaggacgccatgcagatcatggagcagatgaccaaggagaagaccgagaccctggccagcctggaggacaccaagcagaccaacgccaagctgcagaacgagctggacaccctgaaggagaacaacctgaagaacgtggaggagctgaacaagagcaaggagctgctgaccgtggagaaccagaagatggaggagttcagaaaggagatcgagaccctgaagcaggccgccgcccagaagagccagcagctgagcgccctgcaggaggagaacgtgaagctggccgaggagctgggcagaagcagagacgaggtgaccagccaccagaagctggaggaggagagaagcgtgctgaacaaccagctgctggagatgaagaagagagagagcaagttcatcaaggacgccgacgaggagaaggccagcctgcagaagagcatcagcatcaccagcgccctgctgaccgagaaggacgccgagctggagaagctgagaaacgaggtgaccgtgctgagaggcgagaacgccagcgccaagagcctgcacagcgtggtgcagaccctggagagcgacaaggtgaagctggagctgaaggtgaagaacctggagctgcagctgaaggagaacaagagacagctgagcagcagcagcggcaacaccgacacccaggccgacgaggacgagagagcccaggagagccaggtgatgatcgacttcctgaacagcgtgatcgtggacctgcagagaaagaaccaggacctgaagatgaaggtggagatgatgagcgaggccgccctgaacggcaacggcgacgacctgaacaactacgacagcgacgaccaggagaagcagagcaagaagaagcccagactgttctgcgacatctgcgactgcttcgacctgcacgacaccgaggactgccccacccaggcccagatgagcgaggaccccccccacagcacccaccacggcagcagaggcgaggagagaccctactgcgagatctgcgagatgttcggccactgggccaccaactgcaacgacgacgagaccttctag

SEQ ID NO: 292708 - DNA, 1416 bp, Artificial Sequence
  derived and/or modified sequence
atgaagatgcaggtgttttgcaagagtattgaggatatgaccgtgaaggcggaacagagccaacaggaggccgccaagaaacatgaagaagagaagaaggaactggaaagaaagttgtctgatttggagaagaaaatggagaccagccacaatcagtgccaagagctcaaagcccgctacgaaagagcaacatctgagaccaaaacaaagcacgaggaaattctccagaatcttcagaagacactcctggacactgaagacaaacttaagggggccagggaagagaattcgggcctgctccaggagctggaggaactgaggaagcaagccgacaaagcgaaagcagcacaaaccgccgaggacgcgatgcagattatggaacagatgacaaaggagaagactgagaccctcgcctctttggaagacactaaacaaacgaacgccaaactccagaacgaattggacacactgaaggagaataacttaaaaaacgtcgaggaactgaataagtcaaaggagctccttactgttgagaatcagaaaatggaggaattccgcaaggagatagagacactcaagcaagccgcagcccaaaaatcacagcagttgtccgctttacaggaggaaaatgttaaattggcggaagaacttgggagatcaagagacgaggtgacgtcgcatcagaagctcgaagaggaaagatcagttttaaacaaccaactgctggaaatgaaaaagcgtgaaagcaaatttatcaaggatgccgacgaagagaaggctagtctccaaaagtcaatcagcatcacttccgctctgctgaccgaaaaagacgccgagttagagaagctgcgcaatgaggtgaccgtgctaagaggggagaacgctagtgccaagagcttacattccgtagtccaaaccttggagtccgacaaggtgaagttagaattgaaagttaaaaacttggagttgcagttgaaggaaaacaagcgccagctttcttcttcgtcaggaaacacggacacacaagccgacgaagacgaaagggctcaggagtctcaggtcatgattgactttctaaatagcgtcatcgtagatctccagcgcaagaatcaggatctcaagatgaaagttgagatgatgagcgaggctgcactgaatggcaatggtgacgacctcaataactatgactctgatgatcaagaaaaacagtcaaaaaagaaaccccggctgttttgcgacatttgcgattgcttcgatctgcacgacactgaagattgtccaacacaagcccagatgagcgaagacccaccacattccacccatcacggcagtcggggagaggagaggccttattgcgagatctgtgaaatgtttggacactgggctaccaactgcaacgatgacgagaccttttag

SEQ ID NO: 292709 - DNA, 1416 bp, Artificial Sequence
  derived and/or modified sequence
atgaagatgcaggtgttctgcaagagcattgaggacatgacagtgaaggccgagcagagccagcaggaggccgccaagaagcatgaggaggagaagaaggagctggagaggaagctgagtgacctggagaagaagatggagaccagccacaaccagtgccaggagctgaaggcccgctatgaaagagccaccagcgagaccaagaccaagcatgaggagatcctgcagaacctgcagaagaccctgctggacacagaggacaagctgaagggggcccgggaggagaacagcggcctgctgcaggagctggaggagctgaggaagcaggccgacaaggccaaggccgcccagacagcagaagatgccatgcagatcatggagcagatgaccaaggagaagacagagaccctggccagcctggaggacaccaagcagaccaatgccaagctgcagaatgagctggacaccctgaaggagaacaacctgaagaatgtggaggagctgaacaagagcaaggagctgctgactgtggagaaccagaagatggaggagttcaggaaggagattgagaccctgaagcaggccgccgcccagaagagccagcagctgagcgccctgcaggaggagaatgtgaagctggccgaggagctgggccgcagcagagatgaggtgaccagccaccagaagctggaggaggagaggtctgtgctgaacaaccagctgctggagatgaagaagcgggagagcaagttcatcaaggatgctgatgaggagaaggccagcctgcagaagagcatcagcatcaccagcgccctgctgacagagaaggatgctgagctggagaagctgagaaatgaggtgacagtgctgcggggagaaaatgccagcgccaagagcctgcacagcgtggtgcagaccctggagagtgacaaggtgaagctggagctgaaggtgaagaacctggagctgcagctgaaggagaacaagaggcagctgagcagcagcagcggcaacacagacacccaggctgatgaagatgagcgggcccaggagagccaggtgatgattgacttcctgaacagcgtgattgtggacctgcagaggaagaaccaggacctgaagatgaaggtggagatgatgtctgaggccgccctgaatggaaatggagatgacctgaacaactatgacagtgatgaccaggagaagcagagcaagaagaagcccaggctcttctgtgacatctgtgactgctttgacctgcatgacacagaggactgccccacccaggcccagatgtctgaggaccccccccacagcacccaccacggcagcagaggagaggagcggccctactgtgagatctgtgagatgtttggccactgggccaccaactgcaatgatgatgagaccttctag

SEQ ID NO: 292710 - DNA, 1416 bp, Artificial Sequence
  derived and/or modified sequence
atgaagatgcaggtgttctgcaagagcatcgaggacatgaccgtgaaagctgagcagtcgcagcaagaagccgccaaaaagcacgaggaggaaaaaaaagagctcgagcgcaaattatcagacctggagaagaagatggaaacctctcacaaccagtgtcaagagctgaaggctagatacgaaagggccacgtccgagactaagaccaaacacgaggagatcttacagaacttgcaaaagaccttactggacaccgaggacaaactgaaaggtgcacgcgaagaaaactcaggcctgttgcaggaactcgaagagctgcgcaaacaagccgacaaagcaaaggcagcccagactgcagaggacgcgatgcagattatggagcagatgacaaaggagaaaaccgaaaccctggcctccttagaggataccaagcagacgaacgcaaagctgcagaacgagcttgacactttaaaggagaacaacctgaagaacgtggaggagctgaacaaatctaaagagctgctaaccgttgaaaaccagaagatggaagaattcaggaaggagattgagaccctgaagcaggcagcagcccagaaatcccagcagctgtccgccctccaggaagaaaatgtcaaactggccgaagagctgggccggtcccgggacgaagtgacctcacaccaaaagctcgaggaggagcgttctgtactgaacaaccagctgcttgaaatgaaaaaacgggaaagtaagtttatcaaagacgcagacgaggagaaggctagcctacagaagagtattagcattacaagtgctctgctgacggaaaaggatgcggagttagagaagctgcggaatgaagtgaccgtgcttcgcggagagaacgcctcagccaaatcattacatagcgtcgtccagacgctggaatcggacaaggtcaaacttgagttgaaggttaaaaatctggaactccagttaaaggagaacaaacgccagctgagctcttcgtccgggaacaccgacacgcaagccgacgaggacgagcgcgcacaagagtcccaggttatgatcgattttctaaactcagtgattgtagatctccagagaaaaaaccaggatcttaaaatgaaagtggagatgatgagcgaagctgcccttaacggaaatggcgatgatctgaacaattatgattccgatgatcaggagaagcagtccaaaaagaaaccgcgcctattctgtgacatctgcgattgcttcgatctacacgacacggaggattgtcctacacaggcccaaatgagcgaggaccccccacattctactcatcacggatcgcgaggtgaagagcggccatattgcgagatctgtgaaatgttcgggcactgggcgactaactgtaacgacgacgagactttctag

SEQ ID NO: 292711 - DNA, 1416 bp, Artificial Sequence
  derived and/or modified sequence
atgaaaatgcaggtgttttgtaaaagcatcgaggatatgactgtgaaagcagagcagtcccagcaggaagcagcaaagaagcacgaagaggagaagaaagagcttgagcggaagctctcggatctagagaagaaaatggagactagccataaccagtgtcaggaactgaaggcacgctatgaacgtgccacatctgagaccaagactaagcatgaggagatcctgcagaacctccagaagactctgctggatactgaagataaactgaagggcgctagggaggagaattccggtctcctgcaggagttagaggagcttaggaaacaggcagacaaagccaaggccgcacaaactgcagaagacgccatgcagatcatggagcagatgacgaaggagaagacagaaactctggcgagtcttgaagacaccaagcagaccaatgctaaattgcagaatgaactggacacgttgaaggaaaacaatcttaaaaacgtcgaggaactgaataagagcaaggaactgttaaccgtcgagaatcagaagatggaggagtttagaaaggagatcgagacactaaaacaggccgctgcccagaaatctcagcaactttctgcactccaggaagaaaatgtgaaactggccgaggagctgggccgatcccgggacgaagtgacaagccaccagaagcttgaagaggagcgtagcgtgctgaataaccagctgctagagatgaaaaagcgagaaagcaaatttattaaggatgcagacgaggaaaaagcttcgctgcagaagtccatttcaatcacaagtgctctactcactgagaaggacgcagaattagaaaagttgagaaacgaggttacagtcttgcgaggtgaaaatgcctcggccaagtccctgcactccgtagtccagacgctggagtcagataaggtcaagctggaattgaaggtcaaaaatctggagctccagctgaaagagaacaagcggcagctttcgtccagtagcgggaacacagacacccaggccgatgaggatgagcgggcacaggaatcccaggtcatgatagactttcttaacagcgtcatcgtcgatctgcagcgcaagaatcaggacttgaagatgaaagtcgaaatgatgagcgaggccgcattaaacgggaacggggacgatcttaacaattacgatagcgacgaccaggaaaagcagtcaaaaaaaaagccccgacttttttgtgacatatgtgactgtttcgacctgcacgacaccgaagactgcccaacacaggcccagatgtcggaggatccgcctcattctacccatcacgggagcagaggagaggaacggccatactgtgaaatctgcgagatgtttggtcattgggccactaattgcaacgacgacgaaactttctag

SEQ ID NO: 292712 - protein, 750 aa, Artificial Sequence
  derived and/or modified sequence
MLSSRWWPSSWGILGLGPRSPPRGSQLCALYAFTYTGADGQQVSLAEGDRFLLLRKTNSDWWLARRLEAPSTSRPIFVPAAYMIEESIPSQSPTTVIPGQLLWTPGPKLFHGSLEELSQALPSRAQASSEQPPPLPRKMCRSVSTDNLSPSLLKPFQEGPSGRSLSQEDLPSEASASTAGPQPLMSEPPVYCNLVDLRRCPRSPPPGPACPLLQRLDAWEQHLDPNSGRCFYINSLTGCKSWKPPRRSRSETNPGSMEGTQTLKRNNDVLQPQAKGFRSDTGTPEPLDPQGSLSLSQRTSQLDPPALQAPRPLPQLLDDPHEVEKSGLLNMTKIAQGGRKLRKNWGPSWVVLTGNSLVFYREPPPTAPSSGWGPAGSRPESSVDLRGAALAHGRHLSSRRNVLHIRTIPGHEFLLQSDHETELRAWHRALRTVIERLVRWVEARREAPTGRDQGSGDRENPLELRLSGSGPAELSAGEDEEEESELVSKPLLRLSSRRSSIRGPEGTEQNRVRNKLKRLIAKRPPLQSLQERGLLRDQVFGCQLESLCQREGDTVPSFLRLCIAAVDKRGLDVDGIYRVSGNLAVVQKLRFLVDRERAVTSDGRYVFPEQPGQEGRLDLDSTEWDDIHVVTGALKLFLRELPQPLVPPLLLPHFRAALALSESEQCLSQIQELIGSMPKPNHDTLRYLLEHLCRVIAHSDKNRMTPHNLGIVFGPTLFRPEQETSDPAAHALYPGQLVQLMLTNFTSLFP

SEQ ID NO: 292713 - protein, 821 aa, Artificial Sequence
  derived and/or modified sequence
MRRGSSDSCASGSQVAGTTVAGPAHPESLTLCSGEAERRGKEEWPDSHHYPGPTPAPESSDGPHKVTVLATMLSSRWWPSSWGILGLGPRSPPRGSQLCALYAFTYTGADGQQVSLAEGDRFLLLRKTNSDWWLARRLEAPSTSRPIFVPAAYMIEESIPSQSPTTVIPGQLLWTPGPKLFHGSLEELSQALPSRAQASSEQPPPLPRKMCRSVSTDNLSPSLLKPFQEGPSGRSLSQEDLPSEASASTAGPQPLMSEPPVYCNLVDLRRCPRSPPPGPACPLLQRLDAWEQHLDPNSGRCFYINSLTGCKSWKPPRRSRSETNPGSMEGTQTLKRNNDVLQPQAKGFRSDTGTPEPLDPQGSLSLSQRTSQLDPPALQAPRPLPQLLDDPHEVEKSGLLNMTKIAQGGRKLRKNWGPSWVVLTGNSLVFYREPPPTAPSSGWGPAGSRPESSVDLRGAALAHGRHLSSRRNVLHIRTIPGHEFLLQSDHETELRAWHRALRTVIERLVRWVEARREAPTGRDQGSGDRENPLELRLSGSGPAELSAGEDEEEESELVSKPLLRLSSRRSSIRGPEGTEQNRVRNKLKRLIAKRPPLQSLQERGLLRDQVFGCQLESLCQREGDTVPSFLRLCIAAVDKRGLDVDGIYRVSGNLAVVQKLRFLVDRERAVTSDGRYVFPEQPGQEGRLDLDSTEWDDIHVVTGALKLFLRELPQPLVPPLLLPHFRAALALSESEQCLSQIQELIGSMPKPNHDTLRYLLEHLCRVIAHSDKNRMTPHNLGIVFGPTLFRPEQETSDPAAHALYPGQLVQLMLTNFTSLFP

SEQ ID NO: 292714 - protein, 156 aa, Artificial Sequence
  derived and/or modified sequence
  misc_feature (1)..(1): Xaa can be any naturally occurring amino acid
XEGDTVPSFLRLCIAAVDKRGLDVDGIYRVSGNLAVVQKLRFLVDRERAVTSDGRYVFPEQPGQALSESEQCLSQIQELIGSMPKPNHDTLRYLLEHLCRVIAHSDKNRMTPHNLGIVFGPTLFRPEQETSDPAAHALYPGQLVQLMLTNFTSLFP

SEQ ID NO: 292715 - DNA, 2253 bp, Artificial Sequence
  derived and/or modified sequence
atgctgtctagccgctggtggccttctagttggggcattctgggcctcggcccacggtctccaccgcgcggtagtcagctgtgtgctctttatgcttttacctacaccggcgccgatggtcagcaagtgagcctggctgaaggcgaccggtttttgttgcttagaaaaacaaattctgactggtggctggctcgaaggttagaggctcctagcacgtcgagaccaatatttgtacccgccgcgtatatgatcgaggaatctataccatcccaatccccaaccacagtgatcccaggacagctgttgtggacccccggtcctaaactattccatggttcactggaagagttgtcccaggccctcccctccagggctcaggcctcaagtgaacagcccccacccttaccgagaaagatgtgtaggagcgtgtcgaccgataacctttcaccgagtttgctaaaacctttccaggaagggccatccgggaggtcactctcccaggaggatctgcccagcgaggctagtgcctcaaccgctgggcctcaaccattaatgtctgagcctcctgtgtactgcaatctggtcgatctccgtcggtgtccacgctctccaccacccggccccgcctgccccctcctgcaaagactggatgcgtgggagcagcatctcgacccaaatagcggaaggtgtttttacattaattccctgaccggatgtaagtcctggaagccgcccaggcggagccggagcgaaaccaatcccggatctatggagggcactcaaaccctgaaacggaataacgatgttttacagcctcaggccaagggttttcggagcgacacaggaacaccagaaccacttgaccctcagggaagcctcagcctgagccagagaacatcccagttggatcctccagctctacaagctccgaggcctcttccccagctgctggacgacccacacgaagttgagaaaagcggtcttcttaatatgactaagatcgctcagggagggcgcaagcttcgcaaaaattgggggccaagttgggtggtgctcaccggcaactcccttgtcttttaccgcgaaccccccccaactgccccttcgtccggctggggaccagcaggttctcgcccagagagtagcgtcgatctgcgtggcgcggccttagcccatggaagacacctcagtagtcggcggaatgttctgcatattaggactatcccaggccacgagtttctgttgcagtccgatcacgagacggagcttagagcctggcatagggccctgagaacagtgatcgaacggctcgtgcgctgggtcgaagcccgccgggaggcgccaacagggcgcgaccaaggctcaggtgaccgcgaaaatcctcttgagctgcgcctgtcagggtccggaccagcagagctgagcgccggtgaggacgaggaggaagaatcagaactggtgtctaagcctctgttgcggctttcatcgcgaagatccagcatccggggccctgagggcaccgaacagaaccgagtgcggaataaactgaagaggctcatcgcgaagagaccacctctgcagagtctgcaggagcgtgggctgcttagagaccaggtgtttggctgccaactcgagtctctgtgccagagggagggggacaccgtgccctcatttttacgcttgtgtatcgccgccgtggataagagaggcttggatgtggatggtatctatcgcgtctctgggaatctcgcggttgttcaaaagctgagatttctcgtcgatagggagagggccgtcacctctgatggaaggtacgttttccccgaacaacctggccaagaggggcgcctagacctcgactccactgagtgggacgatatacacgtggttactggcgcactcaagctttttctccgggagctgccccagcctctggttcctcctctcctcctgccgcattttagagccgcccttgccctttccgaatcggagcaatgcctgagtcaaatccaagaactcattgggagcatgcccaaaccaaatcacgatacgctgcggtatctcttggaacatctctgccgggtcatcgcacatagtgataaaaaccgcatgacacctcataacctgggtatcgtcttcggcccgacactgttccggccagagcaagagaccagtgatccagcagctcacgctctgtatccaggccagttggtgcagttgatgctgactaattttacctcgctgtttccatag

SEQ ID NO: 292716 - DNA, 2466 bp, Artificial Sequence
  derived and/or modified sequence
atgcgacgggggagcagcgattcatgtgctagcgggtcccaagtggcagggactaccgttgcgggaccagcccaccctgaatctttgacactatgctccggagaagctgagcgtagggggaaggaagagtggccagactctcatcattacccagggccaactccagcaccagagtccagtgatggccctcacaaggtaacagtcctagcaactatgctgtcgtctcggtggtggcccagcagctggggtatcctgggcttgggacctcggtccccaccacgcggctcccagctgtgcgctctgtacgcgtttacttataccggcgctgacggccaacaagtctcactggccgagggggacaggttcctcttgttacgaaagaccaacagcgactggtggctggccagaaggctagaggctccctctacaagccgacctatcttcgtgccagctgcctatatgattgaagaatctataccaagtcagtcccccacgacagtgattcccggacagcttctgtggacccccggccctaagctttttcatggctctctcgaggagttgtcacaggccctgccctccagagcccaggcgtcctccgaacagcctccacccctcccaaggaagatgtgccgatcagtatctacagacaatctgagtcccagcctgctgaagccatttcaggaaggcccctctggacggagtctcagccaggaagatctgccatcagaggcgtccgcctctactgcggggccccagcccttgatgtccgagccccccgtttattgcaatcttgtagatcttcggcgctgccctagatcacctccaccaggacccgcctgcccactactccagcgactcgacgcctgggagcaacacctggacccgaattcgggcaggtgcttctatatcaactccctcactgggtgcaaatcttggaagcccccgaggcgcagcagatctgagactaacccaggatctatggagggtacccaaaccctgaaaagaaacaacgacgtcctgcagccacaggccaagggttttaggtccgacactggcaccccagaaccattggatccccagggtagcttatctcttagccaacgaactagtcagctcgatccccccgcactccaggcacctcggccactacctcagttgttggatgatccccatgaggtcgaaaagtccggtctgctcaacatgaccaagattgctcagggaggcaggaagctcagaaagaattggggcccctcatgggtcgtgttaactggtaattctctggtcttttacagagaaccgccgcctacagcgccttcatctgggtggggccccgctgggtcccgacccgagtcatcggtagacctgaggggcgccgctctggcccacggccggcatctttcctcacgtaggaatgtcctacacattcgtactatccctgggcatgaattcctcctgcagtccgatcatgaaactgagctgcgtgcatggcatcgtgccctcaggaccgtgattgagcgtctggtccggtgggtcgaagcccggagagaggcccctaccggtcgggaccaaggcagtggcgaccgtgagaaccctctcgagctgagactatcagggagtggtcctgctgagctgtctgctggcgaggatgaagaagaagagagcgagttggtgtcgaagcccctgctccggctatcctctaggcggtctagcatcagaggcccagagggaactgagcagaacagagtacgaaacaaacttaaaaggttgatcgctaagcggccccccctgcagagcctgcaggagcgtggcctgttgagggatcaagtgttcggctgtcagctggagagcctctgccagagagagggggatacagtgccctcgtttctcagactgtgtatcgctgcagtggacaagcgcggcctggatgtggacgggatatatagagtgtcaggcaacttggcagtggtccaaaagttgcgatttctggtcgatcgagagcgcgctgtgacgtccgacggccggtacgttttccctgagcagccgggtcaagaaggccggctcgacctggatagcactgaatgggatgatatccatgtagtaaccggcgctttaaagctgtttcttcgcgagctaccacagccattggtgcctcctctactgctgccccactttcgagccgcccttgctctttcggagtctgagcaatgcttgtctcagatacaagagctgatcgggtctatgcccaaaccaaaccacgatacgctacggtacctactggagcacctgtgtagggtgatcgcgcactcggacaaaaatagaatgacccctcacaatttgggcatcgttttcggcccgacactgttccggcctgaacaagaaacttcagacccagcggcccacgcactgtacccagggcagcttgtgcaactgatgctgaccaacttcactagtttgtttccctag

SEQ ID NO: 292717 - DNA, 2253 bp, Artificial Sequence
  derived and/or modified sequence
atgctgagcagccgctggtggcccagctcctggggcatcctgggcctgggccccaggagccccccccggggcagccagctgtgtgccctgtatgccttcacctacaccggggctgatggccagcaggtgtccctggccgagggggaccgcttcctgctgctgaggaagaccaacagcgactggtggctggcccggcggctggaggcccccagcaccagccggcccatctttgtgcctgctgcctacatgattgaggagagcatccccagccagagccccaccaccgtcatccctggccagctgctgtggaccccaggccccaagctgttccacggcagcctggaggagctgagccaggccctgcccagccgggcccaggccagcagcgagcagcccccacccctgcccaggaagatgtgccgctctgtgtccacagacaacctgagccccagcctgctgaagcccttccaggagggccccagcggccgcagcctgagccaggaggacctgcccagcgaggccagcgccagcacagctggcccccagcccctgatgtctgagccccctgtgtactgcaacctggtggacctgcggcgctgccccaggagccccccacctggccctgcctgccccctgctgcagaggctggatgcctgggagcagcacctggaccccaacagcggccgctgcttctacatcaacagcctgaccggctgcaagtcctggaagccaccccggcgcagccgctctgagaccaaccctggctccatggagggcacccagaccctgaagagaaataatgatgtgctgcagccccaggccaagggcttcagaagtgacaccggcaccccagagcccctggacccccagggcagcctgagcctgagccagaggaccagccagctggaccccccagccctgcaggccccccggcccctgccccagctgctggatgacccccatgaggtggagaagagcggcctgctgaacatgaccaagatcgcccagggcggcaggaagctgaggaagaactggggccccagctgggtggtgctgactggaaacagcctggtgttctaccgggagcccccacccacagcccccagcagcggctggggccctgctggcagcaggcctgagagctctgtggacctgcggggggccgccctggcccacggccgccacctgagcagcagaagaaatgtgctgcacatccgcaccatccctggccacgagttcctgctgcagagcgaccatgaaacagagctgcgggcctggcaccgggccctgaggacagtcatcgagcggctggtgcgctgggtggaggcccggcgggaggcccccaccggccgggaccagggcagcggggaccgggagaaccccctggagctgcggctgagcggcagcggccctgctgagctgtctgctggggaggatgaggaggaggagagcgagctggtgtccaagcccctgctgcggctgagcagcagaagaagcagcatccggggccctgagggcacagagcagaacagagtgaggaacaagctgaagaggctcatcgccaagaggcctcccctgcagagcctgcaggagcggggcctgctgcgggaccaggtgtttggctgccagctggagagcctgtgccagcgggagggggacacagtgcccagcttcctgcggctgtgcatcgctgctgtggacaagaggggcctggatgtggatggcatctacagagtgtctggcaacctggccgtggtgcagaagctgcgcttcctggtggaccgggagagagctgtgaccagtgatggccgctacgtgtttcctgagcagcccggccaggagggccgcctggacctggacagcacagagtgggatgacatccacgtggtgactggagccctgaagctgttcctgcgggagctgccccagcccctggtgccccccctgctgctgccccacttccgggccgccctggccctgtctgagagcgagcagtgcctgagccagatccaggagctgattggctccatgcccaagcccaaccacgacaccctgcgctacctgctggagcacctgtgcagggtcatcgcccacagcgacaagaacaggatgaccccccacaacctgggcatcgtgtttggccccaccctcttccggcctgagcaggagaccagtgaccctgctgcccacgccctgtacccaggccagctggtgcagctgatgctgaccaacttcaccagcctcttcccctag

SEQ ID NO: 292718 - DNA, 2466 bp, Artificial Sequence
  derived and/or modified sequence
atgaggcggggcagcagtgacagctgtgccagcggcagccaggtggccggcaccaccgtggccggccctgcccaccctgagagcctgaccctgtgcagcggggaggccgagcggcggggcaaggaggagtggccagacagccaccactacccaggccccaccccagcccctgagagcagtgatggcccccacaaggtgacagtgctggccaccatgctgagcagccgctggtggcccagctcctggggcatcctgggcctgggccccaggagccccccccggggcagccagctgtgtgccctgtatgccttcacctacacaggagcagatggccagcaggtgtccctggccgagggggaccgcttcctgctgctgaggaagaccaacagcgactggtggctggcccggcggctggaggcccccagcaccagccggcccatctttgtgcctgctgcctacatgattgaggagagcatccccagccagagccccaccaccgtcatccctggccagctgctgtggaccccaggccccaagctgttccacggcagcctggaggagctgagccaggccctgcccagccgggcccaggccagcagcgagcagcccccacccctgcccaggaagatgtgccgctctgtgtccacagacaacctgagccccagcctgctgaagcccttccaggagggccccagcggccgcagcctgagccaggaggacctgcccagcgaggccagcgccagcacagctggcccccagcccctgatgtctgagccccctgtgtactgcaacctggtggacctgcggcgctgccccaggagccccccacctggccctgcctgccccctgctgcagaggctggatgcctgggagcagcacctggaccccaacagcggccgctgcttctacatcaacagcctgaccggctgcaagtcctggaagcccccaagaagaagccgctctgagaccaaccctggctccatggagggcacccagaccctgaagaggaacaatgatgtgctgcagccccaggccaagggcttcagaagtgacaccggcaccccagagcccctggacccccagggcagcctgagcctgagccagaggaccagccagctggaccccccagccctgcaggccccccggcccctgccccagctgctggatgacccccatgaggtggagaagagcggcctgctgaacatgaccaagatcgcccagggcggcaggaagctgaggaagaactggggccccagctgggtggtgctgaccggcaacagcctggtgttctaccgggagcccccacccacagcccccagcagcggctggggccctgctggcagcaggcctgagagctctgtggacctgcggggagctgccctggcccacggccgccacctgagcagcagaagaaatgtgctgcacatccgcaccatccctggccacgagttcctgctgcagagcgaccacgagacagagctgcgggcctggcaccgggccctgaggacagtgattgagcggctggtgcgctgggtggaggcccggcgggaggcccccaccggccgggaccagggcagcggggaccgggagaaccccctggagctgcggctgagcggcagcggccctgctgagctgtctgctggagaagatgaggaggaggagagcgagctggtgtccaagcccctgctgcggctgagcagccgccgcagcagcatccggggccctgagggcacagagcagaacagagtgaggaacaagctgaagaggctgattgccaagaggcctcccctgcagagcctgcaggagcggggcctgctgcgggaccaggtgtttggctgccagctggagagcctgtgccagcgggagggggacacagtgcccagcttcctgcggctgtgcatcgctgctgtggacaagaggggcctggatgtggatggcatctacagagtgtctggcaacctggccgtggtgcagaagctgcgcttcctggtggaccgggagagagctgtgaccagtgatggccgctacgtgtttcctgagcagcccggccaggagggccgcctggacctggacagcacagagtgggatgacatccacgtggtgactggagccctgaagctgttcctgcgggagctgccccagcccctggtgccccccctgctgctgccccacttccgggccgccctggccctgtctgagagcgagcagtgcctgagccagatccaggagctgattggctccatgcccaagcccaaccacgacaccctgcgctacctgctggagcacctgtgccgggtgattgcccacagcgacaagaacaggatgaccccccacaacctgggcatcgtgtttggccccaccctcttccggcctgagcaggagaccagtgaccctgctgcccacgccctgtacccaggccagctggtgcagctgatgctgaccaacttcaccagcctcttcccctag

SEQ ID NO: 292719 - DNA, 2253 bp, Artificial Sequence
  derived and/or modified sequence
atgctgagcagccggtggtggcccagcagctggggcatcctgggcctgggacctaggtcaccgcctagaggaagccagctttgcgccctgtatgcatttacctataccggagccgacgggcaacaagtctctctcgcagagggggaccgattcttgctgctgcgcaagaccaactcagactggtggctggccagacgcttagaagctccctcgactagtcgcccaattttcgtgccagcagcgtatatgattgaagagtccattccgtcccagtctcctacaacagtaatcccaggccagctgctgtggactccaggacctaaactattccacggctcattggaggaactgagccaggccctcccaagtcgcgcccaggcctcaagcgagcaacccccacctttaccccggaaaatgtgtcggtcagtgtccaccgacaacctgtcaccttccctcctcaagccctttcaggagggcccgtcggggaggagtctgtcccaggaagatctcccttctgaggccagtgccagtacagctgggccccagcccttgatgtcagagccgccagtgtactgcaatctggtagacttacgccgatgcccaagatctccccctccagggcctgcgtgccctcttctccagagacttgacgcatgggagcagcacctggaccctaattcgggaagatgtttctatattaacagcctgacaggatgcaagagctggaaacccccccgacgctcgcggtctgagacgaatccaggcagtatggagggcacacagaccttaaagcgcaacaacgatgttctgcaaccccaggctaagggattccgcagtgataccggaaccccagagccgctggatccacagggctctttgtctctttcccagcgcaccagtcagctcgaccctcctgccttgcaggcccccaggccactaccccagctgttggatgaccctcacgaggtcgaaaaatcgggcttgttaaacatgacaaagatcgcgcagggtggccggaagttgcgaaagaattgggggcctagctgggtggtgttaacggggaatagcttggtattctatcgcgaacccccacctaccgctccgtctagcggctgggggcctgccggctcacggcctgagtcgagcgtggatctgcgtggcgccgcactggcgcatggacggcatttgtcctcccggagaaatgtcttacatatccggactataccagggcatgaattccttctgcaatctgaccacgaaacagagctgagagcctggcatagagctttgcgcaccgttatcgaacgcctggtgcggtgggttgaggccagaagggaagcccctacagggagagaccaagggtcaggcgaccgggagaatccactggaactgcggttgtcaggcagtgggccagccgagctcagcgctggagaggacgaggaagaagagagtgagctcgtatctaaaccgctcctacggcttagtagtaggaggtctagcatccggggcccggagggaaccgaacagaaccgggtccgcaataagttgaagcgacttattgcaaagagaccaccactgcagagcctgcaggagcggggccttctacgcgatcaagtatttggttgtcagctagagtcgctctgtcagcgcgagggcgatacagtgccatccttcttgagactttgcattgccgcagtcgataaacggggcctggacgttgatgggatatacagagtctcaggaaatctggcagtagtccagaagcttcgttttctcgtcgatagagaaagagcggtgacctccgacggtcgatatgttttcccagagcagcccgggcaggagggaagactggaccttgactcaactgagtgggatgatattcatgtagtgacaggggccttaaagctcttcctgagggaactccctcaacccctggtgcccccgctgctcctgccccactttcgtgccgcgctcgcgctgtctgaatccgagcagtgtctgtcccagatccaggagctgatcggatccatgcctaaacccaatcacgacactttacggtatttgcttgagcatctatgccgggttatcgcccactccgacaagaatcgcatgactccacataatttgggcatagtcttcggccccaccctcttcagacctgaacaggagacctcagacccggccgcccacgcactataccctgggcaactcgtgcagctgatgttgaccaatttcacttcattattcccatag

SEQ ID NO: 292720 - DNA, 2466 bp, Artificial Sequence
  derived and/or modified sequence
atgcggcggggcagcagcgacagctgcgccagcggcagccaggtggccggtacaacagtggccggacctgcacacccagagtcgctcactctgtgttctggagaagccgagcgcagaggaaaggaggagtggcctgattcccaccactatcctggtccgacacctgcccctgaaagcagcgatggcccgcacaaggtcacagtgctagcaactatgttatcgtctcgttggtggccttcctcctggggcattttgggactagggcctaggagcccacctcggggttctcaactgtgtgctctgtacgctttcacgtacacaggcgcagacggccaacaggtgagcttggctgagggcgaccgctttctgctgctgagaaagacaaatagcgattggtggcttgcccgcaggctcgaggcccctagcacaagcaggcctatattcgtgcctgccgcttacatgatagaggaatccataccctcgcagtctccgaccaccgttatcccggggcagctcctatggactccagggccaaagctctttcatggctcactagaggaactgtcacaagccctgccgagcagagcacaggccagttccgaacaacctccgcccttacctcgcaaaatgtgccggagcgtgagtaccgataacctctctccctcattgcttaaaccatttcaggaaggtccatctgggcggtccctcagccaggaagacttgccttcggaggcctcggctagcacagcaggtccacagcctttaatgtccgaaccgcctgtatactgtaacttggtggaccttcgccggtgcccaaggtctccaccacctgggcccgcatgcccactgcttcagcggcttgatgcatgggagcagcatctcgatcccaacagtggtcgatgtttctacataaacagcctgacaggttgcaaaagttggaaaccccccaggaggagccgatctgaaacaaacccgggctccatggaaggtacacagacgcttaagcgcaacaacgacgtgctgcagcctcaggcaaagggtttccgtagtgacacaggtacccctgagcccctagatccgcaggggagcttgagtctatcacagagaactagtcagctggaccctcctgcgcttcaggcgcctagaccactgccgcaactacttgacgacccacacgaggttgagaagtccggtttacttaacatgaccaaaatagcccagggaggtaggaaactccgcaagaactggggacctagctgggttgtcctgacagggaactctttagttttttatcgcgagccgccaccaacagcgccatcctcaggatggggccccgccgggtctcgccctgagagcagtgtcgatctgagaggcgccgccctggcacacggtcgacatctaagcagtcgccgaaacgtgttgcatattcggacgattcccggccacgagttccttctccaaagtgatcacgagacggaattacgagcctggcatcgcgccctgaggactgtcatagagcgcctggtgaggtgggtggaagccagacgcgaggctcccacaggccgggatcagggtagtggcgatcgagagaatcctctcgagctgagactctcaggttcagggccagctgagttgtctgccggggaggacgaggaagaagagagcgagctcgtgtccaagccgctgctgcgactgagcagtagacgttcgagcattaggggaccagaggggaccgagcagaatagagtgcggaataaactcaagcgccttatcgctaagaggccccccctgcagtcactgcaggaacgagggctgctccgcgatcaggttttcggctgtcagctggagagtctgtgccaaagggagggtgatactgtgccctcgtttctcagattgtgcatcgccgccgtggataagagaggcctagatgtggacggaatttaccgggtatcagggaacctggcggtggttcaaaaactgagatttctggttgatagggaaagggccgtaactagtgatggccggtacgtcttccccgagcagcccggccaagagggacgcctggatctggatagtaccgagtgggacgacatacacgtcgtaactggcgcactgaaactttttttacgggagctcccccagcccctagtgcccccacttcttctgccccacttccgggccgcactcgccttgtccgagtctgagcagtgtttgagccaaatccaggagctgattggcagcatgcccaagccaaatcacgataccctcagatatttactggagcacttgtgccgggtaattgcccacagcgataagaatagaatgaccccacataatctggggattgtatttgggcccaccctgtttaggcccgagcaggagacctcagatcctgcagcccacgccttatacccaggtcaattggtacagcttatgctgactaattttacttcactgttcccttag

SEQ ID NO: 292721 - DNA, 2253 bp, Artificial Sequence
  derived and/or modified sequence
atgctcagcagccgctggtggccctcatcatggggcattttaggcctcggccctagaagtcccccacgtgggagtcagttgtgcgccctctatgctttcacctacaccggtgcagacgggcaacaggtgtctctggccgagggagacagatttctgttgctgcggaagaccaacagcgactggtggctggccagacgcctggaggctccaagcaccagccggcctatatttgtcccagccgcatatatgatagaggagtccatcccgagccaatcaccaacaaccgtaattccaggacagctactctggacaccaggacccaaactctttcacggatccctggaggaattgagtcaggcactgcccagtagagcccaggcctccagcgagcagccacctccgctaccaagaaagatgtgcaggtccgtgtctaccgataatctgtctccgtcccttctgaagccctttcaagagggccctagcgggagatctctctctcaggaggacctgcccagcgaggcgagcgccagcaccgcagggcctcagccgctgatgagtgagccaccggtctactgtaacttggtcgatctcagacgctgcccacgatcccccccacccggtcccgcatgcccactattacaacggctagatgcttgggagcagcatttggaccctaattctggcagatgcttctatattaactccctgaccggctgtaagagctggaaaccacctaggcgatccaggtccgagacgaatcccggatcaatggagggcacccagaccctgaaacgtaataacgacgtcttgcagccacaggctaagggcttccggtctgacaccggtaccccagaaccactggaccctcagggtagtcttagcctcagtcagagaacaagccagcttgatcccccagcactacaggctcccaggcctttgcctcaactgctggatgacccacacgaagtagagaagagtgggctcttgaatatgacgaaaatcgctcagggaggtcggaagttgcgcaagaactgggggccatcctgggtagtgcttaccggcaattccctagtgttttacagagaacctccgcctactgccccaagttccggatgggggccagctgggagtcggccagagtcgagtgtcgacctgaggggggctgcacttgctcacggcaggcatttaagctccagaagaaatgttctgcacattaggacaataccaggacacgagttcctgctgcaatctgatcacgaaactgagctcagggcctggcaccgcgctctgcgcaccgtgatagagcggctggttcggtgggtggaggccaggcgcgaggctcccacaggccgtgaccaggggagcggagatcgcgagaaccctctggagttgcgtcttagtggtagtggccctgctgaactgtctgccggagaagatgaggaggaagagagcgaactcgtcagtaagccattacttcgactgtcctctcgccgatctagtatccgcggtccagagggtacagagcaaaacagagtgcggaacaaactgaaaaggttgatcgccaagagaccccctctgcagagtctgcaggaaaggggattgcttcgcgatcaagtcttcggatgtcagctggagtctctgtgtcagagggagggagacaccgtgccaagctttctccgcctctgcatcgcagccgttgacaaacggggactggacgtggatgggatctatcgggtatccgggaacctagcagttgtccagaagctgagattcctggtggatcgcgagcgtgccgtgacatccgacggaaggtacgtattccccgagcagcctgggcaggaagggaggttggacctggatagcacggagtgggacgacattcacgtagttacaggggcactcaaactgttcctacgggagctgcctcagccattggtgccaccgttgcttctgccccactttcgtgccgcactggcgttgagtgaatctgaacaatgcctttcacaaattcaagagcttattggtagtatgccgaaacctaaccacgataccttgagatacctcctggagcatttgtgtcgggttattgcccactccgataagaaccggatgacccctcataaccttgggatcgtattcggacccacgctctttagacccgagcaggaaactagcgacccagctgcgcatgcattgtacccgggacagctcgttcagcttatgctgaccaacttcacctccctattcccatag

SEQ ID NO: 292722 - DNA, 2466 bp, Artificial Sequence
  derived and/or modified sequence
atgcggaggggttcgagcgacagctgtgccagtggcagccaggtggcgggaactaccgtcgccggaccagcacaccccgaaagtctaaccctgtgcagcggagaagcagaacggaggggaaaagaagaatggcctgattcccaccactacccgggtcctacccccgcaccagagtcatctgatggaccccataaagtgaccgtgctagcgacaatgctttcatcccgctggtggccatcctcctggggaatcctgggtctgggcccaagatctccaccaagaggtagtcagctctgcgctctgtacgcttttacctacacaggggctgatgggcagcaagttagcctagcagaaggcgatcgctttttattattgcgtaaaacgaattctgactggtggctagctcgcaggttagaggctccttctacgtcccggccaatattcgtgcctgcagcctacatgatcgaggagtccatcccctctcagagccccactaccgtcatccctggacagttgctctggacccccggtccaaagttgtttcacggcagcttagaagagctctcacaagcgttgcctagtcgcgctcaggctagttccgaacagccgcctccactgcccaggaaaatgtgtagatcagtatctacggataacctaagtccaagtctgctgaaaccatttcaagaaggccctagcgggaggagtctgagccaggaggacttacctagcgaggcatctgcctctacagcaggtccccagcctttgatgtccgaaccccctgtctactgtaacctggtcgacctacgcagatgcccaagatctcccccaccaggcccagcatgtcctctgcttcagagactggatgcctgggaacagcacctggaccccaactcgggacggtgtttttacataaattctctcacgggctgcaagtcttggaagcctcccagacgatccaggtccgagaccaaccccggatctatggagggtacccagactctcaaacgaaacaatgacgtgctgcagccccaggctaagggcttccgaagcgatacaggcacgccagagccactggatcctcagggatctctctccctgtcccagcgaaccagtcagctggacccccctgcgctgcaagctccccgtccactacctcagttgctggacgatccacatgaagtcgagaaatctggcctcctaaacatgaccaaaatcgcgcagggtggcagaaaactgcgtaagaattggggccctagttgggtcgtgctaaccggcaattccctggttttctaccgagagccaccacccactgccccttcctctggttggggcccagctggaagcaggccagagtcatccgtcgatttaagaggcgcagccctcgcccatggtcgacacttgtctagcagaaggaacgtgctccacatccgtactattcccggacatgagtttcttctgcagtcagaccacgagaccgaattgcgagcctggcatcgtgcgcttcgtaccgtcatcgagaggctggtccgatgggtagaggcccgaagggaggccccaaccggacgcgaccaagggagcggagatagagagaaccccctggaactgcggctcagcggttctggacccgcagagctgtcggccggagaagatgaagaggaggaaagtgaactggtgtctaagcctttgttaagactctcgagtaggcgctctagcatccgtggtccagagggaacagaacagaatagggtgagaaacaagctcaagaggctgattgcgaagcggcctccgctgcagtcccttcaggagagaggcctgttgagagaccaagttttcggctgccaactggaaagcctgtgccaacgcgagggcgatacagtcccctcattcctgagattgtgcattgccgctgtggacaagagggggctggacgtcgacgggatctaccgtgttagcggtaatctcgccgtcgtccagaagttgaggttcctagtggatcgtgaacgagcagttacctctgacgggcgatacgtgtttccagagcagcctggacaggaaggtaggctggatttggactctacagagtgggatgacattcatgtggtgaccggagcacttaagctctttttgcgggagctacctcagcctctcgtgcctcctctgctgctgccccattttagggccgcactggctctctccgaaagtgagcagtgcctatcccaaatccaggaactgatcggttcgatgcccaagccaaaccatgacactctccggtacctattggaacacctatgcagagtcatcgcccactctgacaaaaaccgaatgaccccacacaatttggggatagtgttcggtccaactttgttccggccagagcaggagacctctgaccctgcagcccatgccctttatcccggacaattggtgcaactgatgctaaccaacttcacatcattatttccctag

SEQ ID NO: 292723 - DNA, 2653 bp, Artificial Sequence
  derived and/or modified sequence
ctccctgtttctgtcttgaacctgattctttcttcttatctccttcctgtgtccacctcaagactcccaccactacccaggaccaactcctgctcctgaatcttctgatgggccccacaaggtgacagtgctggctacaatgctatccagccggtggtggccaagttcctgggggatcctagggctgggcccccgaagccctcctcggggatcccagctctgtgccctctatgcctttacttatactggggcagatggccagcaggtgtctctggctgaaggggataggttcctactgcttcgaaagaccaactccgactggtggttggcaagacgcctagaagctccctccacctctcgacccatcttcgtcccagcagcctatatgatagaggaatccatcccttcccagagtccaactaccgtcatccccggccaattgctctggactcctgggccgaagttgtttcatggttccctggaggagttgtctcaggccctcccaagcagggctcaggctagctcggagcagcctcctccacttccccgcaaaatgtgtaggagcgtcagcactgacaatctgagccccagccttctgaagcctttccaggaaggaccaagcggaagatccctctcccaggaagacttgccgtcagaagccagtgccagcacagcaggcccccagcccctcatgtcagagccccctgtgtactgtaacctggtggaccttcgccgctgtcctcggtccccacccccaggccctgcatgccccctgctgcagaggctggatgcctgggagcagcacctggaccccaactctggacgctgcttctacataaattcactgactggctgcaagtcctggaagcccccgcgccgcagtcgcagcgagacgaaccctggctccatggaggggacacagaccctgaagaggaacaatgatgtcctgcaacctcaggcaaagggcttcagatctgacacagggaccccagaaccgcttgacccacagggttcactcagcctcagccaacgcacctcgcagcttgaccctccagccttgcaggcccctcgacctctgccgcagctcctggacgacccccatgaggtggaaaagtcgggtctgctcaacatgaccaagattgcccaaggggggcgcaagctcaggaagaactggggcccgtcttgggtggtgttaacgggtaacagcctggtgttctaccgagagccaccgccgacagcgccctcctcaggctggggaccagcgggtagccggcccgaaagtagcgtggacctgcgcggggcggccctggcgcacggccgccacctgtccagccgccgcaacgtcctgcacatccgcacgatccctggccacgagttcctgctgcagtcggaccacgagacagagctgcgagcctggcaccgcgcgctgcggactgtcatcgagcggctggttagatgggtggaggcccggagggaggctccgaccggccgggaccaagggagtggggatcgggagaaccccctggagctgcgtctgtcgggctctggacccgcggagctgagcgccggggaggacgaagaagaggagtcggagctggtgtccaagccgctgctgcgcctcagcagccgccggagctccattcgggggcccgaaggcaccgagcagaaccgcgtgcgcaacaaactaaagcggctcatcgcgaagagaccgcccttacaaagcctgcaggagcggggtctgctccgagaccaggtgttcggctgccagttggaatcactctgccagcgggaaggagacacggtgcccagctttttgcggctctgcattgctgctgtggataaaagaggtctagatgtggatggcatttatcgggtgagcgggaacttggcagtggtccagaagcttcgctttctggtggacagagagcgtgcggtcacctccgatgggaggtatgtgttcccagaacagccaggacaagaaggtcggttagatttggacagtactgagtgggatgacattcatgtggtcaccggagccctgaagctttttctccgggagctgccccagcctctggtgccaccactgctgctgccccatttccgtgctgcccttgcactctccgaatcagagcagtgcctctctcagatacaagaattaataggctcaatgccaaagcccaaccatgacactctacggtacctcctggagcatttatgcagggtgatagcacactcagataagaatcgcatgacaccccacaacctgggaattgtgtttggaccaaccctgtttcggccagagcaggagacatctgacccagcagcccatgctctctacccagggcagctggtccagctgatgctcaccaacttcaccagcctcttcccctgatgcagggaaggaagaagagaaaacatatttccggtcatctctggtggtgagaggctggtgttctgttttgaggatatccctttaaatctcccaaatgactgtctctatcttcatgagtgtgacttgaggtgttgggatgggtgagggagcttctctaaagaggaaagtgagtggattaacccctgcttctcttcttgttccctgttatcattcctccccaacataataatacataaagtggcatggtattttttctgatgc

SEQ ID NO: 292724 - DNA, 2912 bp, Artificial Sequence
  derived and/or modified sequence
gctggaagcaacagatggggactgcagaggaggtggtggtattgggatagtgctgcagccaagaacttaacgactgaaagtaactgggatatcttcataattatctgaaggtcacagtgggagaacaaaattaaaagaactgagaagacttacaagagaacctcctaagagtcacccaaacaatcggctgagaatgagaagaggttcaagtgattcttgtgcctcaggctcccaagtagctgggactacagtagctgggccagcacacccagaaagcctcacattgtgcagtggagaagctgagagaagaggaaaagaggagtggccagactcccaccactacccaggaccaactcctgctcctgaatcttctgatgggccccacaaggtgacagtgctggctacaatgctatccagccggtggtggccaagttcctgggggatcctagggctgggcccccgaagccctcctcggggatcccagctctgtgccctctatgcctttacttatactggggcagatggccagcaggtgtctctggctgaaggggataggttcctactgcttcgaaagaccaactccgactggtggttggcaagacgcctagaagctccctccacctctcgacccatcttcgtcccagcagcctatatgatagaggaatccatcccttcccagagtccaactaccgtcatccccggccaattgctctggactcctgggccgaagttgtttcatggttccctggaggagttgtctcaggccctcccaagcagggctcaggctagctcggagcagcctcctccacttccccgcaaaatgtgtaggagcgtcagcactgacaatctgagccccagccttctgaagcctttccaggaaggaccaagcggaagatccctctcccaggaagacttgccgtcagaagccagtgccagcacagcaggcccccagcccctcatgtcagagccccctgtgtactgtaacctggtggaccttcgccgctgtcctcggtccccacccccaggccctgcatgccccctgctgcagaggctggatgcctgggagcagcacctggaccccaactctggacgctgcttctacataaattcactgactggctgcaagtcctggaagcccccgcgccgcagtcgcagcgagacgaaccctggctccatggaggggacacagaccctgaagaggaacaatgatgtcctgcaacctcaggcaaagggcttcagatctgacacagggaccccagaaccgcttgacccacagggttcactcagcctcagccaacgcacctcgcagcttgaccctccagccttgcaggcccctcgacctctgccgcagctcctggacgacccccatgaggtggaaaagtcgggtctgctcaacatgaccaagattgcccaaggggggcgcaagctcaggaagaactggggcccgtcttgggtggtgttaacgggtaacagcctggtgttctaccgagagccaccgccgacagcgccctcctcaggctggggaccagcgggtagccggcccgaaagtagcgtggacctgcgcggggcggccctggcgcacggccgccacctgtccagccgccgcaacgtcctgcacatccgcacgatccctggccacgagttcctgctgcagtcggaccacgagacagagctgcgagcctggcaccgcgcgctgcggactgtcatcgagcggctggttagatgggtggaggcccggagggaggctccgaccggccgggaccaagggagtggggatcgggagaaccccctggagctgcgtctgtcgggctctggacccgcggagctgagcgccggggaggacgaagaagaggagtcggagctggtgtccaagccgctgctgcgcctcagcagccgccggagctccattcgggggcccgaaggcaccgagcagaaccgcgtgcgcaacaaactaaagcggctcatcgcgaagagaccgcccttacaaagcctgcaggagcggggtctgctccgagaccaggtgttcggctgccagttggaatcactctgccagcgggaaggagacacggtgcccagctttttgcggctctgcattgctgctgtggataaaagaggtctagatgtggatggcatttatcgggtgagcgggaacttggcagtggtccagaagcttcgctttctggtggacagagagcgtgcggtcacctccgatgggaggtatgtgttcccagaacagccaggacaagaaggtcggttagatttggacagtactgagtgggatgacattcatgtggtcaccggagccctgaagctttttctccgggagctgccccagcctctggtgccaccactgctgctgccccatttccgtgctgcccttgcactctccgaatcagagcagtgcctctctcagatacaagaattaataggctcaatgccaaagcccaaccatgacactctacggtacctcctggagcatttatgcagggtgatagcacactcagataagaatcgcatgacaccccacaacctgggaattgtgtttggaccaaccctgtttcggccagagcaggagacatctgacccagcagcccatgctctctacccagggcagctggtccagctgatgctcaccaacttcaccagcctcttcccctgatgcagggaaggaagaagagaaaacatatttccggtcatctctggtggtgagaggctggtgttctgttttgaggatatccctttaaatctcccaaatgactgtctctatcttcatgagtgtgacttgaggtgttgggatgggtgagggagcttctctaaagaggaaagtgagtggattaacccctgcttctcttcttgttccctgttatcattcctccccaacataataatacataaagtggcatggtattttt

SEQ ID NO: 292725 - DNA, 2253 bp, Artificial Sequence
  derived and/or modified sequence
atgctgagcagcagatggtggcccagcagctggggcatcctgggcctgggccccagaagcccccccagaggcagccagctgtgcgccctgtacgccttcacctacaccggcgccgacggccagcaggtgagcctggccgagggcgacagattcctgctgctgagaaagaccaacagcgactggtggctggccagaagactggaggcccccagcaccagcagacccatcttcgtgcccgccgcctacatgatcgaggagagcatccccagccagagccccaccaccgtgatccccggccagctgctgtggacccccggccccaagctgttccacggcagcctggaggagctgagccaggccctgcccagcagagcccaggccagcagcgagcagcccccccccctgcccagaaagatgtgcagaagcgtgagcaccgacaacctgagccccagcctgctgaagcccttccaggagggccccagcggcagaagcctgagccaggaggacctgcccagcgaggccagcgccagcaccgccggcccccagcccctgatgagcgagccccccgtgtactgcaacctggtggacctgagaagatgccccagaagccccccccccggccccgcctgccccctgctgcagagactggacgcctgggagcagcacctggaccccaacagcggcagatgcttctacatcaacagcctgaccggctgcaagagctggaagccccccagaagaagcagaagcgagaccaaccccggcagcatggagggcacccagaccctgaagagaaacaacgacgtgctgcagccccaggccaagggcttcagaagcgacaccggcacccccgagcccctggacccccagggcagcctgagcctgagccagagaaccagccagctggacccccccgccctgcaggcccccagacccctgccccagctgctggacgacccccacgaggtggagaagagcggcctgctgaacatgaccaagatcgcccagggcggcagaaagctgagaaagaactggggccccagctgggtggtgctgaccggcaacagcctggtgttctacagagagcccccccccaccgcccccagcagcggctggggccccgccggcagcagacccgagagcagcgtggacctgagaggcgccgccctggcccacggcagacacctgagcagcagaagaaacgtgctgcacatcagaaccatccccggccacgagttcctgctgcagagcgaccacgagaccgagctgagagcctggcacagagccctgagaaccgtgatcgagagactggtgagatgggtggaggccagaagagaggcccccaccggcagagaccagggcagcggcgacagagagaaccccctggagctgagactgagcggcagcggccccgccgagctgagcgccggcgaggacgaggaggaggagagcgagctggtgagcaagcccctgctgagactgagcagcagaagaagcagcatcagaggccccgagggcaccgagcagaacagagtgagaaacaagctgaagagactgatcgccaagagaccccccctgcagagcctgcaggagagaggcctgctgagagaccaggtgttcggctgccagctggagagcctgtgccagagagagggcgacaccgtgcccagcttcctgagactgtgcatcgccgccgtggacaagagaggcctggacgtggacggcatctacagagtgagcggcaacctggccgtggtgcagaagctgagattcctggtggacagagagagagccgtgaccagcgacggcagatacgtgttccccgagcagcccggccaggagggcagactggacctggacagcaccgagtgggacgacatccacgtggtgaccggcgccctgaagctgttcctgagagagctgccccagcccctggtgccccccctgctgctgccccacttcagagccgccctggccctgagcgagagcgagcagtgcctgagccagatccaggagctgatcggcagcatgcccaagcccaaccacgacaccctgagatacctgctggagcacctgtgcagagtgatcgcccacagcgacaagaacagaatgaccccccacaacctgggcatcgtgttcggccccaccctgttcagacccgagcaggagaccagcgaccccgccgcccacgccctgtaccccggccagctggtgcagctgatgctgaccaacttcaccagcctgttcccctag

SEQ ID NO: 292726 - DNA, 2466 bp, Artificial Sequence
  derived and/or modified sequence
atgagaagaggcagcagcgacagctgcgccagcggcagccaggtggccggcaccaccgtggccggccccgcccaccccgagagcctgaccctgtgcagcggcgaggccgagagaagaggcaaggaggagtggcccgacagccaccactaccccggccccacccccgcccccgagagcagcgacggcccccacaaggtgaccgtgctggccaccatgctgagcagcagatggtggcccagcagctggggcatcctgggcctgggccccagaagcccccccagaggcagccagctgtgcgccctgtacgccttcacctacaccggcgccgacggccagcaggtgagcctggccgagggcgacagattcctgctgctgagaaagaccaacagcgactggtggctggccagaagactggaggcccccagcaccagcagacccatcttcgtgcccgccgcctacatgatcgaggagagcatccccagccagagccccaccaccgtgatccccggccagctgctgtggacccccggccccaagctgttccacggcagcctggaggagctgagccaggccctgcccagcagagcccaggccagcagcgagcagcccccccccctgcccagaaagatgtgcagaagcgtgagcaccgacaacctgagccccagcctgctgaagcccttccaggagggccccagcggcagaagcctgagccaggaggacctgcccagcgaggccagcgccagcaccgccggcccccagcccctgatgagcgagccccccgtgtactgcaacctggtggacctgagaagatgccccagaagccccccccccggccccgcctgccccctgctgcagagactggacgcctgggagcagcacctggaccccaacagcggcagatgcttctacatcaacagcctgaccggctgcaagagctggaagccccccagaagaagcagaagcgagaccaaccccggcagcatggagggcacccagaccctgaagagaaacaacgacgtgctgcagccccaggccaagggcttcagaagcgacaccggcacccccgagcccctggacccccagggcagcctgagcctgagccagagaaccagccagctggacccccccgccctgcaggcccccagacccctgccccagctgctggacgacccccacgaggtggagaagagcggcctgctgaacatgaccaagatcgcccagggcggcagaaagctgagaaagaactggggccccagctgggtggtgctgaccggcaacagcctggtgttctacagagagcccccccccaccgcccccagcagcggctggggccccgccggcagcagacccgagagcagcgtggacctgagaggcgccgccctggcccacggcagacacctgagcagcagaagaaacgtgctgcacatcagaaccatccccggccacgagttcctgctgcagagcgaccacgagaccgagctgagagcctggcacagagccctgagaaccgtgatcgagagactggtgagatgggtggaggccagaagagaggcccccaccggcagagaccagggcagcggcgacagagagaaccccctggagctgagactgagcggcagcggccccgccgagctgagcgccggcgaggacgaggaggaggagagcgagctggtgagcaagcccctgctgagactgagcagcagaagaagcagcatcagaggccccgagggcaccgagcagaacagagtgagaaacaagctgaagagactgatcgccaagagaccccccctgcagagcctgcaggagagaggcctgctgagagaccaggtgttcggctgccagctggagagcctgtgccagagagagggcgacaccgtgcccagcttcctgagactgtgcatcgccgccgtggacaagagaggcctggacgtggacggcatctacagagtgagcggcaacctggccgtggtgcagaagctgagattcctggtggacagagagagagccgtgaccagcgacggcagatacgtgttccccgagcagcccggccaggagggcagactggacctggacagcaccgagtgggacgacatccacgtggtgaccggcgccctgaagctgttcctgagagagctgccccagcccctggtgccccccctgctgctgccccacttcagagccgccctggccctgagcgagagcgagcagtgcctgagccagatccaggagctgatcggcagcatgcccaagcccaaccacgacaccctgagatacctgctggagcacctgtgcagagtgatcgcccacagcgacaagaacagaatgaccccccacaacctgggcatcgtgttcggccccaccctgttcagacccgagcaggagaccagcgaccccgccgcccacgccctgtaccccggccagctggtgcagctgatgctgaccaacttcaccagcctgttcccctag

SEQ ID NO: 292727 - protein, 661 aa, Artificial Sequence
  derived and/or modified sequence
MDLVLKRCLLHLAVIGALLAVGATKVPRNQDWLGVSRQLRTKAWNRQLYPEWTEAQRLDCWRGGQVSLKVSNDGPTLIGANASFSIALNFPGSQKVLPDGQVIWVNNTIINGSQVWGGQPVYPQETDDACIFPDGGPCPSGSWSQKRSFVYVWKTWGQYWQVLGGPVSGLSIGTGRAMLGTHTMEVTVYHRRGSRSYVPLAHSSSAFTITDQVPFSVSVSQLRALDGGNKHFLRNQPLTFALQLHDPSGYLAEADLSYTWDFGDSSGTLISRALVVTHTYLEPGPVTAQVVLQAAIPLTSCGSSPVPGTTDGHRPTAEAPNTTAGQVPTTEVVGTTPGQAPTAEPSGTTSVQVPTTEVISTAPVQMPTAESTGMTPEKVPVSEVMGTTLAEMSTPEATGMTPAEVSIVVLSGTTAAQVTTTEWVETTARELPIPEPEGPDASSIMSTESITGSLGPLLDGTATLRLVKRQVPLDCVLYRYGSFSVTLDIVQGIESAEILQAVPSGEGDAFELTVSCQGGLPKEACMEISSPGCQPPAQRLCQPVLPSPACQLVLHQILKGGSGTYCLNVSLADTNSLAVVSTQLIMPGQEAGLGQVPLIVGILLVLMAVVLASLIYRRRLMKQDFSVPQLPHSSSHWLRLPRIFCSCPIGENSPLLSGQQV

SEQ ID NO: 292728 - protein, 151 aa, Artificial Sequence
  derived and/or modified sequence
MDLVLKRCLLHLAVIGALLAVGATKVPRNQDWLGVSRQLRTKAWNRQLYPEWTEAQRLDCWRGGQVSLKVSNDGPTLIGANASFSIALNFPGSQKVLPDGQVIWVNNTIINGSQVWGGQPVYPQETDDACIFPDGGPCPSGSWSQKRSFVY

SEQ ID NO: 292729 - DNA, 1986 bp, Artificial Sequence
  derived and/or modified sequence
atggacctggtgctgaagcggtgcctgctgcacctggccgtgatcggcgcactactggccgtgggggccaccaaagtcccacgaaaccaggactggttaggggtgtcacgacaacttagaactaaggcttggaacaggcagctgtatcctgaatggacggaagctcagcggctagactgctggaggggtggccaggtgtcactgaaggtcagcaacgacggccctaccctgataggagcaaacgcttccttctccatcgccctcaattttccaggaagccagaaagttctgcccgatgggcaggtgatatgggtgaacaacaccattatcaatggctctcaggtgtggggaggccagcccgtgtacccccaggagaccgatgacgcctgtatttttcccgacggcggaccgtgcccaagtggcagttggagccagaagcggtccttcgtatacgtttggaaaacatggggacagtactggcaggtgctgggagggcccgtttccggacttagtattggaaccggccgggcaatgctgggtactcataccatggaagtgacagtgtatcatcgcagggggagcagaagttatgtccctttggcacatagttcctccgcatttactatcacagaccaggtcccgttttccgtgtcagtctcacagctgagggcccttgatggtggtaataaacactttctcaggaatcagcctcttacctttgcactgcagctacacgatcccagcggttacctggccgaggcagacctgtcctacacatgggactttggggactcctctggcaccctgatctctcgagctctagtggttactcacacatatctggagcccggtcccgtcacagctcaggtggtcctccaggcggctattccgctgaccagctgtggatcgagccccgtccctggtacaaccgatggtcatcggcctaccgccgaggctcccaatacgacagctggtcaggtacctacaactgaagtcgtggggaccacccccggacaggcccccaccgcagaaccaagtggcaccactagcgttcaggtgcccaccaccgaagttatttccaccgcgcccgtgcagatgccaaccgctgaatctaccggaatgactcccgagaaggtacctgtgtccgaagtcatggggaccaccctggccgagatgtccacacccgaggccaccggaatgacccccgcagaggtctcaatcgttgtgctgagcggtacgaccgccgcccaagtaacgaccacagaatgggtcgagacaacggcaagggaattgcctattccagagcctgagggcccggatgcttcatccatcatgtcaactgagtctatcactgggagcttgggtcccctgcttgatggaaccgcgacactgagattggtgaagcggcaggttcctctggattgcgtattgtaccgttacggcagtttctccgttacacttgatattgtgcagggtatcgagtctgcggaaatcttgcaagctgtcccttcaggcgaaggcgatgccttcgagctaacagttagttgccagggcgggcttcccaaggaagcttgcatggagatctcttccccaggatgtcagccaccggcacagaggctgtgtcaacctgtgctgccatctcccgcctgtcagcttgtcctccaccagattttaaaagggggttcaggcacttattgcctaaatgtgtctttagcagacactaactctctcgcagtcgtctcaacccagctgataatgcctggacaagaagcaggcctcgggcaagttccactgatcgtcggcatactgctggtgctcatggcagtggtcttggcaagcctgatctatcgaagacgccttatgaagcaggatttctctgtgccccagctacctcactcttctagccattggttgagactcccaaggatcttctgcagctgcccgatcggtgagaattctccacttctgagtggtcagcaggtgtag

SEQ ID NO: 292730 - DNA, 1986 bp, Artificial Sequence
  derived and/or modified sequence
atggacctggtgctgaagcggtgcctgctgcacctggccgtgatcggcgccctcctggcggtgggagccacgaaggtgcctagaaatcaagattggctcggcgttagtcgacaactccgcactaaggcatggaacagacaactatacccggaatggacagaggcgcagaggctcgactgttggcgaggagggcaggtgtccctgaaagttagcaatgacggccccactcttattggcgccaatgccagctttagcattgctttaaactttccggggtctcaaaaggtgctcccagacggccaggtgatttgggtgaataacactatcatcaatggctctcaggtttggggcggccagcctgtttacccccaggaaaccgatgatgcttgcatctttcccgacggcggtccttgcccttctggctcctggtcgcagaaacgctcattcgtgtatgtctggaagacttgggggcagtattggcaggttttgggcggcccggtgagcggactgtctatcggaacaggtcgggcaatgctgggcacccacactatggaggtgacagtgtaccaccggcggggcagtcgcagctacgttcctctcgcccactcttcgtccgctttcactatcaccgatcaggtgcccttctcggtgagcgtgtcccagctgcgagcgcttgacggaggaaacaaacacttcctcagaaaccagccacttactttcgctctgcagctccacgacccctctgggtacctggcagaagccgatttatcctacacatgggactttggggacagctccggcactcttatttcccgagctctggtggtcactcatacctatctggagcctggtcccgtaactgcacaggtggtcctccaagctgcaattcccctaaccagctgcggatccagcccagtgcctggaacgaccgatggccatcgccctactgcagaggcccccaacaccacagccggccaggtcccaaccaccgaagtggtggggactactccagggcaggctccaaccgcagagccttccggtaccacctccgttcaggtgcctacaactgaggtgatttccaccgcccctgtccaaatgccaaccgctgaatctaccggcatgaccccagaaaaggtacccgtgtccgaggtgatgggcaccaccttggccgaaatgtcaacaccagaggcaactgggatgactccagctgaagtcagcatcgttgttctgagcggcaccactgcagcccaggtgactacaacagagtgggtggaaaccacagccagagagttgcctatccctgagccggaaggccctgatgccagctcaattatgtcaaccgagagcataaccggatctttgggtccgctgttagacggaacagcgaccctccgactggtgaaacggcaggttcccctggactgtgtactgtacagatacggctcctttagcgtgaccctagatattgtgcaaggaatcgagagtgccgagattctacaggcagttccttcgggcgagggagacgcatttgagcttaccgtttcttgccagggaggactgccaaaggaggcgtgtatggaaatttcctccccaggctgtcagcctccggcacagcgcttgtgccagccagtgctgccttctcctgcctgtcaacttgttctgcatcagattctcaagggagggtccggtacttactgtcttaatgtgagtctggccgatactaactccttagccgttgtgagtacacaactgataatgcccggacaggaggctggtctcggccaggtcccactcatcgtgggcatcttattggtgctcatggcggttgtgcttgccagcttaatttataggaggcgcttaatgaagcaagattttagcgtacctcaattgcctcactccagtagccactggctccgactccctagaattttttgttcttgcccaataggagagaacagcccattgttgagcggccagcaggtgtag

SEQ ID NO: 292731 - DNA, 1986 bp, Artificial Sequence
  derived and/or modified sequence
atggacctggtgctgaagcggtgcctgctgcacctggccgtgatcggagcactccttgcagtgggcgccactaaggtgcccagaaaccaagattggctgggtgtaagcagacaactccgaactaaggcctggaaccgtcagctttatcccgaatggaccgaggctcaaaggttggattgctggcgaggcggacaggtcagtcttaaagtgagtaacgacggacccacattgattggagcgaacgcctccttcagtatcgcactaaatttcccaggctcccagaaggttctgccggacggtcaggtgatttgggtgaacaataccattatcaatgggagccaggtgtggggggggcagccggtgtatcctcaggaaaccgatgatgcgtgcatcttcccagacggcggtccgtgtccctccggctcatggtctcagaaacgatctttcgtgtatgtgtggaaaacatgggggcaatactggcaagttcttggcggtcctgtctctggactttccatcggtacaggcagggcaatgctgggcacacatacaatggaagtgaccgtatatcaccgacggggttcacgatcttatgtgcctctagcccactcctccagcgctttcaccatcaccgatcaggtccccttcagcgtttctgtgtcccaactgagggccctggacgggggtaataagcactttctgcgcaatcagccattgacattcgcgttgcagttgcatgatcctagcggttacctcgccgaagccgacttgtcctatacatgggacttcggcgactcgtcaggtactctcatctctcgggctctggtggtgactcatacatatcttgaacccggcccagtcacagcacaggtggtccttcaggcggccatcccgctcacgagctgtggaagcagccctgtcccaggtactacagacggacacaggcctacagctgaagccccaaacactacagccggccaggtcccaaccacagaggtggtcggtaccacacccgggcaggcccccacggccgaaccgtcaggtacgacatccgttcaggtgcccaccacagaggtgatctcgaccgcccctgtgcagatgccgacagccgagagcacagggatgactccagaaaaagtccctgtttcggaggtaatgggaactacattggccgaaatgagtacccccgaggctaccgggatgacacctgcggaggtatcgattgtggtgctttccggtactacagcagctcaggtcaccaccaccgagtgggttgagacaacagcgcgggaactgccaatccctgagccggaaggccctgatgcatcttccataatgtcgaccgaatcaattacagggagtttgggtccacttttagatggcaccgccactctccgcttagtcaagcggcaagttcccctcgattgcgtgctgtatcgctacggaagcttttctgtgacactcgatatagtgcagggaattgagagcgccgagatcctgcaggcagtgccatcaggagaaggtgatgctttcgagctgacagtttcatgccaaggcggccttcccaaggaagcatgtatggaaatttcttctccaggctgccaaccacctgctcagcgtctgtgccagcccgtgctcccaagcccagcgtgtcagctggtcctgcatcagatactgaaaggaggatctggcacatactgtctcaatgttagtctcgcagatacaaactccctcgccgtggttagcacccagttgatcatgcccggtcaagaggcaggcctagggcaggtcccactgatcgtcggcattttactggtgttaatggctgtggtccttgcctcgctgatttataggcggcgtcttatgaagcaggacttctccgtgccccagttgcctcacagctcttcccattggctcaggcttccaagaatattttgtagctgccccatcggcgagaattcgcctctcttgagcgggcagcaggtgtag

SEQ ID NO: 292732 - DNA, 1986 bp, Artificial Sequence
  derived and/or modified sequence
atggacttagttcttaagaggtgtctgcttcatttggccgtcatcggggcactcctggctgtgggcgctacaaaggtccccaggaaccaagactggctgggcgtgtccagacagcttcggacgaaagcatggaacagacagctctaccctgagtggacggaggcacaacgattggactgctggagggggggtcaggtgtcccttaaggtctcaaatgatggaccaacactgattggtgctaacgctagctttagtatcgcactcaattttccagggtcccaaaaagtgttgcccgatggacaggtgatttgggtcaacaacacaataatcaacggctcccaggtgtggggaggccagcctgtatacccacaagagacagacgatgcatgcatcttccccgacggcggaccctgtccatcaggcagctggtctcagaagcgctcatttgtatacgtgtggaaaacttgggggcagtattggcaggtgctcggagggccagtgtccggattatccattggcacaggccgtgcaatgcttggcactcacacgatggaggtgacggtctatcatagacgcggtagtaggagctatgtccctcttgcccacagttccagcgcattcaccattactgaccaggttcccttctcagtctctgtatcccagttacgggcactggatggaggcaataaacattttctgaggaatcagccattaactttcgccctgcagctgcatgatccctctggatatctcgccgaggccgatcttagttatacctgggacttcggcgactcctccggaactctgatatcacgggcattggtcgtcactcatacgtatctggagcccggacccgtaacggcgcaggttgtgctgcaggctgcaattccccttaccagttgcggaagcagccccgtacctggaacaaccgatggacataggccaaccgcggaagccccaaatacaaccgcaggacaagtccctacaactgaagtggtgggaactacacctgggcaggcgccaacagctgaacctagtggtacaacatccgtgcaggtgccaaccaccgaagtcattagtacggcgcctgttcagatgcctacagcagagtccaccgggatgacaccggaaaaagtccccgtgagcgaagtcatgggcacaactctggccgaaatgtccacccccgaggcaacaggcatgaccccggcagaagtttcaattgtggtcctgagtggcactacagccgcacaggtgacaactaccgagtgggtggagaccacggctagagaattaccaatccccgagccagaaggccctgatgccagcagtattatgtcaacagaaagcatcactgggtcattgggtccactactggacggaaccgcaacactccggttagttaaacgtcaggtgcccctggattgtgtattatacaggtacggatcgtttagcgtgaccttggacatcgtccagggaatcgaaagcgctgaaatcctgcaggccgtgccatcaggggaaggtgatgcttttgagcttacagtctcatgccagggaggcttacccaaagaagcctgcatggagatttcctctccaggctgccagcctcctgcccagcggctgtgccagccagtcctgcccagccctgcatgtcaattggtgttgcatcagattctaaaggggggatctggcacctactgcctgaatgtatctcttgccgataccaactcactggctgttgtgagcacccagttaataatgcctggacaggaggccggactcggccaggtacccctgatcgttggcattctgctggtattgatggcagtcgttctcgcttccctcatctatcgacgcagactcatgaaacaggatttcagtgtgccccagctgccacactcttcctcccactggcttagactcccaagaattttctgctcttgtccaattggagagaacagtccactgcttagcggccagcaggtttag

SEQ ID NO: 292733 - DNA, 1986 bp, Artificial Sequence
  derived and/or modified sequence
atggacctggttctgaaacggtgcctgctccatctggccgttataggtgccctgctggctgtgggggctaccaaggtgccacggaatcaggactggctgggggtctctcgccagctgcgcacaaaggcgtggaatcgccagctctacccagagtggaccgaggctcaacgcctggattgttggcggggagggcaggtgtcactgaaagtctcaaatgatgggcctactctaatcggggctaacgcttctttttcaattgcattgaatttccctggctctcaaaaggtgttgcccgatgggcaggtgatttgggtgaacaacactatcataaatggcagtcaggtgtggggtggccagccagtttacccacaagaaaccgatgatgcttgcatctttcccgatggagggccttgtccaagcgggtcttggtcccagaagagatcctttgtctacgtctggaagacctgggggcagtattggcaggtcctgggtggaccggtatcaggtctttccatcggaaccggaagagccatgctgggcacacacaccatggaagtcacggtctaccaccggcgaggctccagaagctatgtgcctttggcgcactcatcctctgcctttacaattacagatcaggtgcccttcagcgttagcgtttcccagctgcgcgctctcgacggaggcaacaagcactttctgcgcaaccagccactgactttcgctctccagctacatgatccgtccggctatttagccgaagccgatctatcgtatacctgggatttcggagactctagtggaacactgatatctcgtgcccttgtggttacacatacctatctggagcctggtcccgtcactgcccaagtggtgttgcaagcggcaatacctctgactagttgtggaagctcacccgtccccggaaccaccgacggacatcgacctacagccgaagcacctaatacgacggctggacaggtcccaaccaccgaagtggtaggcaccacccctgggcaagctccaaccgcggaaccgagcggcacgacatccgtgcaggtgcccaccaccgaggtcatctccacagcccctgttcagatgcctactgcggagtcaacaggcatgaccccagaaaaagttcccgtctcggaggtcatgggtacaacgttggcagaaatgtcaactccagaagcaacgggaatgacacccgcagaggtgagtatcgtcgtgctctctggcacaacagcagctcaagtgactaccaccgagtgggttgagacaacggccagggagctccccattccagagccagaagggcctgacgcgtcgtccataatgagcacggagtctatcacaggtagcctggggcctctgcttgacggcacagcgacactgaggcttgtcaaacgacaggtccccttagactgcgtcctgtatcgatacggatcattcagtgttacattagacatcgttcaggggatcgaatccgctgagattctgcaggcagtgccgagcggcgaaggtgacgcatttgaactgacggtctcatgtcagggaggcctgccaaaggaggcctgcatggagatttccagccctggatgccagccgcctgcccagcgcttatgccagcctgtgctgcccagccccgcttgtcagttggtgttacatcagatcctcaagggcggatctggtacctactgtctgaacgtgtctctagctgataccaactccctggccgttgtaagcacccaactcatcatgcctggccaggaagctggactggggcaggtccccctcattgttggtatcctcctggtgctgatggctgttgtgttggcgtctctgatctatcggaggcggctaatgaaacaggacttcagtgttccacagctgcctcatagctctagtcactggctgaggctgccaagaattttttgcagctgtccaataggcgagaactcgcccctcttgtcagggcagcaggtttag

SEQ ID NO: 292734 - DNA, 1986 bp, Artificial Sequence
  derived and/or modified sequence
atggatttggtgttgaagcggtgcctactgcacctcgcggtaatcggtgccttgttagcagtaggggcaacaaaagtgccccgtaatcaggactggttgggcgtgtcgcgtcagctgcgaacaaaagcatggaacagacagctatatccagaatggactgaagcgcagagactcgactgctggcgagggggacaagtgagcttgaaggtcagcaacgatggacccacgctgattggggcaaacgcttcgttttcaatcgccctgaatttccccggtagtcagaaggtcttgcctgacggacaggtgatatgggtaaacaacaccattattaatggcagccaggtttgggggggacaaccagtctaccctcaggagacggatgacgcttgtatatttcctgacggtggcccttgcccatctggatcttggagtcagaaaaggtcatttgtatacgtctggaagacatggggccagtattggcaggtacttggaggccctgtgtcaggcctgagcatcggaaccggcagggccatgctgggaacccacactatggaagttacggtctatcataggagaggatcccgctcctatgtccccctagctcattcttcatcagcgtttacaattacggaccaggtccccttttccgtgtccgtgtcgcaacttcgggctctggacggtggaaacaaacactttctgcggaaccaacctcttacattcgcactacagctgcacgacccgtctgggtatctcgccgaggcggacctgagctacacctgggatttcggcgatagctccgggactctcatctctagagctctggtggtgactcatacatatttagaaccaggcccagttaccgctcaggttgtgttgcaggcagccatccccctgaccagctgcggcagcagtccagttccaggaacgacagatgggcataggcccaccgctgaagctcctaacaccaccgcaggccaagttccaacaactgaagtcgttggcactaccccaggacaggcacctacagctgaacccagtggcactacttcggtgcaggtgcccactaccgaagtgattagcaccgcgcctgtgcagatgcctaccgccgaaagtaccgggatgacacccgagaaagtgccggtgagtgaagtgatgggtaccactctggccgaaatgtctacccccgaggcgacaggcatgacgcccgctgaggtgtccatcgtggtgctatctggaacaactgcagcgcaggtcaccaccacagagtgggtggaaactacagccagagagcttccgatccctgagcccgagggacctgacgcctctagtataatgtcaactgaaagtatcacagggtctctcggcccacttttagacgggactgccaccctgaggcttgtcaagagacaagtgcccctggattgcgtactctacagatacgggtccttctctgtcacgctggatatcgtccaggggatcgaatccgcggagatcctccaggccgtgcctagcggagagggcgatgccttcgaattaacagtgagctgccagggaggtttacccaaggaggcatgcatggagatctcctcccccggatgccagcctccagctcaacggctgtgccagcctgtcctcccatcccccgcatgtcaactcgtgctgcatcagatcctaaagggcggatccggcacttactgtttaaacgtcagtctcgccgatactaattcattagccgttgtctcaacgcagctgattatgccaggacaagaggcaggtttgggccaagtacctctgatcgtcggaatcctcctggtactgatggcagttgtgttggccagcctgatctataggaggcgacttatgaaacaggatttctcagtcccacaacttcctcattcctcatcccactggcttagactgccgaggatattttgcagttgccctataggagagaattctcctctgctgtccgggcaacaggtgtag

SEQ ID NO: 292735 - DNA, 1986 bp, Artificial Sequence
  derived and/or modified sequence
atggacttagttctgaagaggtgcttgttacacctggcagttattggggccttactggctgtgggcgccaccaaagtgccaaggaatcaggactggctgggcgtatcccgccagttgcgtactaaagcttggaatcggcaactataccccgagtggacagaggctcagagattagactgttggcggggaggacaagtgtcccttaaggtatccaatgacggtcccaccctaataggagccaacgcatccttctctattgctttaaacttcccagggtcacagaaggtgctgccagatggccaagtgatttgggtcaataatacaatcataaatggaagtcaggtgtgggggggccaacctgtgtatccccaggaaactgatgatgcctgtattttccctgacggaggaccatgcccgagcggatcttggtctcagaagcgcagttttgtgtacgtatggaagacctggggtcagtattggcaggtgctgggaggccccgtctctgggcttagcatcggaacaggccgggcaatgcttggaactcacactatggaggttaccgtctaccacaggcgcggatcaaggtcgtacgtgccactcgctcactcatcctccgccttcaccattactgatcaggtaccgtttagcgtatccgtctcccagctgagagcccttgacgggggtaataagcacttcctaagaaatcagccactcacctttgcgttgcagttgcacgatccgtcgggctaccttgcggaagcagatttatcctatacatgggacttcggggactccagcgggaccctcatttccagagccctggtcgtgacacatacatacctggaacctggcccagttacagcccaagtggtgctgcaggcagccatacccttgactagttgtggctcctctccggtacccgggacgactgacggacatagacctactgcagaggcaccaaacactaccgcagggcaggtgcccacaaccgaggtggtggggacaactcccggacaggcacccacagctgagccctcaggaactacgtccgtgcaagttcccacaacagaggtcatttctaccgcccccgtgcagatgcccactgccgagtccaccgggatgactccggagaaggtcccagtttccgaagtgatgggaactacattggctgagatgagcaccccagaggccaccgggatgactcccgctgaggtcagtatcgtggtgctttctgggacgactgctgctcaggtaacgaccaccgaatgggtggagaccactgcgcgtgaactgccgattccagagcccgaggggcctgacgctagcagcattatgtccacagagtctatcacaggaagtttgggcccacttttggacggcacagccacccttcggctcgtcaaacgccaggtacctcttgactgtgtgctgtatcgatacggatctttctctgtaaccttggatattgtccagggcatagagtccgctgaaatccttcaagctgtcccatccggcgaaggcgatgccttcgaactgactgtatcctgtcagggcggacttcccaaagaggcctgcatggagattagcagcccgggttgccagcctcctgcccagagattgtgccagccagtcctgccgtcacccgcctgccaactcgttcttcatcagatcttaaaaggcgggtctgggacctactgtctgaatgtgtcactcgccgacactaactccctcgctgtggtgtcgacccagctgattatgccaggacaggaagccggcctcgggcaggtaccactcatcgtagggatcctcctcgtcttgatggcagtggtcctcgccagtctaatttacagacggcggctgatgaaacaggatttttcagtgccccagctgccccattcttcatctcactggctccgcctcccccgtattttctgctcttgccctattggagaaaatagtcccctactcagcggacagcaggtctag

SEQ ID NO: 292736 - DNA, 1986 bp, Artificial Sequence
  derived and/or modified sequence
atggacctcgtgcttaaacgctgtcttctgcatttagccgtaatcggagcgcttctcgccgtcggagccaccaaagtcccccggaaccaggattggctcggcgtgtcgcggcagctgcgcacgaaggcttggaatagacagctatatccggaatggacagaggcgcagcggctagactgttggaggggcggacaggtcagcctgaaagtgagtaatgatggccctacccttatcggagctaatgcctcttttagcattgccttaaattttccaggttcgcagaaagtgcttcctgatggacaggtcatctgggtgaacaataccataattaatggatcccaggtctgggggggccaaccagtgtaccctcaggagacagacgacgcttgtatattcccagacggtggcccgtgtccatccggctcctggtcacagaagaggtcatttgtatatgtttggaagacttggggacagtattggcaggtattagggggccctgtctctggcctgtcaatcggaacgggccgggcgatgctgggtactcatactatggaggtgacagtttatcaccggcggggctccagatcttacgttcctctcgctcatagcagcagcgctttcacaattactgatcaggttcccttctcggttagtgtttcacagctgagggcactggacggcggtaacaagcattttcttagaaaccagcctttaacttttgctctgcaactgcacgatccctctggctatctcgccgaagctgacctttcatatacatgggatttcggagatagctccggaacacttattagtcgggcgcttgtagtgactcacacttatttggaacctggaccggttactgcccaggtagttttacaggcagctatccccctcacaagctgcggaagcagcccagtgcctggaactacggatggccatcgcccaactgcagaagcccctaacactaccgcaggccaagttcctactacagaagtggtcggcaccacccctggtcaggcacctacagccgaaccgagtggaacgacctccgtgcaagtccccacaactgaggtgatctcaactgcaccggtgcaaatgcctaccgcagaaagcacaggtatgacccccgaaaaagtccctgtttccgaagtcatgggcactaccttagcagaaatgagcaccccagaggcaacaggtatgacacccgcagaggttagtattgtggttctctctggtaccacggcagctcaggtgactaccaccgagtgggtagaaaccaccgcacgcgaactacctattcctgagcctgagggccctgacgcctcgagcataatgagcaccgagtccatcacagggtcattgggtcccctcctcgacggcacagcaacactaagactggtgaaacggcaggtgccgctggattgtgtgctgtatcggtatggctccttcagcgtaacccttgatatcgttcagggtatcgaatcagccgaaattttgcaggctgtaccaagtggagaaggcgacgcgtttgagttgaccgtttcatgccagggaggtctgcctaaggaagcatgcatggagatttctagtcctggctgccagccccccgcacagcgcctttgccaaccggtgctgcccagtccggcttgccaactggtactccatcagattctgaaaggcgggtcaggaacatactgcttaaacgtatcattggcagatacgaactccctcgctgtcgtctctacccagctgatcatgcccggccaggaagctgggctggggcaggtaccccttatagtgggaatcctcctggtcctgatggcggtggtgctggcgtccctcatttatcgtcggaggcttatgaaacaagacttttccgtgccccagttaccccattcttcttctcattggctcagactcccccggattttctgctcctgccccatcggcgaaaatagccctctcctgtccgggcagcaggtctag

SEQ ID NO: 292737 - DNA, 1986 bp, Artificial Sequence
  derived and/or modified sequence
atggacttagtgctgaaacgctgtctcctccacttagcagtgattggtgccctcctcgctgtaggggctacaaaagtgccacggaaccaagactggcttggcgtaagccgtcagctgcgaacaaaagcctggaataggcagctttaccccgagtggacagaggcacagcggctggactgctggcgcggcggtcaagtgtcgctgaaagttagtaatgacggtcccacccttattggcgcaaatgcttcctttagtatcgctttaaacttccccgggtcccagaaagtgctaccagacggccaggttatatgggtgaataacacaatcatcaacggctctcaggtgtggggcgggcaacctgtgtaccctcaggagacagacgatgcctgcattttcccagacggaggaccatgtccctccggcagttggtctcagaaaagaagcttcgtgtacgtgtggaagacctggggacagtactggcaggtgctgggaggccccgtgagcggtcttagcatcggcaccgggagagctatgctcggcacccatacaatggaggtgaccgtgtaccatcgaagaggtagcagaagctacgtaccgttagctcatagtagctcggccttcaccattacagaccaggttccgttctccgtctccgtgtcccagctcagggccctggacggaggaaacaaacattttctgcggaatcagccactgacctttgccctgcagctccatgacccaagcggttatttggctgaggccgacttgagctatacatgggatttcggggactcctcaggtactctgatttcacgtgctctggttgttactcacacgtacctagagcccggacctgtgactgcacaggtggtcttgcaggccgcaattcccctcaccagctgtgggtcctctccagtgcctggcaccactgacggccatagaccaactgcagaagcacctaatacgaccgcaggccaggtccccactacagaagtcgtcggcactactcccggccaggccccaaccgcggagccatctggtacaacttccgtccaggtgcccactaccgaggttattagtactgccccggtacagatgcctaccgcagagagtacagggatgaccccagaaaaggtgcctgtgagcgaggtgatgggtaccacacttgcagagatgtctactccagaggctacaggaatgactccggcagaggtgagtatagttgttctttccggaactaccgctgcacaggtaactacaaccgagtgggtcgagacgaccgctcgcgaacttcccatccctgagccagagggacctgacgcctccagcatcatgagcactgaaagcatcacaggctctctgggccccctgttggatggaaccgccaccctccgcctagttaaacgccaggttcctctagattgtgtgttgtatcgatacggctccttctccgtgacgctggacatcgtccaagggattgaaagtgctgagatactgcaagctgtaccaagcggggagggtgatgcgttcgagctcaccgtgtcctgccagggtggtctgccaaaggaagcctgtatggaaatctcaagtccaggatgccagccccccgctcagcgattgtgccagccagtgcttccctcacccgcatgccaactggtactacaccagatcttgaagggcgggagtggaacttattgcctgaacgtgtccctagctgatacaaacagtttagcagtggtctctactcaactaataatgccgggccaggaagccggcctggggcaagtccctctgattgttggtatattgttggtcctcatggctgtggtgctcgcctccttgatctaccggcggcgtcttatgaagcaggacttcagcgttccccagttgccccactcaagttcacactggctgcgactgcccagaattttctgctcttgccctattggcgagaattctccgctgctcagcggtcaacaggtctag

SEQ ID NO: 292738 - DNA, 1986 bp, Artificial Sequence
  derived and/or modified sequence
atggacctcgttctcaagaggtgtctccttcatctagcggtgattggagcgttattagccgtcggtgcaactaaggtccctcgtaaccaggattggttgggtgtgtccagacagctaagaacgaaggcttggaaccggcaactgtaccccgaatggaccgaagcgcagaggcttgactgctggcgaggaggccaggtcagcctgaaagttagtaatgacggtcctacactgatcggcgcaaatgcctctttctccattgcattgaattttcccggctctcaaaaggtcctaccggatggccaagtgatttgggttaataacacaatcattaatggcagccaggtgtggggaggacaaccagtttacccccaagaaaccgatgacgcatgtatttttcctgatggtggaccatgtccttctgggtcatggagccagaaacggtccttcgtgtacgtatggaagacatggggacagtattggcaggtgcttggtggccctgtgagtggcctcagcattggcacgggacgggctatgcttggaacccatactatggaagtcacggtgtatcacaggagagggagccgttcttacgttccgctggctcattcttcctccgcgtttaccattacagatcaggtcccgtttagcgtatctgttagccagctgagagccctagatggcggaaataaacactttttgcgcaaccaacctctgacttttgctctccaattgcatgacccatctgggtacctggcagaggccgacttgtcttacacctgggactttggcgatagctcagggacgctaatttcacgcgccctcgtggtcactcacacctaccttgaaccaggacccgtgacggcacaggttgtgctacaggcagctataccactaactagctgcggtagctctccagtccccgggaccacagatggacatcgcccaaccgccgaggctcccaataccactgcgggtcaagtgcctacgaccgaggtagttggaacaactccaggacaggcccccacggctgagccctcgggcacaacatcagtgcaagtccccaccaccgaagtgatctccaccgccccagtccagatgcctaccgccgagagcactggcatgacacccgaaaaggtgcctgttagcgaagtcatgggaacaactctggccgaaatgtctacccctgaagccaccggcatgacccctgccgaagtctcaatagtggtcctaagtggcacaacggccgcccaagtcacgaccacagaatgggtggagaccaccgccagggaacttcctattcccgaacccgagggaccagatgcttcaagcattatgagcacagaatctattacagggagccttggacccttacttgacgggacggcaaccctgaggttagtcaagcggcaagttcctctcgattgcgttttgtatagatatggatcattttcagtcacgctcgatattgttcagggaatcgaatctgctgaaattttgcaagccgttccaagtggggagggggacgccttcgaactgactgtgtcctgccagggggggctgcccaaagaggcctgcatggagatcagttctcctgggtgtcagccacctgctcaaagactctgtcaacctgttttaccttctcctgcctgtcaactggtgcttcatcaaattttgaagggggggagcgggacctactgtttaaatgttagtctagccgacaccaactcactcgctgtcgtatccacccaactcattatgccaggtcaggaagccggcctgggacaggtgccactgatcgtgggtatcctgctagtactcatggctgtagtgttggcaagcctgatctacaggagaagactgatgaaacaagattttagtgttcctcagctgccccattcctcctctcactggctaagacttcctcgaattttctgttcttgtcccattggagagaattcccctttactgtccggacagcaagtgtag

SEQ ID NO: 292739 - DNA, 1986 bp, Artificial Sequence
  derived and/or modified sequence
atggatttggtgcttaagagatgtctcctacacttagccgtgatcggcgccctcctggccgttggggccactaaggtccccaggaatcaagactggctgggggtaagcagacagttacgcacaaaggcttggaacagacagctttaccctgagtggacagaggcccaacgtctggattgctggagaggaggacaggtgtcattaaaagtttcgaacgacgggcccaccctaattggggcaaacgccagcttctctattgcccttaactttcctggttctcagaaggtcttacccgatggccaggtgatttgggttaataataccatcatcaacggatcacaggtctggggtggtcagcccgtatatccccaggaaacagatgatgcatgtatctttcccgatggtggcccttgtccctctgggtcttggagtcagaagaggtccttcgtgtacgtctggaagacctgggggcagtactggcaggtcttgggggggccagtctctggtctgtcaattggaacgggtagagcaatgttaggaacgcacactatggaggtaacggtgtatcacagaagaggaagcagatcttacgtgccactcgcacatagctcttccgcctttaccattacagaccaggttcctttcagtgtgtcagtatcccaactgcgggcactggatgggggcaataaacatttccttcgcaatcagcccctgacattcgccctacagcttcacgacccttctggatatttggccgaggccgatctaagctatacttgggactttggcgattcctccggtacactgatttcacgagcattagtcgtcacacacacttatttggagcccggccccgtgaccgcacaggtagttctccaggcagccattccactgaccagctgcggaagcagcccagtgcctggaactacggatggccatcgcccaactgcagaagcccctaacactaccgcaggccaagttcctactacagaagtggtcggcaccacccctggtcaggcacctacagccgaaccgagtggaacgacctccgtgcaagtccccacaactgaggtgatctcaactgcaccggtgcaaatgcctaccgcagaaagcacaggtatgacccccgaaaaagtccctgtttccgaagtcatgggcactaccttagcagaaatgagcaccccagaggcaacaggtatgacaccggccgaagtgtcaatcgtagtattatccggaacaaccgcagcacaagtgactactacagagtgggtggaaactaccgcgcgggagctgcctatcccagagcctgaaggtcctgacgccagttcaatcatgtccacagaaagtatcacaggaagtctgggccccttacttgacggaactgccactttaagactcgttaaacggcaggtccccctcgattgcgttttataccgttacgggagttttagcgtgaccctggatattgtgcaggggattgagtctgcagagatcctgcaggctgttcccagcggcgagggtgatgcatttgaactgaccgtgagttgtcagggtggactgcctaaagaagcttgtatggaaatatcttcgcccggttgccagcctcctgcacaaagattgtgtcaacctgtcttaccctcccccgcttgtcagctggtgcttcatcaaatccttaaaggaggctccggcacctattgtctgaacgtgagtctcgccgacactaactctctcgctgtcgtcagtacccagcttataatgcccggtcaggaagctgggctcggccaggtccctcttatcgtgggcattctgttagtcctgatggccgtggttctggcatctctgatctatcgtagaaggctcatgaagcaagactttagcgtcccacagctgccccactcgagttcccactggctgagactgccgcgaattttttgttcatgccccattggtgaaaatagccccctcctcagtggccaacaagtttag

SEQ ID NO: 292740 - DNA, 1986 bp, Artificial Sequence
  derived and/or modified sequence
atggaccttgttcttaagcgttgtctgctgcatttggccgttattggcgccctgttggcagtgggagcgaccaaggttccgagaaaccaggactggcttggagtaagtcgtcaactaagaaccaaagcctggaaccggcagctttatcctgaatggacagaggctcaacgactcgactgctggcgaggaggtcaagtgtcgctgaaggtttccaatgacgggccaacgttgattggggcaaacgctagctttagtatcgcactcaatttcccaggatctcaaaaagtccttccagacggccaggttatttgggttaacaatacaataatcaatgggagtcaagtttggggcgggcaaccggtctatccacaggaaaccgatgacgcatgcattttccccgacggcggaccctgtccttcaggatcctggtcacagaaacgaagctttgtctacgtgtggaaaacatggggccaatattggcaagtactcgggggtcctgtgagtgggctgtccatcggcaccggcagagccatgttagggacacacacgatggaagtaactgtgtaccaccggagagggtccaggtcatatgtaccactcgcacattcctcctccgctttcacaattacagaccaagtgccattctctgtgagcgtgtcacagcttcgagccctggatggaggcaataagcacttccttcgcaatcagccattgacattcgctttacagctgcatgacccatcgggatacctcgcggaggctgacctgagctacacatgggacttcggcgatagctctggaaccctgatttcgcgtgctttggtagtcactcacacctatctcgaacctggtccagtaaccgctcaagttgtactgcaggcggcgatcccactcacttcatgcggcagcagtcccgtaccaggcacaactgatggacatagaccaacggctgaagcaccaaacactacagctggtcaggtcccaaccaccgaagtcgtgggcactaccccgggacaggctcccacagccgagccctctggaactacttcagtacaggtaccaacaacagaagtcatttcaactgcccctgtccagatgccaacagcagaatcaaccggcatgaccccagaaaaggtgccagtttctgaagttatgggcacgacgctcgccgagatgagcactcctgaggccacaggtatgacccccgccgaggtatccattgttgttctttccggaacaaccgccgcccaagtgaccacgaccgaatgggtggagactacagcccgcgagcttcccatccccgaaccggagggtcccgatgcttccagtatcatgtcgaccgagagcattacaggctcccttggccccttgctcgatggtactgccacccttagattagtgaaacgccaagttcccctcgactgtgtactttacagatatggctctttcagcgtcaccttggatatcgttcagggtatcgagtctgcagaaatcctgcaagctgtgccaagcggagagggagacgcattcgagttaactgtgagctgtcaaggaggcctgcctaaggaagcctgtatggagatttctagccctggatgccaaccccccgctcagcgcctgtgtcaacccgtgctgcccagcccagcctgccagctggtcttgcaccagattctgaagggcggttcaggcacatattgtctcaatgtgtctctagcggacactaattctcttgctgtggtctctacccaattgataatgccaggccaggaggctggacttggccaagttcctctgatcgttggcatcttgctcgtgcttatggccgtggttctcgcttccctgatttatcgtcggcgtttaatgaagcaggatttctctgttccacaactgccacacagttcttcccactggctgagactcccccgtatattttgctcatgtccgattggtgaaaattctccactgctctctgggcaacaggtatag

SEQ ID NO: 292741 - DNA, 2204 bp, Artificial Sequence
  derived and/or modified sequence
tcaacgtcagagccggggggcgagcccagcgctcctccccgcaaatgatcccgccccaggggcctatcccagtccccccagtgcctttggttgctggagggaagaacacaatggatctggtgctaaaaagatgccttcttcatttggctgtgataggtgctttgctggctgtgggggctacaaaagtacccagaaaccaggactggcttggtgtctcaaggcaactcagaaccaaagcctggaacaggcagctgtatccagagtggacagaagcccagagacttgactgctggagaggtggtcaagtgtccctcaaggtcagtaatgatgggcctacactgattggtgcaaatgcctccttctctattgccttgaacttccctggaagccaaaaggtattgccagatgggcaggttatctgggtcaacaataccatcatcaatgggagccaggtgtggggaggacagccagtgtatccccaggaaactgacgatgcctgcatcttccctgatggtggaccttgcccatctggctcttggtctcagaagagaagctttgtttatgtctggaagacctggggccaatactggcaagttctagggggcccagtgtctgggctgagcattgggacaggcagggcaatgctgggcacacacaccatggaagtgactgtctaccatcgccggggatcccggagctatgtgcctcttgctcattccagctcagccttcaccattactgaccaggtgcctttctccgtgagcgtgtcccagttgcgggccttggatggagggaacaagcacttcctgagaaatcagcctctgacctttgccctccagctccatgaccccagtggctatctggctgaagctgacctctcctacacctgggactttggagacagtagtggaaccctgatctctcgggcacttgtggtcactcatacttacctggagcctggcccagtcactgcccaggtggtcctgcaggctgccattcctctcacctcctgtggctcctccccagttccaggcaccacagatgggcacaggccaactgcagaggcccctaacaccacagctggccaagtgcctactacagaagttgtgggtactacacctggtcaggcgccaactgcagagccctctggaaccacatctgtgcaggtgccaaccactgaagtcataagcactgcacctgtgcagatgccaactgcagagagcacaggtatgacacctgagaaggtgccagtttcagaggtcatgggtaccacactggcagagatgtcaactccagaggctacaggtatgacacctgcagaggtatcaattgtggtgctttctggaaccacagctgcacaggtaacaactacagagtgggtggagaccacagctagagagctacctatccctgagcctgaaggtccagatgccagctcaatcatgtctacggaaagtattacaggttccctgggccccctgctggatggtacagccaccttaaggctggtgaagagacaagtccccctggattgtgttctgtatcgatatggttccttttccgtcaccctggacattgtccagggtattgaaagtgccgagatcctgcaggctgtgccgtccggtgagggggatgcatttgagctgactgtgtcctgccaaggcgggctgcccaaggaagcctgcatggagatctcatcgccagggtgccagccccctgcccagcggctgtgccagcctgtgctacccagcccagcctgccagctggttctgcaccagatactgaagggtggctcggggacatactgcctcaatgtgtctctggctgataccaacagcctggcagtggtcagcacccagcttatcatgcctggtcaagaagcaggccttgggcaggttccgctgatcgtgggcatcttgctggtgttgatggctgtggtccttgcatctctgatatataggcgcagacttatgaagcaagacttctccgtaccccagttgccacatagcagcagtcactggctgcgtctaccccgcatcttctgctcttgtcccattggtgagaacagccccctcctcagtgggcagcaggtctgagtactctcatatgatgctgtgattttcctggagttgacagaaacacctatatttcccccagtcttccctgggagactactattaactgaaataaatactcagagcctg

SEQ ID NO: 292742 - DNA, 2757 bp, Artificial Sequence
  derived and/or modified sequence
agtttggttcttgggggctagacaagtttcttccccggtggggcggctgaacactcttcccaagtacctgctttgggtccaagtttcctacctatgtctctagtctgtagggatttcttgatttctaactcactattttcaccaatcctggggaaaatatgtatcgacctaaggttaaattccacctggcccaggagcctcctttggaaaccaggaagccgggaatctcgttgcaaaggaatcctgggcctcagaggagtcgttgcctctgcctcatagcataccccgacactgtctctgttttgggatgcagggttctgtttctgtctttttgagaagttcctggtttaattcactctcccatgataaactgttgtgtctggtatgtgttacgcagctgcctttcagttagctcttgcccgggagtgcatcaagatgagagtgacccagtgaaaccagaaactgtcattgagtagcaggatgggaaagcaatgtctagggaccaggatccctttgtcagtttttcctttttcctctcctccggcccctcccaggccttctctgagggagaagaggaagggctatgcaaatgagcacccttttcttatataggggcctatcccagtccccccagtgcctttggttgctggagggaagaacacaatggatctggtgctaaaaagatgccttcttcatttggctgtgataggtgctttgctggctgtgggggctacaaaagtacccagaaaccaggactggcttggtgtctcaaggcaactcagaaccaaagcctggaacaggcagctgtatccagagtggacagaagcccagagacttgactgctggagaggtggtcaagtgtccctcaaggtcagtaatgatgggcctacactgattggtgcaaatgcctccttctctattgccttgaacttccctggaagccaaaaggtattgccagatgggcaggttatctgggtcaacaataccatcatcaatgggagccaggtgtggggaggacagccagtgtatccccaggaaactgacgatgcctgcatcttccctgatggtggaccttgcccatctggctcttggtctcagaagagaagctttgtttatgtctggaagacctggggccaatactggcaagttctagggggcccagtgtctgggctgagcattgggacaggcagggcaatgctgggcacacacaccatggaagtgactgtctaccatcgccggggatcccggagctatgtgcctcttgctcattccagctcagccttcaccattactgaccaggtgcctttctccgtgagcgtgtcccagttgcgggccttggatggagggaacaagcacttcctgagaaatcagcctctgacctttgccctccagctccatgaccccagtggctatctggctgaagctgacctctcctacacctgggactttggagacagtagtggaaccctgatctctcgggcacttgtggtcactcatacttacctggagcctggcccagtcactgcccaggtggtcctgcaggctgccattcctctcacctcctgtggctcctccccagttccaggcaccacagatgggcacaggccaactgcagaggcccctaacaccacagctggccaagtgcctactacagaagttgtgggtactacacctggtcaggcgccaactgcagagccctctggaaccacatctgtgcaggtgccaaccactgaagtcataagcactgcacctgtgcagatgccaactgcagagagcacaggtatgacacctgagaaggtgccagtttcagaggtcatgggtaccacactggcagagatgtcaactccagaggctacaggtatgacacctgcagaggtatcaattgtggtgctttctggaaccacagctgcacaggtaacaactacagagtgggtggagaccacagctagagagctacctatccctgagcctgaaggtccagatgccagctcaatcatgtctacggaaagtattacaggttccctgggccccctgctggatggtacagccaccttaaggctggtgaagagacaagtccccctggattgtgttctgtatcgatatggttccttttccgtcaccctggacattgtccagggtattgaaagtgccgagatcctgcaggctgtgccgtccggtgagggggatgcatttgagctgactgtgtcctgccaaggcgggctgcccaaggaagcctgcatggagatctcatcgccagggtgccagccccctgcccagcggctgtgccagcctgtgctacccagcccagcctgccagctggttctgcaccagatactgaagggtggctcggggacatactgcctcaatgtgtctctggctgataccaacagcctggcagtggtcagcacccagcttatcatgcctggtcaagaagcaggccttgggcaggttccgctgatcgtgggcatcttgctggtgttgatggctgtggtccttgcatctctgatatataggcgcagacttatgaagcaagacttctccgtaccccagttgccacatagcagcagtcactggctgcgtctaccccgcatcttctgctcttgtcccattggtgagaacagccccctcctcagtgggcagcaggtctgagtactctcatatgatgctgtgattttcctggagttgacagaaacacctatatttcccccagtcttccctgggagactactattaactgaaataaatactcagagcctg

SEQ ID NO: 292743 - DNA, 2516 bp, Artificial Sequence
  derived and/or modified sequence
gggggctagacaagtttcttccccggtggggcggctgaacactcttcccaagtacctgctttgggtccaagtttcctacctatgtctctagtctgtagggatttcttgatttctaactcactattttcaccaatcctggggaaaatatgtatcgacctaaggttaaattccacctggcccaggagcctcctttggaaaccaggaagccgggaatctcgttgcaaaggaatcctgggcctcagaggagtcgttgcctctgcctcatagcataccccgacactgtctctgttttgggatgcagggttctgtttctgtctttttgagaagttcctggtttaattcactctcccatgataaactgttgtgtctggggcctatcccagtccccccagtgcctttggttgctggagggaagaacacaatggatctggtgctaaaaagatgccttcttcatttggctgtgataggtgctttgctggctgtgggggctacaaaagtacccagaaaccaggactggcttggtgtctcaaggcaactcagaaccaaagcctggaacaggcagctgtatccagagtggacagaagcccagagacttgactgctggagaggtggtcaagtgtccctcaaggtcagtaatgatgggcctacactgattggtgcaaatgcctccttctctattgccttgaacttccctggaagccaaaaggtattgccagatgggcaggttatctgggtcaacaataccatcatcaatgggagccaggtgtggggaggacagccagtgtatccccaggaaactgacgatgcctgcatcttccctgatggtggaccttgcccatctggctcttggtctcagaagagaagctttgtttatgtctggaagacctggggccaatactggcaagttctagggggcccagtgtctgggctgagcattgggacaggcagggcaatgctgggcacacacaccatggaagtgactgtctaccatcgccggggatcccggagctatgtgcctcttgctcattccagctcagccttcaccattactgaccaggtgcctttctccgtgagcgtgtcccagttgcgggccttggatggagggaacaagcacttcctgagaaatcagcctctgacctttgccctccagctccatgaccccagtggctatctggctgaagctgacctctcctacacctgggactttggagacagtagtggaaccctgatctctcgggcacttgtggtcactcatacttacctggagcctggcccagtcactgcccaggtggtcctgcaggctgccattcctctcacctcctgtggctcctccccagttccaggcaccacagatgggcacaggccaactgcagaggcccctaacaccacagctggccaagtgcctactacagaagttgtgggtactacacctggtcaggcgccaactgcagagccctctggaaccacatctgtgcaggtgccaaccactgaagtcataagcactgcacctgtgcagatgccaactgcagagagcacaggtatgacacctgagaaggtgccagtttcagaggtcatgggtaccacactggcagagatgtcaactccagaggctacaggtatgacacctgcagaggtatcaattgtggtgctttctggaaccacagctgcacaggtaacaactacagagtgggtggagaccacagctagagagctacctatccctgagcctgaaggtccagatgccagctcaatcatgtctacggaaagtattacaggttccctgggccccctgctggatggtacagccaccttaaggctggtgaagagacaagtccccctggattgtgttctgtatcgatatggttccttttccgtcaccctggacattgtccagggtattgaaagtgccgagatcctgcaggctgtgccgtccggtgagggggatgcatttgagctgactgtgtcctgccaaggcgggctgcccaaggaagcctgcatggagatctcatcgccagggtgccagccccctgcccagcggctgtgccagcctgtgctacccagcccagcctgccagctggttctgcaccagatactgaagggtggctcggggacatactgcctcaatgtgtctctggctgataccaacagcctggcagtggtcagcacccagcttatcatgcctggtcaagaagcaggccttgggcaggttccgctgatcgtgggcatcttgctggtgttgatggctgtggtccttgcatctctgatatataggcgcagacttatgaagcaagacttctccgtaccccagttgccacatagcagcagtcactggctgcgtctaccccgcatcttctgctcttgtcccattggtgagaacagccccctcctcagtgggcagcaggtctgagtactctcatatgatgctgtgattttcctggagttgacagaaacacctatatttcccccagtcttccctgggagactactattaactgaaataaatactcagagcctga

SEQ ID NO: 292744 - DNA, 1986 bp, Artificial Sequence
  derived and/or modified sequence
atggacctggtgctgaagagatgcctgctgcacctggccgtgatcggcgccctgctggccgtgggcgccaccaaggtgcccagaaaccaggactggctgggcgtgagcagacagctgagaaccaaggcctggaacagacagctgtaccccgagtggaccgaggcccagagactggactgctggagaggcggccaggtgagcctgaaggtgagcaacgacggccccaccctgatcggcgccaacgccagcttcagcatcgccctgaacttccccggcagccagaaggtgctgcccgacggccaggtgatctgggtgaacaacaccatcatcaacggcagccaggtgtggggcggccagcccgtgtacccccaggagaccgacgacgcctgcatcttccccgacggcggcccctgccccagcggcagctggagccagaagagaagcttcgtgtacgtgtggaagacctggggccagtactggcaggtgctgggcggccccgtgagcggcctgagcatcggcaccggcagagccatgctgggcacccacaccatggaggtgaccgtgtaccacagaagaggcagcagaagctacgtgcccctggcccacagcagcagcgccttcaccatcaccgaccaggtgcccttcagcgtgagcgtgagccagctgagagccctggacggcggcaacaagcacttcctgagaaaccagcccctgaccttcgccctgcagctgcacgaccccagcggctacctggccgaggccgacctgagctacacctgggacttcggcgacagcagcggcaccctgatcagcagagccctggtggtgacccacacctacctggagcccggccccgtgaccgcccaggtggtgctgcaggccgccatccccctgaccagctgcggcagcagccccgtgcccggcaccaccgacggccacagacccaccgccgaggcccccaacaccaccgccggccaggtgcccaccaccgaggtggtgggcaccacccccggccaggcccccaccgccgagcccagcggcaccaccagcgtgcaggtgcccaccaccgaggtgatcagcaccgcccccgtgcagatgcccaccgccgagagcaccggcatgacccccgagaaggtgcccgtgagcgaggtgatgggcaccaccctggccgagatgagcacccccgaggccaccggcatgacccccgccgaggtgagcatcgtggtgctgagcggcaccaccgccgcccaggtgaccaccaccgagtgggtggagaccaccgccagagagctgcccatccccgagcccgagggccccgacgccagcagcatcatgagcaccgagagcatcaccggcagcctgggccccctgctggacggcaccgccaccctgagactggtgaagagacaggtgcccctggactgcgtgctgtacagatacggcagcttcagcgtgaccctggacatcgtgcagggcatcgagagcgccgagatcctgcaggccgtgcccagcggcgagggcgacgccttcgagctgaccgtgagctgccagggcggcctgcccaaggaggcctgcatggagatcagcagccccggctgccagccccccgcccagagactgtgccagcccgtgctgcccagccccgcctgccagctggtgctgcaccagatcctgaagggcggcagcggcacctactgcctgaacgtgagcctggccgacaccaacagcctggccgtggtgagcacccagctgatcatgcccggccaggaggccggcctgggccaggtgcccctgatcgtgggcatcctgctggtgctgatggccgtggtgctggccagcctgatctacagaagaagactgatgaagcaggacttcagcgtgccccagctgccccacagcagcagccactggctgagactgcccagaatcttctgcagctgccccatcggcgagaacagccccctgctgagcggccagcaggtgtag

SEQ ID NO: 292745 - DNA, 1986 bp, Artificial Sequence
  derived and/or modified sequence
atggatctggttctgaagaggtgcctcctgcatctggctgttattggagccctgttggccgtgggagcgacaaaagtgccaaggaaccaggattggcttggtgtgtccagacagctccgaacgaaggcctggaataggcagttataccccgaatggaccgaggcacagcgcctcgattgttggcggggagggcaggtctccctcaaagtctctaacgacgggcctaccttgatcggggccaacgcttcattttcaatagctttgaattttcccggcagccagaaggtactgccggatgggcaggtcatctgggtcaataatactattattaacggcagccaggtgtggggcggtcagcccgtgtacccgcaggagacagacgacgcttgtattttcccagatggaggcccatgtccgtcaggctcttggagccagaaacggtctttcgtgtacgtgtggaagacatggggacagtattggcaggtgcttggaggtccagtttccggcctgtctatcggcactgggagagccatgctgggaacgcacacaatggaggtaacagtctatcaccggcgcgggtctcgatcctacgtgcctctggcacattcatctagcgcttttaccattaccgatcaggtgcccttctcagtgtctgtgagccagctgcgggccctggacggggggaacaagcattttctccggaaccagcctctcacctttgcccttcaattgcacgacccttccggctatttggcagaagccgatttgtcctacacatgggatttcggtgatagcagcggcaccctgatctctcgggctttagtggtgacccacacctatttggagccaggccccgtcaccgcccaggtggtactgcaggccgcaatcccccttaccagctgcggatccagccccgtgcccggaacgaccgacggacacagacctactgctgaagcccccaacaccaccgccgggcaggtgccaactacagaggtggtaggcactacccctggccaggcacctactgcagaaccgagcggcaccacatcagtgcaggttcccactactgaggttatcagtacggcgccagtacagatgcccactgcggaaagcacaggcatgacacccgagaaggttcctgtgtcagaggtaatggggaccacgctcgccgaaatgagcacccctgaggctacaggtatgactcctgccgaggtctccattgttgtcttgtctggcacgacagcagcccaggttacaacaactgagtgggtcgaaacaaccgcgagggagctgcccatcccagagcccgagggcccggatgcttcatccatcatgtcgactgagagcattacaggctcactaggccccctcctggatgggaccgcaacgttgcggttggtgaagcgccaagtcccattagactgtgttctctacagatacggaagtttctcagtaacgttggatatcgtacaagggattgaatccgccgagattctgcaggcggtaccaagtggggaaggtgatgcctttgagttgactgtgagctgccaaggcggattgcctaaggaagcatgcatggaaatttcttcccctgggtgtcagcctcccgcccagcgcctgtgtcagcccgtcttaccgtcccccgcttgccaactcgtgttacaccagattcttaagggggggtctggcacttactgccttaatgtgagcctcgcagataccaatagcctagcagtcgtgagcactcagctcattatgcctggacaggaggctggtctcgggcaggtgcctcttatagtgggaatccttctggtgctgatggctgtcgttctggcctccctgatctataggaggcggcttatgaagcaggacttctccgtccctcagttacctcactcctcttcacattggctaaggcttcccaggattttctgctcatgcccaataggagagaatagtcccctgctcagtgggcagcaggtgtag

SEQ ID NO: 292746 - DNA, 1986 bp, Artificial Sequence
  derived and/or modified sequence
atggacctggtcttgaaacgctgcctcctgcacctggcagttataggggcccttctcgccgtcggagccactaaggtccctaggaaccaggattggcttggggtctctcggcagttaagaaccaaggcatggaatagacagctttaccccgaatggactgaagcccagcgcctggactgttggagaggcgggcaggtctcactgaaagtgtctaacgatggccccacccttattggtgcgaacgcctcattctcaattgccttgaatttcccggggagtcaaaaggtgctccctgacggccaggtcatctgggttaacaacaccattatcaatgggagccaggtgtggggtggacaacccgtgtacccccaagagacagatgacgcatgcatattccctgacggcggaccctgtccatcaggaagctggagtcaaaagcggagttttgtttacgtgtggaagacctggggccagtattggcaggtgttaggcggacccgtctccggactgagcattgggacgggaagggctatgctggggacccacacaatggaggtcacagtttaccacagacgggggtcccgcagctacgttcccctagctcattctagctccgcctttactattaccgaccaagttcccttttcagtatccgtgagccaactacgggcacttgacggcggcaacaaacacttcctcagaaatcaaccccttactttcgcccttcagctacatgacccaagtgggtatctggcggaggccgacctgtcctacacttgggattttggagactcaagtggtaccctgataagcagagcattggttgtcacccatacttacctggagccaggcccagtgacagcccaggtcgtgcttcaggcagctattcctctcacaagctgcggctccagtccggtacccggcactaccgacggacataggcccacagctgaggcaccaaacacaaccgccgggcaagtgcctactacagaggtggtgggaaccacacccggtcaggcgccaacagctgagccttctggtaccacatcagtccaagtgccaacaaccgaggtcatatccactgcccctgttcagatgccaacagctgaatctacgggcatgacccccgagaaggtgcctgtgagtgaggtgatgggaacaacgctggccgaaatgtcaacaccagaagctacgggaatgacacctgcagaggtgagcattgtggtgctcagtggtacgactgctgcccaagtcactaccaccgaatgggtcgagacaaccgcgagagaactacctatcccagaaccagagggccctgatgccagctccattatgtctactgaatccatcaccggctcgttaggacccctgcttgatggcaccgctacgctgcgtctggtaaagagacaggtcccactcgattgcgtgctgtaccgctatggatccttctcggtgaccctcgatattgtgcagggaattgagtcagctgagattttacaggccgtcccttccggtgagggggatgccttcgagttgacggtctcttgtcagggaggacttcctaaagaggcttgtatggagatcagctcaccaggttgtcagccaccagctcagcgactttgtcaacctgtgctcccttcacctgcttgtcagctggtcctgcaccagattttgaagggcggatccggaacatattgcctgaacgtttccctcgctgacaccaattctctggccgtagtgtctacgcagctgattatgccagggcaggaggcaggcctggggcaggttcctctgatcgtcggcatcttattggtcctcatggctgtggtcctagcctccctgatatacaggagaagattgatgaaacaagatttctccgtgcctcagctgccacactctagtagccactggctgcgtctgcctagaatcttttgctcctgtcccattggagaaaattctcctttgctgagcggacagcaggtatag

SEQ ID NO: 292747 - DNA, 1986 bp, Artificial Sequence
  derived and/or modified sequence
atggacctggtgctgaaaagatgcctcctgcacttggccgttatcggagcacttctggctgttggggccacaaaggtgcctagaaatcaggactggttgggagtgtcccgccagctccgcaccaaagcttggaacaggcaactgtaccctgagtggacggaagctcagaggctggattgttggcgcggtggccaagtgagtctgaaggttagcaacgacgggcctacactgattggcgctaacgcttcattcagcatcgctctcaatttccctggaagccagaaggttttacccgacgggcaagtgatctgggtgaacaacaccattataaatggcagccaagtctgggggggacaacctgtttaccctcaggagaccgatgatgcatgcatcttccctgatggaggcccttgcccgagcggttcgtggtcccagaaaagatcttttgtttatgtgtggaaaacgtggggacagtattggcaagtactgggtggcccagtgagtggattatccatcggtactgggcgggccatgctggggacccacactatggaagtgaccgtctatcaccgacgcggcagtcgttcttatgtcccattggcccactcctcttctgctttcacgataaccgaccaagtgcctttctctgtgtccgtctcccaactgagggctctggatggaggcaacaagcattttttgcggaaccaacccctcactttcgcactgcagctgcacgacccctcgggatacctggcagaggccgatctttcttacacttgggatttcggagattcttcaggcacattgattagccgggcactagtggtgacacacacatatttggaacctggccctgtcactgcacaagtcgtgcttcaggccgccatcccactgacatcatgcggctcatcaccagttcccggcactacagacggccatcgccccacagccgaggcccccaacacaaccgccggccaggtccccacaaccgaggttgtgggcacaaccccggggcaagcacccactgccgaaccttcgggcacaacctctgtgcaggtacctaccaccgaggtgattagtaccgctccagtacagatgccgaccgctgaaagcacaggtatgacaccggagaaggtcccagtttccgaagtgatggggacaacactggcagagatgagtacacccgaggccacaggcatgactccagccgaggtgagcattgtggttctctccggcaccaccgcagcccaagtgaccaccacggagtgggtagaaaccactgcgcgcgagctgcccatcccggaaccagaagggcccgacgctagtagcatcatgtcgacagagtcaattacaggcagtcttggacccctgctcgacggaacagctacactgcggctagtgaagcgccaagtcccactggattgcgtgctgtatagatacgggtccttttctgtgaccctcgacattgttcaagggatagagtcagcagagattttacaagccgtgcccagcggcgagggggacgcctttgagttgacagtgtcttgccagggaggcctacccaaggaggcttgtatggagatctcttcgcccggctgtcagcccccggctcaaaggttatgtcagccagtgttaccttcccctgcctgtcagttagtcctccaccaaatcctcaaaggcggctccggcacctactgccttaatgtgtccctggctgacaccaactctcttgccgtcgtaagcacccagttaatcatgccgggccaggaagccgggcttggccaggtgccgctcatagtcggaatactcttagtgcttatggcagtggtactcgcatcattaatctaccgacgtcggctgatgaaacaggattttagcgtgccacagctgccccattcatcctcacattggctgcggctgcccagaatcttctgctcttgtccgatcggggaaaactctccccttctgagcggacagcaggtgtag

SEQ ID NO: 292748 - DNA, 1986 bp, Artificial Sequence
  derived and/or modified sequence
atggacctggtgctgaagcgctgcctgctgcacctggccgtgattggagccctgctggccgtgggcgccaccaaggtgcccaggaaccaggactggctgggcgtgtcccggcagctgcggaccaaggcctggaaccggcagctgtacccagagtggacagaggcccagaggctggactgctggaggggcggccaggtgtccctgaaggtgtccaatgatggccccaccctcatcggggccaatgccagcttcagcatcgccctgaacttccctggcagccagaaggtgctgcctgatggccaggtgatctgggtgaacaacaccatcatcaatggcagccaggtgtggggcggccagcctgtgtacccccaggagacagatgatgcctgcatcttcccagatggcggcccctgccccagcggctcctggagccagaagaggagctttgtgtatgtgtggaagacctggggccagtactggcaggtgctgggcggccctgtgtctggcctgagcatcggcaccggccgggccatgctgggcacccacaccatggaggtgacagtgtaccacagaagaggcagccgctcctatgtgcccctggcccacagcagcagcgccttcaccatcacagaccaggtgcccttctctgtgtctgtgtcccagctgcgggccctggatggcggcaacaagcacttcctgaggaaccagcccctgacctttgccctgcagctgcatgaccccagcggctacctggccgaggccgacctgagctacacctgggactttggagacagcagcggcaccctcatcagccgggccctggtggtgacccacacctacctggagcccggccctgtgacagcccaggtggtgctgcaggccgccatccccctgaccagctgtggcagcagccctgtgcccggcaccacagatggccaccggcccacagctgaggcccccaacaccacagctggccaggtgcccaccacagaggtggtgggcaccaccccaggccaggcccccacagctgagcccagcggcaccacctctgtgcaggtgcccaccacagaggtgatcagcacagcccctgtgcagatgcccacagctgagagcacaggcatgaccccagagaaggtgcctgtgtctgaggtgatgggcaccaccctggccgagatgagcaccccagaggccaccggcatgaccccagctgaggtgtccatcgtggtgctgagcggcaccacagctgcccaggtgaccaccacagagtgggtggagaccacagcccgggagctgcccatccctgagcctgagggcccagatgccagcagcatcatgagcacagagagcatcaccggcagcctgggccccctgctggatggaacagccaccctgcggctggtgaagaggcaggtgcccctggactgtgtgctgtaccgctatggcagcttctctgtgaccctggacatcgtgcagggcattgaatctgctgagatcctgcaggccgtgcccagcggggagggagatgcctttgagctgactgtgtcctgccagggcggcctgcccaaggaggcctgcatggagatcagcagccctggctgccagcccccagcccagaggctgtgccagcctgtgctgcccagccctgcctgccagctggtgctgcaccagatcctgaagggcggcagcggcacctactgcctgaatgtgtccctggccgacaccaacagcctggccgtggtgtccacccagctgatcatgcctggccaggaggccggcctgggccaggtgcccctgattgtgggcatcctgctggtgctgatggctgtggtgctggccagcctcatctacagaagaaggctgatgaagcaggacttctctgtgccccagctgccccacagcagcagccactggctgcggctgccccgcatcttctgcagctgccccatcggggagaacagccccctgctgagcggccagcaggtgtag

SEQ ID NO: 292749 - RNA, 1986 nt, Artificial Sequence
  derived and/or modified sequence
auggacuuaguucugaagaggugcuuguuacaccuggcaguuauuggggccuuacuggcugugggcgccaccaaagugccaaggaaucaggacuggcugggcguaucccgccaguugcguacuaaagcuuggaaucggcaacuauaccccgaguggacagaggcucagagauuagacuguuggcggggaggacaagugucccuuaagguauccaaugacggucccacccuaauaggagccaacgcauccuucucuauugcuuuaaacuucccagggucacagaaggugcugccagauggccaagugauuugggucaauaauacaaucauaaauggaagucaggugugggggggccaaccuguguauccccaggaaacugaugaugccuguauuuucccugacggaggaccaugcccgagcggaucuuggucucagaagcgcaguuuuguguacguauggaagaccuggggucaguauuggcaggugcugggaggccccgucucugggcuuagcaucggaacaggccgggcaaugcuuggaacucacacuauggagguuaccgucuaccacaggcgcggaucaaggucguacgugccacucgcucacucauccuccgccuucaccauuacugaucagguaccguuuagcguauccgucucccagcugagagcccuugacggggguaauaagcacuuccuaagaaaucagccacucaccuuugcguugcaguugcacgauccgucgggcuaccuugcggaagcagauuuauccuauacaugggacuucggggacuccagcgggacccucauuuccagagcccuggucgugacacauacauaccuggaaccuggcccaguuacagcccaaguggugcugcaggcagccauacccuugacuaguuguggcuccucuccgguacccgggacgacugacggacauagaccuacugcagaggcaccaaacacuaccgcagggcaggugcccacaaccgaggugguggggacaacucccggacaggcacccacagcugagcccucaggaacuacguccgugcaaguucccacaacagaggucauuucuaccgcccccgugcagaugcccacugccgaguccaccgggaugacuccggagaaggucccaguuuccgaagugaugggaacuacauuggcugagaugagcaccccagaggccaccgggaugacucccgcugaggucaguaucguggugcuuucugggacgacugcugcucagguaacgaccaccgaauggguggagaccacugcgcgugaacugccgauuccagagcccgaggggccugacgcuagcagcauuauguccacagagucuaucacaggaaguuugggcccacuuuuggacggcacagccacccuucggcucgucaaacgccagguaccucuugacugugugcuguaucgauacggaucuuucucuguaaccuuggauauuguccagggcauagaguccgcugaaauccuucaagcugucccauccggcgaaggcgaugccuucgaacugacuguauccugucagggcggacuucccaaagaggccugcauggagauuagcagcccggguugccagccuccugcccagagauugugccagccaguccugccgucacccgccugccaacucguucuucaucagaucuuaaaaggcgggucugggaccuacugucugaaugugucacucgccgacacuaacucccucgcuguggugucgacccagcugauuaugccaggacaggaagccggccucgggcagguaccacucaucguagggauccuccucgucuugauggcagugguccucgccagucuaauuuacagacggcggcugaugaaacaggauuuuucagugccccagcugccccauucuucaucucacuggcuccgccucccccguauuuucugcucuugcccuauuggagaaaauaguccccuacucagcggacagcaggucuag

SEQ ID NO: 292750 - RNA, 1986 nt, Artificial Sequence
  derived and/or modified sequence
auggaccucgugcuuaaacgcugucuucugcauuuagccguaaucggagcgcuucucgccgucggagccaccaaagucccccggaaccaggauuggcucggcgugucgcggcagcugcgcacgaaggcuuggaauagacagcuauauccggaauggacagaggcgcagcggcuagacuguuggaggggcggacaggucagccugaaagugaguaaugauggcccuacccuuaucggagcuaaugccucuuuuagcauugccuuaaauuuuccagguucgcagaaagugcuuccugauggacaggucaucugggugaacaauaccauaauuaauggaucccaggucugggggggccaaccaguguacccucaggagacagacgacgcuuguauauucccagacgguggcccguguccauccggcuccuggucacagaagaggucauuuguauauguuuggaagacuuggggacaguauuggcagguauuagggggcccugucucuggccugucaaucggaacgggccgggcgaugcuggguacucauacuauggaggugacaguuuaucaccggcggggcuccagaucuuacguuccucucgcucauagcagcagcgcuuucacaauuacugaucagguucccuucucgguuaguguuucacagcugagggcacuggacggcgguaacaagcauuuucuuagaaaccagccuuuaacuuuugcucugcaacugcacgaucccucuggcuaucucgccgaagcugaccuuucauauacaugggauuucggagauagcuccggaacacuuauuagucgggcgcuuguagugacucacacuuauuuggaaccuggaccgguuacugcccagguaguuuuacaggcagcuaucccccucacaagcugcggaagcagcccagugccuggaacuacggauggccaucgcccaacugcagaagccccuaacacuaccgcaggccaaguuccuacuacagaaguggucggcaccaccccuggucaggcaccuacagccgaaccgaguggaacgaccuccgugcaaguccccacaacugaggugaucucaacugcaccggugcaaaugccuaccgcagaaagcacagguaugacccccgaaaaagucccuguuuccgaagucaugggcacuaccuuagcagaaaugagcaccccagaggcaacagguaugacacccgcagagguuaguauugugguucucucugguaccacggcagcucaggugacuaccaccgaguggguagaaaccaccgcacgcgaacuaccuauuccugagccugagggcccugacgccucgagcauaaugagcaccgaguccaucacagggucauuggguccccuccucgacggcacagcaacacuaagacuggugaaacggcaggugccgcuggauugugugcuguaucgguauggcuccuucagcguaacccuugauaucguucaggguaucgaaucagccgaaauuuugcaggcuguaccaaguggagaaggcgacgcguuugaguugaccguuucaugccagggaggucugccuaaggaagcaugcauggagauuucuaguccuggcugccagccccccgcacagcgccuuugccaaccggugcugcccaguccggcuugccaacugguacuccaucagauucugaaaggcgggucaggaacauacugcuuaaacguaucauuggcagauacgaacucccucgcugucgucucuacccagcugaucaugcccggccaggaagcugggcuggggcagguaccccuuauagugggaauccuccugguccugauggcgguggugcuggcgucccucauuuaucgucggaggcuuaugaaacaagacuuuuccgugccccaguuaccccauucuucuucucauuggcucagacucccccggauuuucugcuccugccccaucggcgaaaauagcccucuccuguccgggcagcaggucuag

SEQ ID NO: 292751 - RNA, 1986 nt, Artificial Sequence
  derived and/or modified sequence
auggacuuagugcugaaacgcugucuccuccacuuagcagugauuggugcccuccucgcuguaggggcuacaaaagugccacggaaccaagacuggcuuggcguaagccgucagcugcgaacaaaagccuggaauaggcagcuuuaccccgaguggacagaggcacagcggcuggacugcuggcgcggcggucaagugucgcugaaaguuaguaaugacggucccacccuuauuggcgcaaaugcuuccuuuaguaucgcuuuaaacuuccccgggucccagaaagugcuaccagacggccagguuauaugggugaauaacacaaucaucaacggcucucagguguggggcgggcaaccuguguacccucaggagacagacgaugccugcauuuucccagacggaggaccaugucccuccggcaguuggucucagaaaagaagcuucguguacguguggaagaccuggggacaguacuggcaggugcugggaggccccgugagcggucuuagcaucggcaccgggagagcuaugcucggcacccauacaauggaggugaccguguaccaucgaagagguagcagaagcuacguaccguuagcucauaguagcucggccuucaccauuacagaccagguuccguucuccgucuccgugucccagcucagggcccuggacggaggaaacaaacauuuucugcggaaucagccacugaccuuugcccugcagcuccaugacccaagcgguuauuuggcugaggccgacuugagcuauacaugggauuucggggacuccucagguacucugauuucacgugcucugguuguuacucacacguaccuagagcccggaccugugacugcacagguggucuugcaggccgcaauuccccucaccagcuguggguccucuccagugccuggcaccacugacggccauagaccaacugcagaagcaccuaauacgaccgcaggccagguccccacuacagaagucgucggcacuacucccggccaggccccaaccgcggagccaucugguacaacuuccguccaggugcccacuaccgagguuauuaguacugccccgguacagaugccuaccgcagagaguacagggaugaccccagaaaaggugccugugagcgaggugauggguaccacacuugcagagaugucuacuccagaggcuacaggaaugacuccggcagaggugaguauaguuguucuuuccggaacuaccgcugcacagguaacuacaaccgagugggucgagacgaccgcucgcgaacuucccaucccugagccagagggaccugacgccuccagcaucaugagcacugaaagcaucacaggcucucugggcccccuguuggauggaaccgccacccuccgccuaguuaaacgccagguuccucuagauuguguguuguaucgauacggcuccuucuccgugacgcuggacaucguccaagggauugaaagugcugagauacugcaagcuguaccaagcggggagggugaugcguucgagcucaccguguccugccaggguggucugccaaaggaagccuguauggaaaucucaaguccaggaugccagccccccgcucagcgauugugccagccagugcuucccucacccgcaugccaacugguacuacaccagaucuugaagggcgggaguggaacuuauugccugaacgugucccuagcugauacaaacaguuuagcaguggucucuacucaacuaauaaugccgggccaggaagccggccuggggcaagucccucugauuguugguauauuguugguccucauggcuguggugcucgccuccuugaucuaccggcggcgucuuaugaagcaggacuucagcguuccccaguugccccacucaaguucacacuggcugcgacugcccagaauuuucugcucuugcccuauuggcgagaauucuccgcugcucagcggucaacaggucuag

SEQ ID NO: 292752 - RNA, 1986 nt, Artificial Sequence
  derived and/or modified sequence
auggaccucguucucaagaggugucuccuucaucuagcggugauuggagcguuauuagccgucggugcaacuaaggucccucguaaccaggauugguuggguguguccagacagcuaagaacgaaggcuuggaaccggcaacuguaccccgaauggaccgaagcgcagaggcuugacugcuggcgaggaggccaggucagccugaaaguuaguaaugacgguccuacacugaucggcgcaaaugccucuuucuccauugcauugaauuuucccggcucucaaaagguccuaccggauggccaagugauuuggguuaauaacacaaucauuaauggcagccagguguggggaggacaaccaguuuacccccaagaaaccgaugacgcauguauuuuuccugaugguggaccauguccuucugggucauggagccagaaacgguccuucguguacguauggaagacauggggacaguauuggcaggugcuugguggcccugugaguggccucagcauuggcacgggacgggcuaugcuuggaacccauacuauggaagucacgguguaucacaggagagggagccguucuuacguuccgcuggcucauucuuccuccgcguuuaccauuacagaucaggucccguuuagcguaucuguuagccagcugagagcccuagauggcggaaauaaacacuuuuugcgcaaccaaccucugacuuuugcucuccaauugcaugacccaucuggguaccuggcagaggccgacuugucuuacaccugggacuuuggcgauagcucagggacgcuaauuucacgcgcccucguggucacucacaccuaccuugaaccaggacccgugacggcacagguugugcuacaggcagcuauaccacuaacuagcugcgguagcucuccaguccccgggaccacagauggacaucgcccaaccgccgaggcucccaauaccacugcgggucaagugccuacgaccgagguaguuggaacaacuccaggacaggcccccacggcugagcccucgggcacaacaucagugcaaguccccaccaccgaagugaucuccaccgccccaguccagaugccuaccgccgagagcacuggcaugacacccgaaaaggugccuguuagcgaagucaugggaacaacucuggccgaaaugucuaccccugaagccaccggcaugaccccugccgaagucucaauagugguccuaaguggcacaacggccgcccaagucacgaccacagaauggguggagaccaccgccagggaacuuccuauucccgaacccgagggaccagaugcuucaagcauuaugagcacagaaucuauuacagggagccuuggacccuuacuugacgggacggcaacccugagguuagucaagcggcaaguuccucucgauugcguuuuguauagauauggaucauuuucagucacgcucgauauuguucagggaaucgaaucugcugaaauuuugcaagccguuccaaguggggagggggacgccuucgaacugacuguguccugccagggggggcugcccaaagaggccugcauggagaucaguucuccugggugucagccaccugcucaaagacucugucaaccuguuuuaccuucuccugccugucaacuggugcuucaucaaauuuugaagggggggagcgggaccuacuguuuaaauguuagucuagccgacaccaacucacucgcugucguauccacccaacucauuaugccaggucaggaagccggccugggacaggugccacugaucguggguauccugcuaguacucauggcuguaguguuggcaagccugaucuacaggagaagacugaugaaacaagauuuuaguguuccucagcugccccauuccuccucucacuggcuaagacuuccucgaauuuucuguucuugucccauuggagagaauuccccuuuacuguccggacagcaaguguag

SEQ ID NO: 292753 - RNA, 1986 nt, Artificial Sequence
  derived and/or modified sequence
auggauuuggugcuuaagagaugucuccuacacuuagccgugaucggcgcccuccuggccguuggggccacuaagguccccaggaaucaagacuggcuggggguaagcagacaguuacgcacaaaggcuuggaacagacagcuuuacccugaguggacagaggcccaacgucuggauugcuggagaggaggacaggugucauuaaaaguuucgaacgacgggcccacccuaauuggggcaaacgccagcuucucuauugcccuuaacuuuccugguucucagaaggucuuacccgauggccaggugauuuggguuaauaauaccaucaucaacggaucacaggucugggguggucagcccguauauccccaggaaacagaugaugcauguaucuuucccgaugguggcccuugucccucugggucuuggagucagaagagguccuucguguacgucuggaagaccugggggcaguacuggcaggucuugggggggccagucucuggucugucaauuggaacggguagagcaauguuaggaacgcacacuauggagguaacgguguaucacagaagaggaagcagaucuuacgugccacucgcacauagcucuuccgccuuuaccauuacagaccagguuccuuucagugugucaguaucccaacugcgggcacuggaugggggcaauaaacauuuccuucgcaaucagccccugacauucgcccuacagcuucacgacccuucuggauauuuggccgaggccgaucuaagcuauacuugggacuuuggcgauuccuccgguacacugauuucacgagcauuagucgucacacacacuuauuuggagcccggccccgugaccgcacagguaguucuccaggcagccauuccacugaccagcugcggaagcagcccagugccuggaacuacggauggccaucgcccaacugcagaagccccuaacacuaccgcaggccaaguuccuacuacagaaguggucggcaccaccccuggucaggcaccuacagccgaaccgaguggaacgaccuccgugcaaguccccacaacugaggugaucucaacugcaccggugcaaaugccuaccgcagaaagcacagguaugacccccgaaaaagucccuguuuccgaagucaugggcacuaccuuagcagaaaugagcaccccagaggcaacagguaugacaccggccgaagugucaaucguaguauuauccggaacaaccgcagcacaagugacuacuacagaguggguggaaacuaccgcgcgggagcugccuaucccagagccugaagguccugacgccaguucaaucauguccacagaaaguaucacaggaagucugggccccuuacuugacggaacugccacuuuaagacucguuaaacggcaggucccccucgauugcguuuuauaccguuacgggaguuuuagcgugacccuggauauugugcaggggauugagucugcagagauccugcaggcuguucccagcggcgagggugaugcauuugaacugaccgugaguugucaggguggacugccuaaagaagcuuguauggaaauaucuucgcccgguugccagccuccugcacaaagauugugucaaccugucuuacccucccccgcuugucagcuggugcuucaucaaauccuuaaaggaggcuccggcaccuauugucugaacgugagucucgccgacacuaacucucucgcugucgucaguacccagcuuauaaugcccggucaggaagcugggcucggccaggucccucuuaucgugggcauucuguuaguccugauggccgugguucuggcaucucugaucuaucguagaaggcucaugaagcaagacuuuagcgucccacagcugccccacucgaguucccacuggcugagacugccgcgaauuuuuuguucaugccccauuggugaaaauagcccccuccucaguggccaacaaguuuag

SEQ ID NO: 292754 - RNA, 1986 nt, Artificial Sequence
  derived and/or modified sequence
auggaccuuguucuuaagcguugucugcugcauuuggccguuauuggcgcccuguuggcagugggagcgaccaagguuccgagaaaccaggacuggcuuggaguaagucgucaacuaagaaccaaagccuggaaccggcagcuuuauccugaauggacagaggcucaacgacucgacugcuggcgaggaggucaagugucgcugaagguuuccaaugacgggccaacguugauuggggcaaacgcuagcuuuaguaucgcacucaauuucccaggaucucaaaaaguccuuccagacggccagguuauuuggguuaacaauacaauaaucaaugggagucaaguuuggggcgggcaaccggucuauccacaggaaaccgaugacgcaugcauuuuccccgacggcggacccuguccuucaggauccuggucacagaaacgaagcuuugucuacguguggaaaacauggggccaauauuggcaaguacucggggguccugugagugggcuguccaucggcaccggcagagccauguuagggacacacacgauggaaguaacuguguaccaccggagaggguccaggucauauguaccacucgcacauuccuccuccgcuuucacaauuacagaccaagugccauucucugugagcgugucacagcuucgagcccuggauggaggcaauaagcacuuccuucgcaaucagccauugacauucgcuuuacagcugcaugacccaucgggauaccucgcggaggcugaccugagcuacacaugggacuucggcgauagcucuggaacccugauuucgcgugcuuugguagucacucacaccuaucucgaaccugguccaguaaccgcucaaguuguacugcaggcggcgaucccacucacuucaugcggcagcagucccguaccaggcacaacugauggacauagaccaacggcugaagcaccaaacacuacagcuggucaggucccaaccaccgaagucgugggcacuaccccgggacaggcucccacagccgagcccucuggaacuacuucaguacagguaccaacaacagaagucauuucaacugccccuguccagaugccaacagcagaaucaaccggcaugaccccagaaaaggugccaguuucugaaguuaugggcacgacgcucgccgagaugagcacuccugaggccacagguaugacccccgccgagguauccauuguuguucuuuccggaacaaccgccgcccaagugaccacgaccgaauggguggagacuacagcccgcgagcuucccauccccgaaccggagggucccgaugcuuccaguaucaugucgaccgagagcauuacaggcucccuuggccccuugcucgaugguacugccacccuuagauuagugaaacgccaaguuccccucgacuguguacuuuacagauauggcucuuucagcgucaccuuggauaucguucaggguaucgagucugcagaaauccugcaagcugugccaagcggagagggagacgcauucgaguuaacugugagcugucaaggaggccugccuaaggaagccuguauggagauuucuagcccuggaugccaaccccccgcucagcgccugugucaacccgugcugcccagcccagccugccagcuggucuugcaccagauucugaagggcgguucaggcacauauugucucaaugugucucuagcggacacuaauucucuugcuguggucucuacccaauugauaaugccaggccaggaggcuggacuuggccaaguuccucugaucguuggcaucuugcucgugcuuauggccgugguucucgcuucccugauuuaucgucggcguuuaaugaagcaggauuucucuguuccacaacugccacacaguucuucccacuggcugagacucccccguauauuuugcucauguccgauuggugaaaauucuccacugcucucugggcaacagguauag

SEQ ID NO: 292755 - protein, 847 aa, Artificial Sequence
  derived and/or modified sequence
MSLWGLVSKMPPEKVQRLYVDFPQHLRHLLGDWLESQPWEFLVGSDAFCCNLASALLSDTVQHLQASVGEQGEGSTILQHISTLESIYQRDPLKLVATFRQILQGEKKAVMEQFRHLPMPFHWKQEELKFKTGLRRLQHRVGEIHLLREALQKGAEAGQVSLHSLIETPANGTGPSEALAMLLQETTGELEAAKALVLKRIQIWKRQQQLAGNGAPFEESLAPLQERCESLVDIYSQLQQEVGAAGGELEPKTRASLTGRLDEVLRTLVTSCFLVEKQPPQVLKTQTKFQAGVRFLLGLRFLGAPAKPPLVRADMVTEKQARELSVPQGPGAGAESTGEIINNTVPLENSIPGNCCSALFKNLLLKKIKRCERKGTESVTEEKCAVLFSASFTLGPGKLPIQLQALSLPLVVIVHGNQDNNAKATILWDNAFSEMDRVPFVVAERVPWEKMCETLNLKFMAEVGTNRGLLPEHFLFLAQKIFNDNSLSMEAFQHRSVSWSQFNKEILLGRGFTFWQWFDGVLDLTKRCLRSYWSDRLIIGFISKQYVTSLLLNEPDGTFLLRFSDSEIGGITIAHVIRGQDGSPQIENIQPFSAKDLSIRSLGDRIRDLAQLKNLYPKKPKDEAFRSHYKPEQMGKDGRGYVPATIKMTVERDQPLPTPELQMPTMVPSYDLGMAPDSSMSMQLGPDMVPQVYPPHSHSIPPYQGLSPEESVNVLSAFQEPHLQMPPSLGQMSLPFDQPHPQGLLPCQPQEHAVSSPDPLLCSDVTMVEDSCLSQPVTAFPQGTWIGEDIFPPLLPPTEQDLTKLLLEGQGESGGGSLGAQPLLQPSHYGQSGISMSHMDLRANPSW

SEQ ID NO: 292756 - protein, 737 aa, Artificial Sequence
  derived and/or modified sequence
MEQFRHLPMPFHWKQEELKFKTGLRRLQHRVGEIHLLREALQKGAEAGQVSLHSLIETPANGTGPSEALAMLLQETTGELEAAKALVLKRIQIWKRQQQLAGNGAPFEESLAPLQERCESLVDIYSQLQQEVGAAGGELEPKTRASLTGRLDEVLRTLVTSCFLVEKQPPQVLKTQTKFQAGVRFLLGLRFLGAPAKPPLVRADMVTEKQARELSVPQGPGAGAESTGEIINNTVPLENSIPGNCCSALFKNLLLKKIKRCERKGTESVTEEKCAVLFSASFTLGPGKLPIQLQALSLPLVVIVHGNQDNNAKATILWDNAFSEMDRVPFVVAERVPWEKMCETLNLKFMAEVGTNRGLLPEHFLFLAQKIFNDNSLSMEAFQHRSVSWSQFNKEILLGRGFTFWQWFDGVLDLTKRCLRSYWSDRLIIGFISKQYVTSLLLNEPDGTFLLRFSDSEIGGITIAHVIRGQDGSPQIENIQPFSAKDLSIRSLGDRIRDLAQLKNLYPKKPKDEAFRSHYKPEQMGKDGRGYVPATIKMTVERDQPLPTPELQMPTMVPSYDLGMAPDSSMSMQLGPDMVPQVYPPHSHSIPPYQGLSPEESVNVLSAFQEPHLQMPPSLGQMSLPFDQPHPQGLLPCQPQEHAVSSPDPLLCSDVTMVEDSCLSQPVTAFPQGTWIGEDIFPPLLPPTEQDLTKLLLEGQGESGGGSLGAQPLLQPSHYGQSGISMSHMDLRANPSW

SEQ ID NO: 292757 - protein, 679 aa, Artificial Sequence
  derived and/or modified sequence
MSLWGLVSKMPPEKVQRLYVDFPQHLRHLLGDWLESQPWEFLVGSDAFCCNLASALLSDTVQHLQASVGEQGEGSTILQHISTLESIYQRDPLKLVATFRQILQGEKKAVMEQFRHLPMPFHWKQEELKFKTGLRRLQHRVGEIHLLREALQKGAEAGQVSLHSLIETPANGTGPSEALAMLLQETTGELEAAKALVLKRIQIWKRQQQLAGNGAPFEESLAPLQERCESLVDIYSQLQQEVGAAGGELEPKTRASLTGRLDEVLRTLVTSCFLVEKQPPQVLKTQTKFQAGVRFLLGLRFLGAPAKPPLVRADMVTEKQARELSVPQGPGAGAESTGEIINNTVPLENSIPGNCCSALFKNLLLKKIKRCERKGTESVTEEKCAVLFSASFTLGPGKLPIQLQALSLPLVVIVHGNQDNNAKATILWDNAFSEMDRVPFVVAERVPWEKMCETLNLKFMAEVGTNRGLLPEHFLFLAQKIFNDNSLSMEAFQHRSVSWSQFNKEILLGRGFTFWQWFDGVLDLTKRCLRSYWSDRLIIGFISKQYVTSLLLNEPDGTFLLRFSDSEIGGITIAHVIRGQDGSPQIENIQPFSAKDLSIRSLGDRIRDLAQLKNLYPKKPKDEAFRSHYKPEQMGKDGRGYVPATIKMTVERDQPLPTPELQMPTMVPSYDLGMALIPP

SEQ ID NO: 292758 - protein, 730 aa, Artificial Sequence
  derived and/or modified sequence
MEQFRHLPMPFHWKQEELKFKTGLRRLQHRVGEIHLLREALQKGAEAGQVSLHSLIETPANGTGPSEALAMLLQETTGELEAAKALVLKRIQIWKRQQQLAGNGAPFEESLAPLQERCESLVDIYSQLQQEVGAAGGELEPKTRASLTGRLDEVLRTLVTSCFLVEKQPPQVLKTQTKFQAGVRFLLGLRFLGAPAKPPLVRADMVTEKQARELSVPQGPGAGAESTGEIINNTVPLENSIPGNCCSALFKNLLLKKIKRCERKGTESVTEEKCAVLFSASFTLGPGKLPIQLQALSLPLVVIVHGNQDNNAKATILWDNAFSEMDRVPFVVAERVPWEKMCETLNLKFMAEVGTNRGLLPEHFLFLAQKIFNDNSLSMEAFQHRSVSWSQFNKEILLGRGFTFWQWFDGVLDLTKRCLRSYWSDRLIIGFISKQYVTSLLLNEPDGTFLLRFSDSEIGGITIAHVIRGQDGSPQIENIQPFSAKDLSIRSLGDRIRDLAQLKNLYPKKPKDEAFRSHYKPEQMGKDGRGYVPATIKMTVERDQPLPTPELQMPTMVPSYDLGMAPDSSMSMQLGPDMVPQVYPPHSHSIPPYQGLSPEESVNVLSAFQEPHLQMPPSLGQMSLPFDQPHPQGLLPCQPQEHAVSSPDPLLCSDVTMVEDSCLSQPVTAFPQGTWIGEDIFPPLLPPTEQDLTKLLLEGQGESGGGSLGHSPSCSPPTMGNLGSQCPTWT

SEQ ID NO: 292759 - protein, 144 aa, Artificial Sequence
  derived and/or modified sequence
MSLWGLVSKMPPEKVQRLYVDFPQHLRHLLGDWLESQPWEFLVGSDAFCCNLASALLSDTVQHLQASVGEQGEGSTILQHISTLESIYQRDPLKLVATFRQILQGEKKAVMEQFRHLPMPFHWKQEELKFKTGLRRLQHRVGEI

SEQ ID NO: 292760 - protein, 154 aa, Artificial Sequence
  derived and/or modified sequence
MSLWGLVSKMPPEKVQRLYVDFPQHLRHLLGDWLESQPWEFLVGSDAFCCNLASALLSDTVQHLQASVGEQGEGSTILQHISTLESIYQRDPLKLVATFRQILQGEKKAVMEQFRHLPMPFHWKQEELKFKTGLRRLQHRVGEIHLLREALQKG

SEQ ID NO: 292761 - protein, 105 aa, Artificial Sequence
  derived and/or modified sequence
MSLWGLVSKMPPEKVQRLYVDFPQHLRHLLGDWLESQPWEFLVGSDAFCCNLASALLSDTVQHLQASVGEQGEGSTILQHISTLESIYQRDPLKLVATFRQILQG

SEQ ID NO: 292762 - protein, 103 aa, Artificial Sequence
  derived and/or modified sequence
MSLWGLVSKMPPEKVQRLYVDFPQHLRHLLGDWLESQPWEFLVGSDAFCCNLASALLSDTVQHLQASVGEQGEGSTILQHISTLESIYQRDPLKLVATFRQIL

SEQ ID NO: 292763 - protein, 159 aa, Artificial Sequence
  derived and/or modified sequence
MSLWGLVSKMPPEKVQRLYVDFPQHLRHLLGDWLESQPWEFLVGSDAFCCNLASALLSDTVQHLQASVGEQGEGSTILQHISTLESIYQRDPLKLVATFRQILQGEKKAVMEQFRHLPMPFHWKQEELKFKTGLRRLQHRVGEIHLLREALQKGAEAGQ

SEQ ID NO: 292764 - protein, 74 aa, Artificial Sequence
  derived and/or modified sequence
MSLWGLVSKMPPEKVQRLYVDFPQHLRHLLGDWLESQPWEFLVGSDAFCCNLASALLSDTVQHLQASVGEQGEG

SEQ ID NO: 292765 - DNA, 3993 bp, Artificial Sequence
  derived and/or modified sequence
ccggaaacagcgggctggggcagccactgcttacactgaagagggaggacgggagaggagtgtgtgtgtgtgtgtgtgtgtgtgtgtgtatgtatgtgtgtgctttatcttatttttctttttggtggtggtggtggaaggggggaggtgctagcagggccagccttgaactcgctggacagagctacagacctatggggcctggaagtgcccgctgagaaagggagaagacagcagaggggttgccgaggcaacctccaagtcccagatcatgtctctgtggggtctggtctccaagatgcccccagaaaaagtgcagcggctctatgtcgactttccccaacacctgcggcatcttctgggtgactggctggagagccagccctgggagttcctggtcggctccgacgccttctgctgcaacttggctagtgccctactttcagacactgtccagcaccttcaggcctcggtgggagagcagggggaggggagcaccatcttgcaacacatcagcacccttgagagcatatatcagagggaccccctgaagctggtggccactttcagacaaatacttcaaggagagaaaaaagctgttatggaacagttccgccacttgccaatgcctttccactggaagcaggaagaactcaagtttaagacaggcttgcggaggctgcagcaccgagtaggggagatccaccttctccgagaagccctgcagaagggggctgaggctggccaagtgtctctgcacagcttgatagaaactcctgctaatgggactgggccaagtgaggccctggccatgctactgcaggagaccactggagagctagaggcagccaaagccctagtgctgaagaggatccagatttggaaacggcagcagcagctggcagggaatggcgcaccgtttgaggagagcctggccccactccaggagaggtgtgaaagcctggtggacatttattcccagctacagcaggaggtaggggcggctggtggggagcttgagcccaagacccgggcatcgctgactggccggctggatgaagtcctgagaaccctcgtcaccagttgcttcctggtggagaagcagcccccccaggtactgaagactcagaccaagttccaggctggagttcgattcctgttgggcttgaggttcctgggggccccagccaagcctccgctggtcagggccgacatggtgacagagaagcaggcgcgggagctgagtgtgcctcagggtcctggggctggagcagaaagcactggagaaatcatcaacaacactgtgcccttggagaacagcattcctgggaactgctgctctgccctgttcaagaacctgcttctcaagaagatcaagcggtgtgagcggaagggcactgagtctgtcacagaggagaagtgcgctgtgctcttctctgccagcttcacacttggccccggcaaactccccatccagctccaggccctgtctctgcccctggtggtcatcgtccatggcaaccaagacaacaatgccaaagccactatcctgtgggacaatgccttctctgagatggaccgcgtgccctttgtggtggctgagcgggtgccctgggagaagatgtgtgaaactctgaacctgaagttcatggctgaggtggggaccaaccgggggctgctcccagagcacttcctcttcctggcccagaagatcttcaatgacaacagcctcagtatggaggccttccagcaccgttctgtgtcctggtcgcagttcaacaaggagatcctgctgggccgtggcttcaccttttggcagtggtttgatggtgtcctggacctcaccaaacgctgtctccggagctactggtctgaccggctgatcattggcttcatcagcaaacagtacgttactagccttcttctcaatgagcccgacggaacctttctcctccgcttcagcgactcagagattgggggcatcaccattgcccatgtcatccggggccaggatggctctccacagatagagaacatccagccattctctgccaaagacctgtccattcgctcactgggggaccgaatccgggatcttgctcagctcaaaaatctctatcccaagaagcccaaggatgaggctttccggagccactacaagcctgaacagatgggtaaggatggcaggggttatgtcccagctaccatcaagatgaccgtggaaagggaccaaccacttcctaccccagagctccagatgcctaccatggtgccttcttatgaccttggaatggcccctgattcctccatgagcatgcagcttggcccagatatggtgccccaggtgtacccaccacactctcactccatccccccgtatcaaggcctctccccagaagaatcagtcaacgtgttgtcagccttccaggagcctcacctgcagatgccccccagcctgggccagatgagcctgccctttgaccagcctcacccccagggcctgctgccgtgccagcctcaggagcatgctgtgtccagccctgaccccctgctctgctcagatgtgaccatggtggaagacagctgcctgagccagccagtgacagcgtttcctcagggcacttggattggtgaagacatattccctcctctgctgcctcccactgaacaggacctcactaagcttctcctggaggggcaaggggagtcggggggagggtccttgggggcacagcccctcctgcagccctcccactatgggcaatctgggatctcaatgtcccacatggacctaagggccaaccccagttggtgatcccagctggagggagaacccaaagagacagctcttctactacccccacagacctgctctggacacttgctcatgccctgccaagcagcagatggggagggtgccctcctatccccacctactcctgggtcaggaggaaaagactaacaggagaatgcacagtgggtggagccaatccactccttcctttctatcattcccctgcccacctccttccagcactgactggaagggaagttcaggctctgagacacgccccaacatgcctgcacctgcagcgcgcacacgcacgcacacacacatacagagctctctgagggtgatggggctgagcaggaggggggctgggtaagagcacaggttagggcatggaaggcttctccgcccattctgacccagggcctaggacggataggcaggaacatacagacacatttacactagaggccagggatagaggatattgggtctcagccctaggggaatgggaagcagctcaagggaccctgggtgggagcataggaggggtctggacatgtggttactagtacaggttttgccctgattaaaaaatctcccaaagccccaaattcctgttagccaggtggaggcttctgatacgtgtatgagactatgcaaaagtacaagggctgagattcttcgtgtatagctgtgtgaacgtgtatgtacctaggatatgttaaatgtatagctggcaccttagttgcatgaccacatagaacatgtgtctatctgcttttgcctacgtgacaacacaaatttgggagggtgagacactgcacagaagacagcagcaagtgtgctggcctctctgacatatgctaacccccaaatactctgaatttggagtctgactgtgcccaagtgggtccaagtggctgtgacatctacgtatggctccacacctccaatgctgcctgggagccagggtgagagtctgggtccaggcctggccatgtggccctccagtgtatgagagggccctgcctgctgcatcttttctgttgccccatccaccgccagcttcccttcactcccctatcccattctccctctcaaggcaggggtcatagatcctaagccataaaataaattttattccaaaataacaaaataaataatctactgtacacaatctgaaaaaaaaaaaaaaaaaa

SEQ ID NO: 292766 - DNA, 2544 bp, Artificial Sequence
  derived and/or modified sequence
atgagcctgtgggggttagtttccaaaatgccccccgagaaagtacagagactgtacgtggatttccctcagcatctgagacaccttctaggcgactggcttgagagccagccgtgggaattcctagtgggcagtgatgccttttgttgcaatctcgccagcgccctgctcagcgacacggtccagcacttacaagccagtgttggcgagcagggagagggctctaccatcttacaacacatctccacactggagagtatataccagcgcgatcctctgaagctcgtggctacattcagacagatactacaaggagaaaaaaaggccgttatggagcagtttagacatttacctatgcccttccactggaagcaagaagagcttaagttcaagaccgggctgagaagattgcagcaccgcgtgggggagattcacctcctgagagaggcactccaaaaaggagccgaggctggccaggtcagcctgcacagcctgatagaaacacctgccaacggcaccggcccaagcgaggcgctggctatgcttttacaagaaaccactggcgaactggaagccgccaaggcactggtactgaagaggatacagatttggaaaaggcagcagcagctggctggtaatggagcccctttcgaggagagcctggcccccctgcaggagaggtgtgagagtctggtggatatctactcgcaacttcaacaggaggtgggcgctgccggtggcgaactggaacctaagacaagggctagcttaacagggcgactggatgaagtactgagaaccctggtgacttcatgttttctggtggaaaagcagccccctcaagtcctgaagacacagaccaaattccaggccggagtaaggtttcttctggggctccgttttctcggcgccccagccaaaccccccttggtgcgggctgatatggtaaccgagaagcaagcccgcgaactttccgtaccacaggggccaggagccggtgcagagtccacaggcgaaatcatcaataatacagtgcccctggagaacagtatccctgggaactgttgttccgccctctttaagaacttactgctcaaaaagatcaaaagatgcgaacggaaaggcaccgaatctgtgaccgaagagaagtgtgcagtcctgttcagcgcgtcattcacgttgggacctgggaagctgccaattcaactccaggccctgtctctcccactggtagtgattgtgcacggtaaccaggacaataatgcaaaggcgacaatactgtgggataatgccttttccgagatggaccgtgttccctttgtggtggcagagcgcgtcccgtgggagaagatgtgcgagaccctgaatctgaagtttatggccgaggttggaacaaacagaggcctgctgcccgagcatttcctgttcttggcccagaagatctttaatgacaactctttgtccatggaggcttttcagcaccgcagtgtctcgtggtcacaattcaataaagagattctgctgggtaggggattcacattctggcaatggtttgatggtgttctggatctcaccaaacgctgtctaaggtcttactggtctgaccgcctgattatcggattcatttctaagcaatatgtgacctctcttttactcaatgaaccagatggaactttcctgttgcgcttctctgacagcgagatcgggggtatcacaattgctcacgtgatcagggggcaagatggctcccctcagatcgaaaacattcagccattttccgctaaagatctgtcaataagatcgttgggcgaccgcataagagacctggctcagctgaagaacctgtaccccaaaaaacctaaagacgaggcctttaggtcacattataaacccgagcagatgggaaaagacggtcgcggctacgtgccggccacgatcaagatgacagtggagagggaccaaccgctaccaaccccggaactacagatgcccacaatggtccctagttacgacctgggaatggctccagacagctccatgtcaatgcaactgggacccgatatggtcccacaggtgtatcccccccactcgcattcgattccaccttatcagggactcagtcctgaagagagcgttaatgtgctctccgcctttcaggagccccaccttcaaatgcctccgtcacttgggcagatgtcacttcctttcgatcaaccccatccacaggggctgctgccttgccaaccccaagagcatgcagtttcatcccctgaccccttgctatgcagtgatgtcacgatggtagaagattcatgtcttagtcagcctgtcaccgcctttccccagggtacgtggatcggagaggatattttccctccgctgctgcccccaaccgaacaggacctcacgaaattgctactggaaggccagggagagagcggtggcggctccctgggcgctcaaccgctgctgcagcctagccattacgggcagtctgggatcagtatgtcccacatggacctcagagccaacccatcatggtag

SEQ ID NO: 292767 - DNA, 2544 bp, Artificial Sequence
  derived and/or modified sequence
atgagcctgtggggactggtgtcgaaaatgccacctgaaaaggttcagcggctatatgttgactttccacagcaccttagacatttattgggcgattggctggagtcccagccgtgggagttcctcgtcggaagcgacgccttttgttgtaacctggcttccgcgctcctgagcgacaccgtgcagcacctgcaggcaagcgtaggagagcagggggagggtagtactatactgcagcatataagcaccttggaaagtatctaccagcgcgaccccttgaagctggtggcgacattccggcagattctgcaaggagagaagaaggcagttatggagcagttccgccatctgccgatgccatttcactggaagcaagaggagctgaagttcaagacaggtctccgccggctgcagcatagagtgggggagatacacctcctccgagaggcgttacaaaaaggcgccgaggcaggtcaggtctccttacacagtctgatcgagaccccggccaacggcaccggaccttcggaggccctggccatgctgttacaggaaaccacaggggagctagaagcagccaaagcactagtccttaaacgcatccagatctggaaacgacagcagcaattggcgggtaacggagctcctttcgaggaaagtctggcccccctgcaggagcgttgtgagtccctggtcgacatatacagccaactccagcaagaggttggagcggcagggggcgagcttgagcccaagacccgggcctccttaaccggccgcctggatgaagtcctgaggactctggtgacctcttgtttcctggtggagaagcagcccccgcaggtgctcaagacgcaaaccaaatttcaggccggtgtgcgatttctgctgggacttaggttcttaggggcacctgcaaagccccccttagtgagagccgacatggtaactgaaaaacaagcacgggaactctcagtgccccaaggccccggcgccggcgcagagtctactggggagataataaacaacactgtgcccctggaaaattccatccctggcaattgttgttctgccttatttaagaacttgctgctaaaaaagatcaaacgctgtgagagaaaaggaacggagtccgtgactgaggaaaaatgtgctgtacttttttctgcatcattcaccctgggccccggcaaactgccgatccagttgcaggccctgagtctgcccctggttgttattgtgcatggcaaccaggacaataatgccaaggcaactatactctgggataatgccttttccgaaatggatcgagtcccttttgtagttgctgaacgggtcccatgggaaaagatgtgtgagactctgaacctcaagtttatggccgaagtcggtacaaacagaggactgttgcccgagcactttttatttctggcgcagaaaatctttaatgacaatagcctgtctatggaggctttccagcacaggagcgtaagttggagccaatttaacaaggaaatcctcctcggtaggggattcacgttttggcagtggttcgacggcgttctcgatctgacaaagcgctgtctgcgctcctactggagcgatagactgattatcggcttcatttctaaacaatacgtgacatcattactgctaaacgagcccgatggtacattcctgcttcggtttagtgattcagagattggcggtataaccattgcccatgtaatcagggggcaggacggcagcccgcagattgaaaacattcagccatttagcgcaaaggacctgagcatacgaagcctgggtgacaggattcgcgacctcgcccagctcaagaatttataccctaaaaagccaaaagacgaggctttccgctcgcattacaaacctgaacaaatgggcaaagatggtaggggatacgtaccggccacaattaaaatgactgtggagcgggatcagcctctgccaaccccggaactgcagatgcctaccatggttcccagttacgaccttggcatggctcccgattcatctatgagtatgcagttggggcccgatatggtgccacaggtttatccgcctcactcacacagcatccccccttatcagggtctgtctccagaagagtctgtgaacgtgctgagtgcttttcaagagcctcatcttcagatgcccccgtctctgggtcaaatgagcctacccttcgaccagccacacccgcaagggctgttgccttgtcagcctcaagaacatgcggtcagtagccctgaccctcttctgtgcagtgatgtgacaatggtggaagactcatgcttatcacagcctgtgacagcatttccgcaagggacttggatcggagaagacatcttcccccctcttctcccccctactgagcaagatcttactaaattactgctcgagggacagggcgaatccggtggagggtcattgggtgcccagcctttgttgcagccctcacattacggacagtccgggatcagcatgtcacatatggatcttcgggcaaacccttcttggtag

SEQ ID NO: 292768 - DNA, 2214 bp, Artificial Sequence
  derived and/or modified sequence
atggagcagttcaggcatctccctatgccctttcactggaagcaggaagagcttaagtttaaaacaggattaaggcgtctccagcatagggtaggcgaaattcatctcctccgggaggctttacagaagggagcggaggccggtcaggtgtcactccattccctgattgagactcctgccaatggaacaggccccagcgaggcattggcgatgttactacaggaaacaacaggcgaactcgaggccgcgaaagcattggtgctgaagcgcatccagatctggaaacgacaacagcagctcgctggcaatggcgctcccttcgaggagagcttggcccctctccaggagaggtgcgagagcctggtcgacatttatagccagttgcagcaggaggtgggagcagctggcggggagctggaaccaaaaacacgagccagtctgacaggaagactcgatgaagttcttagaactctcgtgacttcctgttttcttgttgagaagcagccaccacaggtacttaaaacccagacgaaattccaggcaggtgttagattcctcctaggcctcaggtttctcggggccccagccaagccacctctggtgcgtgctgatatggtgacagaaaaacaagccagagagctgagtgttccacagggaccaggcgctggcgcggaatcgacaggagagattatcaacaacaccgtacctcttgagaacagcatcccagggaactgctgctccgctttattcaagaatctgctgttaaagaaaatcaaacggtgtgaacggaaaggtacagagagcgtgaccgaggagaaatgtgcagttctgttttcggcaagctttacacttggtccaggaaagctgccaatccaactgcaagccctcagtcttcccctcgtcgtgattgtgcacgggaatcaggataacaatgctaaggccacaatactgtgggataacgctttcagtgagatggaccgggttccatttgtcgtggctgagagagtcccttgggaaaagatgtgtgagactcttaacctgaaatttatggccgaggtcggaacgaataggggcctcctgcctgaacatttcctcttcctggcccagaagatcttcaatgacaactccttgtccatggaggcctttcagcatcggagcgtctcatggtctcaatttaacaaggagatcctgcttggtcgcggattcacattctggcagtggtttgatggtgtacttgacctgacgaaaaggtgtctccgaagttattggtctgacaggctgattatcggttttatctcaaaacaatacgttacatcattattacttaacgagcctgacggtactttccttctacgcttcagtgactccgaaatcggggggataaccatcgcccacgtgatccgaggccaggacggtagcccccaaatcgagaatatccagcccttctctgcaaaggacctgtctatccggtcactaggcgataggatacgcgacttagctcagctgaaaaacctatatcctaaaaagcctaaggatgaggccttcagatctcactacaaaccagaacagatgggaaaggatggccgggggtacgtcccagccaccatcaagatgacagtggaacgggaccagcccctgcctaccccggagctacagatgccaaccatggtgccctcttatgacttgggtatggcccccgatagctccatgagcatgcagctgggcccagatatggtgccccaggtgtacccgccccattctcactcaatccccccgtaccagggactgtctcccgaagagtccgtgaatgtgttaagtgctttccaagaaccacatctgcagatgcctccaagtcttggacagatgtctctgcccttcgaccagccacaccctcaaggcctgcttccttgtcaacctcaggagcatgccgtgagcagccctgaccccctcctgtgttctgatgtgactatggtcgaggactcttgtcttagtcagccagtgacggccttcccccagggcacctggataggcgaagacatattcccccccctgctacccccgacggagcaggacttaaccaaattgctcttggaaggacagggcgaatcgggtgggggatctctgggagcacagccactgctacaaccttcacactatggacagtccggcatctcgatgagtcacatggacctacgggccaatcctagttggtag

SEQ ID NO: 292769 - DNA, 2214 bp, Artificial Sequence
  derived and/or modified sequence
atggaacagtttaggcacctccctatgcctttccattggaagcaggaagagcttaaattcaagacagggcttcggcggctgcaacatcgagtaggagagatccacctgttgcgtgaagcacttcagaagggagcggaggccggccaggtgagcctgcacagtctgattgagacccctgcgaacggtacgggaccgagtgaagctctggcaatgctattgcaagaaacaacaggggagctggaggcagccaaagccttggtcctgaaaagaatccagatctggaagcggcaacagcagctggctggtaatggagccccatttgaggagagccttgcgccgctacaggaacggtgtgaatcgctggttgatatctattcccagctgcaacaggaagtcggggctgcaggaggagagctggaaccaaagaccagggcctcactcaccggccgcttggacgaagtgctgcggaccctggttacatcttgcttcctggtcgagaagcagccaccgcaagtgttaaaaacacaaaccaaattccaagccggcgtgagatttttgctgggattaagattcctgggagcccctgccaaaccccccctcgtgcgtgctgacatggtcacggaaaaacaggctcgggaactgtctgtaccccagggaccaggcgcgggagctgaaagcaccggcgagattatcaacaacacggtgcctctggaaaactctattccgggtaattgttgctcagccctttttaagaacctcctgctgaagaaaattaagcggtgcgagagaaaggggacagaaagtgtgacagaagagaagtgcgctgtgctgttctccgcttcttttaccttggggccgggcaaactgccaatacaattacaggcattaagcttaccactggtcgttattgtgcacggcaaccaggataacaatgctaaggccaccatcttgtgggacaacgcgttcagtgaaatggatagagtacccttcgtggtggcagagcgggtcccatgggagaagatgtgtgaaacactgaacctgaagtttatggcagaggtgggaaccaatagaggtcttcttcccgagcacttcctgtttctggcacagaaaatcttcaacgacaattcgctgagcatggaggcttttcagcatcggtccgtcagctggtcccagttcaacaaagagatcttattgggaagaggcttcaccttctggcagtggttcgatggagttctggatcttaccaagcgatgtttgcgaagttattggagcgacaggctgatcatcgggtttattagcaaacagtatgtgacttccctgctgctgaacgaacccgatggtacgttcttactaagattttccgactctgagattggcggtatcactatcgcccacgtcattcgggggcaggacgggagtcctcagatagagaatatacaaccgttttccgctaaagacctgagcattaggagtcttggtgatcgcataagagatctcgcacagctgaagaacctctatcccaaaaagcccaaggatgaagcctttagaagccactataagcccgaacagatgggtaaggacggccgggggtacgtccctgctactataaagatgacggttgagagggatcagcctctgccaactcctgaactccagatgccaactatggtccccagttacgacctcggaatggcccccgatagttccatgagcatgcagcttggcccagacatggtaccgcaggtataccccccccattcacacagcatccccccctaccagggcttgtctcctgaggaaagtgtgaatgtcctgtcagcttttcaggagccccatctccaaatgccccctagtttagggcagatgagtctgcccttcgatcagcctcaccctcagggcctcttaccatgtcagcctcaagagcatgccgtgagcagcccagatccactcctttgctccgacgtcaccatggttgaggactcatgcctgtctcagccagtgaccgcctttccccagggtacttggattggcgaagatatcttccccccgcttcttccacctacggaacaggatcttaccaaacttctgttagagggccagggagaatcaggagggggatccctgggagctcagccgctcctgcaaccttcacattacggccagagtggcatatccatgtcccacatggaccttagggccaatccaagctggtag

SEQ ID NO: 292770 - DNA, 2214 bp, Artificial Sequence
  derived and/or modified sequence
atggagcagtttcgccacctcccaatgccctttcattggaagcaagaagagctgaagtttaagaccggtttaagaaggctacaacaccgtgtgggcgagatacacctccttcgagaagccttgcagaagggagccgaagcaggccaggtaagcctccactctctgatcgaaacccctgcaaacgggactggtccttcagaagccttggcaatgcttctgcaggaaaccacaggagaactggaagcagctaaggccttagtgctgaagcggattcaaatttggaagcgacagcagcagcttgccggtaatggtgccccgttcgaagaaagcctggcccccctccaagagcgctgtgaaagcttggtggacatttattcccaactacagcaggaagtcggggccgcaggaggcgagctcgagcctaagacgcgggcctctctcactggcaggttggatgaagtgctgaggaccctggtgacatcctgtttcttggtggagaagcagccccctcaggttttgaagactcagacaaagtttcaggccggtgtgcggtttttgctgggcctgaggttcctcggcgctccagctaaacctcctctcgtgcgggctgacatggttacagaaaagcaggctagggagttatccgtgccacaggggccaggcgccggtgctgagtctaccggggagatcatcaacaacaccgtgccactggaaaattcaatcccgggaaattgctgctcagccctgtttaagaatctgctacttaaaaagataaaacgctgtgaacggaaaggaacagagtccgtgacagaggagaagtgcgctgttctatttagtgcatctttcacactgggacctggcaagttgccgattcagctgcaagctttgagccttcccctggtggtcatcgtgcacggcaatcaggacaacaatgctaaggctactatactttgggataatgcattcagcgagatggaccgagtgcccttcgttgtggccgagcgagtgccttgggaaaagatgtgcgagacactgaacctcaaatttatggccgaggtcggtaccaacagagggttactacctgagcattttctcttcctggcccaaaagatctttaatgataattccttatccatggaggcctttcagcaccgatccgtgagctggtctcagttcaacaaagaaatcctcttagggagggggttcactttctggcagtggttcgacggcgtgttagatctgactaaacgctgcttgcgatcctattggtcagaccgcctcatcatcggatttatcagtaagcagtacgttaccagcttactcctgaatgagccagatggaacttttttattacgtttctccgattccgagatcggtgggattacaattgcccacgtcatacggggtcaagatggatcaccccagatagaaaatatacaacccttctctgccaaagacctgtccataaggtccctgggcgaccgaatccgcgatttggcccagttgaaaaatttatatccaaagaagccgaaggatgaggccttccggtctcactataagcctgagcagatgggtaaagacggtcgtggttatgtcccagctactatcaaaatgacagtggaacgcgatcagcctttaccgacccctgagctccaaatgccaacgatggtgccgagctacgacctggggatggcccccgatagttcgatgtccatgcagcttggcccagatatggtaccacaggtgtaccccccgcatagccactcgattcctccttaccagggcctgagtcccgaagagagcgtcaatgtgctgagcgctttccaggaacctcacctccagatgcccccaagtctaggacagatgtcattaccctttgaccagcctcacccacaggggctgctgccctgccagccacaggagcacgccgtcagctctcccgatcccctgctctgctccgacgtcacgatggttgaggattcctgtttgagtcagccagtgactgccttcccacagggcacctggataggcgaggacatcttcccaccactcctgccccctacagaacaggatcttactaagctactcttagaaggacaaggagagagcggcggaggttctttgggcgctcagcctttactccagcccagccattacggtcagagcggaatctcaatgtcccatatggatctccgggcaaacccgagctggtag

SEQ ID NO: 292771 - DNA, 2040 bp, Artificial Sequence
  derived and/or modified sequence
atgagtctttggggcctggtctccaagatgcctcctgagaaagtacagaggctctacgtggatttccctcagcatctgagacacctcttgggcgattggctcgaatcccagccatgggagttccttgtggggtccgacgctttctgttgcaaccttgctagtgccctgctgtctgatacagtgcaacacctgcaagctagcgtgggggagcaaggcgaaggcagtactatcctgcagcatatctccacactggaatcaatctatcagagggaccccctgaaattggtggcaacgttcaggcaaatactgcaaggagaaaagaaggccgtcatggagcagtttaggcatctgcctatgcccttccattggaagcaggaggagctgaagttcaagaccggactacggaggcttcaacaccgtgttggcgagatacatttgcttcgcgaggctttgcagaaaggagccgaggcaggccaggtaagtcttcatagcctcattgagaccccagccaatggaacgggaccctctgaggcactggcaatgctgctgcaggaaacgacgggcgaactggaggcagccaaagcgctagttttaaagcgcatccagatttggaagcgccagcagcagctggctggaaacggcgcaccattcgaagagtctttagctcccctgcaggagcgatgcgaaagtttggtcgacatctacagtcagttacaacaggaggtaggggcagccgggggagagttggaacctaagacgagagcctctttgacaggtagactcgacgaagtactgcgcactttagtgacatcctgcttcttggtagagaagcagcccccgcaggtgctcaagacacaaacaaagttccaggctggggtaaggttcctcttggggctaaggtttctcggcgctcctgccaaaccacccctggtgcgagctgacatggtgacagagaaacaagcccgcgaactctctgtgccccagggtccaggtgcaggtgccgagagtacgggggaaattatcaacaacacagtgccacttgagaattccattccaggtaattgttgttccgcgcttttcaagaatctgctgctcaaaaagataaagcggtgcgaacggaaaggcaccgaatcagtgacagaagagaagtgcgccgttctgttctccgcgtccttcacactcgggcctggcaaactgcctattcagctccaggctctcagcctgccactcgtggtcatagtccatggcaaccaggataacaatgcaaaagccacaatactctgggataacgcttttagcgagatggaccgcgtcccatttgtggtcgctgaaagagtaccatgggagaagatgtgtgagactctgaatctgaagtttatggctgaagtgggtacaaaccgggggctgttgcctgaacacttcctcttcctggcccagaagatttttaatgacaactccctgagcatggaagctttccagcatcggagtgtctcctggagccagttcaacaaagagatcttgctaggccgcgggtttacattttggcaatggtttgacggtgtcctggatctaaccaaacgatgcctcagatcctattggtccgataggcttatcataggtttcatatctaagcagtatgtaactagtctgctcctcaacgaaccagacgggaccttcctgctgcggttctccgactccgagatcggaggcattaccattgcccatgtcattaggggccaggatggtagccctcagatagagaatatccagcccttttccgccaaggacttatctataagaagcttaggcgatcgtatacgggatctcgcccagctgaagaacctgtaccccaagaaacctaaagatgaagcttttcgctcccattataagcccgaacagatggggaaagatggtcgaggatatgtgcctgcgactattaaaatgaccgtggagagggatcaacctcttcccacgcccgaattgcaaatgcctaccatggtcccatcctatgacctgggtatggctctgatccccccttag

SEQ ID NO: 292772 - DNA, 2193 bp, Artificial Sequence
  derived and/or modified sequence
atggagcagttccgacatctgccaatgcctttccattggaaacaggaagagttgaagttcaaaaccggactcaggaggctacagcacagagtgggagaaattcaccttcttcgagaggctcttcagaagggcgccgaggctggccaggtctctctccacagtctaatcgagactcctgccaatgggacggggccttccgaagctctggccatgctgctgcaagaaaccacgggagagctggaagctgcaaaggctctggtgttaaagaggattcagatatggaaaagacagcagcaactggccggcaatggcgcaccattcgaagagtcattggccccattgcaagagcgctgcgaatccctagtggacatctactcacagttgcagcaggaggtgggggcagccggcggagaactggagccaaagacgagagcgtctttaaccgggaggcttgacgaggtactccggacactcgtgacaagctgtttcttggtggaaaagcagcctccacaggtgttgaagactcaaactaaattccaggctggtgtgcggttccttctcggcttgcgtttcctgggggcacctgcgaagccaccactggtgagggccgatatggtgacagaaaagcaggctagggagctaagcgtcccgcagggacctggggccggggcggaaagtacaggggagataattaacaacacggtccctttggagaactctatacctggcaactgctgctcagccctgttcaaaaatttgctgctaaagaagatcaaacggtgcgagcgcaaaggcactgagagcgttactgaggagaaatgcgctgttctcttctccgcttctttcactctcgggcccggaaagcttccgatccagctgcaggccttgagtctacctctcgtggtcatagtacacggtaaccaggacaacaacgccaaagccacaatcctgtgggacaatgctttcagtgagatggatagggtgcccttcgtggtggccgagcgggtgccttgggagaaaatgtgtgagacgctgaacctcaagttcatggccgaagttggcacgaaccggggactgctgccagagcattttctgttcctggcacagaaaatcttcaatgataatagcctgtcaatggaggcttttcagcaccggtcagtgtcatggtcccagttcaataaagagatcctcctgggaagaggtttcacattctggcagtggttcgacggtgtcttagatctgacaaagcgttgtctccgttcctattggtcggacagattaattatcggcttcatctcaaagcagtacgtgacatcactcctgttaaacgaaccagacggcacttttctcctccgtttttcagattcagaaattggaggcatcaccatcgcacatgtgataaggggccaggacggctctcctcaaatcgaaaacattcagcccttctctgccaaagatttgagtattagaagcctcggggatagaattagagatctcgctcagcttaagaatttataccccaagaagcctaaagatgaagccttccgcagtcactataagcctgagcagatggggaaggatgggcgggggtatgtgccagccaccattaaaatgactgttgaaagagaccagcccctgcctaccccagaactgcagatgcccacaatggtcccttcctacgatctgggaatggctcctgattctagtatgtcaatgcaactcggacctgacatggtaccgcaggtgtatcctccccatagccactcaatccctccctatcagggactctcaccagaagaaagcgtaaacgttctgtccgccttccaggagcctcatttgcagatgccccccagtctaggtcagatgtcactccccttcgaccagccccatccccagggacttctgccatgtcagcctcaggagcacgcagtgagtagtccagaccccctgttgtgttcagatgttaccatggtggaagacagttgccttagccagcccgttactgcttttccccaaggaacctggattggcgaagacatttttccacctttactcccccccacagaacaggaccttacgaagttactgttggaaggacagggtgaaagcgggggcgggtctctgggtcactcacctagttgttcaccaccgactatgggaaatttggggtctcaatgtcccacatggacttag

SEQ ID NO: 292773 - DNA, 2544 bp, Artificial Sequence
  derived and/or modified sequence
atgagcctgtggggtctggtttctaagatgccacccgagaaggtacaaagactatatgtcgactttccccagcacttgagacacctgttaggagattggttagaatcccagccctgggagtttttggtgggttctgatgccttctgctgcaatctggcctctgctctgctttcggataccgttcagcatctccaggcttcagtgggagaacagggggaaggcagcaccatattgcaacatattagtacactcgagagcatctaccaaagagaccccctcaaactggtagctacttttcgccaaattctccaaggggagaaaaaggccgtgatggaacaattccgccatctgcctatgcccttccattggaaacaggaagaacttaaattcaagactgggctgaggaggctgcagcatagagtgggggagatacatttgctgcgtgaagccttacagaaaggcgctgaggctgggcaggtgtctttacattctctcattgagacgcctgctaatggcactggcccctccgaggcactggccatgctgctgcaggagacaaccggagagcttgaagcggctaaggcactagtgttgaagcggatccagatctggaaacggcagcagcagctcgcagggaacggggctccttttgaagaaagtctagcaccattacaggagaggtgtgagtcactcgttgatatttactcccaactccagcaagaagtcggcgcggccgggggagagctcgaacccaaaacccgggcctccctcactggacgactggacgaggtactccgcacgctcgtgacttcgtgcttcctggtcgagaagcagccaccccaggtgttaaagacacagaccaagttccaggccggagttaggtttttgctgggactcagattcctgggcgcaccagcaaagccgccattagttcgcgctgatatggttacagaaaagcaggcacgggaacttagcgtgccccaagggcccggggccggcgccgagtctacaggcgagataattaacaacactgtccctctcgagaattcaatccccgggaattgttgctctgctctgttcaagaacctcctgctcaagaaaattaaacgttgcgaacgcaaggggactgaatctgttactgaggaaaaatgcgctgtgctcttttctgcgagctttacgttaggacccgggaaactacccattcagttgcaggcactcagtctgccccttgtggtgatcgttcacggaaatcaggataataatgccaaggctaccattctatgggacaacgctttctcagaaatggatagggtgcctttcgttgtcgcagagcgcgtgccatgggagaaaatgtgcgaaacccttaacttgaagttcatggctgaagttggaactaatcgggggctccttccggaacactttttgttccttgcgcagaaaattttcaacgacaatagcctcagcatggaggcgtttcagcataggagtgttagctggtctcagttcaacaaggaaatcctcctcggtagaggctttacattctggcagtggttcgacggagttctggacctgaccaagagatgccttaggtcctactggtcagatcgcctgatcattggctttatctccaagcagtatgtcacttctcttctcctcaatgagccggatggcaccttccttctgaggtttagcgactcagagatcggcggaattactattgctcacgttattaggggtcaggacgggtctcctcagatcgagaatatccaaccatttagtgctaaagatctgtccattcggagcctcggagaccgtattagggacctagcccagctgaagaatctgtaccctaagaagcccaaagatgaggcattcagaagccattacaagccggagcaaatgggaaaggacggacgaggttatgtgccggcaaccataaagatgaccgtggagcgggaccagcctttaccaacccctgaactgcagatgcccacgatggtgccatcctacgacctgggaatggcccccgactcatctatgagcatgcagctaggacctgacatggttccacaagtgtacccaccccacagtcattctattcccccctatcagggcctctctccagaagagtccgttaatgttctgagtgccttccaagagcctcacttacagatgcccccatccctcgggcagatgagcctcccttttgaccagccacacccacaggggcttctgccctgccaacctcaggagcacgcagtgtcctcccccgaccctctgttatgcagcgacgtcacaatggttgaagattcctgtctctcacagccggtgactgccttcccccagggcacttggatcggtgaagacatatttccccccctgctacccccaacagagcaagatctgaccaaactgctcctggaaggccagggcgagagcgggggaggatctctcggtgcacagcctttgctgcaaccaagtcattacggccagtctggcatctccatgtcacatatggatcttagggctaacccgagttggtag

SEQ ID NO: 292774 - DNA, 195 bp, Artificial Sequence
  derived and/or modified sequence
atgagcctctggggcctagtttcaaaaatgccacctgaaaaggtgcagcgcctttatgtcgattttccccaacacctcaggcacctgcttggtgattggctagagtcacaaccatgggaattcttggttggtagtgacgccttttgctgcaatctcgcaagtgccctattgagcgacacggtccaacatctgtag

SEQ ID NO: 292775 - DNA, 435 bp, Artificial Sequence
  derived and/or modified sequence
atgtctctctgggggctggtgtcaaaaatgcctccagagaaggtgcaacgcctctacgttgacttcccgcagcaccttcgccatctactgggcgactggctggagagccagccctgggaattcctggttggtagcgacgccttctgctgcaacctcgcttccgccttattaagcgacacagtgcagcatctccaggcttcagttggggaacagggggagggttccactattctgcagcacatcagcaccctggagagcatctaccagcgagacccattaaaactggttgctacctttaggcagatccttcaaggagaaaagaaagctgttatggaacagtttcgacatctaccaatgccattccactggaaacaggaggagctgaagtttaaaacaggactccggagacttcagcacagagtgggagaaatttag

SEQ ID NO: 292776 - DNA, 465 bp, Artificial Sequence
  derived and/or modified sequence
atgtccctttggggactggtgagcaaaatgccccccgagaaagttcagcgtctttacgtagacttcccccagcacctgagacatttactgggagactggctagaaagtcagccatgggaattcctagttgggagtgacgcattttgctgcaacctcgcctcagctctgctgagtgacacggttcagcatctccaagccagtgtgggtgagcagggagaaggtagcacaatcctccagcacataagcacgctcgaatctatttaccagcgcgatcctctgaaactagtggccacctttcggcagattttacagggcgagaaaaaagccgtgatggaacaattccggcatttacctatgcctttccactggaagcaggaggaactaaaattcaaaacaggcctgcgtagacttcagcatcgagtgggcgaaatccatctcctgagggaagctctgcaaaaaggatag

SEQ ID NO: 292777 - DNA, 318 bp, Artificial Sequence
  derived and/or modified sequence
atgagcctgtggggccttgtctccaagatgccccccgagaaggtccagcgcctctatgtcgattttccacagcatctcagacacctgttaggggattggctggagagccaaccctgggagttcctcgttggatcagacgctttctgctgcaacttagccagcgcactactctcagataccgtccagcatctgcaggcctcggttggtgaacagggagaaggctccaccatcctgcagcacatcagcaccttggaatccatctatcagagggacccactcaaacttgtagccacgtttcgccagattctccaggggtag

SEQ ID NO: 292778 - DNA, 312 bp, Artificial Sequence
  derived and/or modified sequence
atgtccctttggggtttagtgtctaaaatgccccctgagaaagtgcagcgattgtatgtagacttcccgcagcacctgcgacacctactgggagactggctcgagtcccagccctgggagtttctggtaggctctgacgcattttgctgcaacctggcgagtgccctgctctccgacaccgtacagcatctgcaagccagcgtgggcgagcaaggtgagggctctactatcctgcagcatatttctaccttggagagcatctatcagagggaccctctgaagctggtggccacgttccggcagatcctgtag

SEQ ID NO: 292779 - DNA, 480 bp, Artificial Sequence
  derived and/or modified sequence
atgtctctgtggggcttggtgagtaaaatgccaccagaaaaggtgcagcgtctctacgtcgacttcccacagcaccttcggcatcttctgggcgactggctagagtcccagccatgggagttcctggtggggtctgatgcattttgctgcaatctggcatcagcactgttgtctgatacagtacagcacttacaggctagtgtgggcgaacagggagaaggatccaccatcctccagcacatctctacactggagtctatctaccagcgcgacccactgaagctggttgctacctttagacaaatattacagggcgaaaaaaaggcagtgatggagcagttcaggcacttgccgatgccttttcactggaagcaggaagaattgaagtttaaaaccggcctacggaggctgcagcaccgtgtcggggagattcacctgctacgggaggctctgcagaaaggggctgaggcggggcagtag

SEQ ID NO: 292780 - DNA, 2544 bp, Artificial Sequence
  derived and/or modified sequence
atgagcctgtggggcctcgtatctaaaatgcctcccgagaaggtgcagcgcctgtacgtggactttccccaacacttaagacatctcttgggggattggctcgagagccaaccttgggagtttctggtgggctccgacgcattttgctgcaacttggcaagcgctctgctatcagacactgtgcagcatctgcaggccagcgttggcgagcagggggaaggtagtaccatccttcagcacatctccactctggagtctatatatcagagagaccctctcaagctagtggccacatttaggcaaatcctgcagggggaaaaaaaggcagtcatggagcagttccggcaccttcccatgccattccattggaagcaggaggagctgaagttcaagactggactaagacggctgcagcacagggtgggagaaatccatttgcttagggaggccctacaaaagggagccgaagctggccaggtctccctgcacagcctaattgaaacccccgccaatggcaccggaccatccgaggcactggccatgctgctccaggagacaacaggggaactggaagccgcaaaggccttggtgctgaaacgaattcagatttggaaaaggcaacagcaactcgctggaaacggcgctccatttgaagaaagcctggccccactgcaggagagatgcgaatctctggtcgatatctatagccaactgcaacaagaggtgggcgccgctggcggcgagttggaaccaaagacccgggccagtctgaccggcagactggacgaggtccttcgaactctcgtcacttcttgtttcctggtggagaagcagccgccacaggtgctgaaaacccagacgaaattccaggcaggagtcagattcctgctcggccttagattcttaggagcccccgccaagccacctctggtacgcgccgatatggtcaccgagaagcaagcccgcgagctatcagttccccagggcccaggcgctggtgccgaaagtacaggcgaaattattaacaacaccgtcccccttgagaatagtattcctggaaattgttgctccgctctgttcaagaatctcctgttgaaaaagatcaaaaggtgcgagaggaagggaactgaaagcgtaacagaagagaagtgtgccgtcctgttcagtgcaagtttcactctgggccctggaaaactcccaatccagctacaggccctttctctccctttagtcgttattgttcacggcaaccaggacaacaatgccaaagcaaccatcttgtgggacaacgcattttcagaaatggatcgcgtgccctttgttgtggctgaaagggtgccctgggagaagatgtgcgagactttgaatttaaaatttatggctgaggtgggaacgaaccgcgggctgctccccgaacactttctctttttggctcagaagattttcaacgataatagtctgtccatggaagcttttcagcatcgctctgttagctggagccagtttaataaggaaattctgctgggccgcggcttcacgttctggcagtggttcgatggtgtgctggatcttaccaaaagatgcctccggtcttattggtcagacaggctcataatcgggtttatctccaagcagtatgtgacatctctcctcctaaatgaaccagacggaacttttctgctgcgtttctctgacagcgagatagggggcatcaccatagcccacgttatcagaggccaggatggaagccctcagatagaaaatatacagcctttttctgccaaggaccttagcatcaggagcctgggggatcgcatccgggacttggcccagttaaaaaatttgtatccaaagaaacctaaagatgaggctttcaggtcccactacaagcctgagcagatgggcaaagacggccggggttacgttcctgccactatcaaaatgacggtggaaagggatcagcccctgccgactccagagctgcagatgcccacaatggtaccaagctatgatttggggatggcgccggactccagtatgtccatgcagcttggccctgatatggttccccaggtgtaccccccacactctcactcaattcctccttaccagggactgtcgcctgaagaaagtgttaatgtgctgtccgccttccaggagccccatcttcagatgcctccttctctgggccagatgtctttaccattcgaccaacctcaccctcaaggtctgctgccttgtcagcctcaggaacacgccgtcagctctccggaccccttgttgtgttcagacgtgactatggtggaggattcttgcttgagtcaaccggtgaccgcctttccacagggcacgtggataggtgaggacatcttcccacccctgctaccaccaacagagcaggatctaacaaagttactgctggaggggcagggcgagtccggcgggggcagtcttggagctcagccactgctgcagccctcccattacggtcagtcagggatcagcatgagccacatggacctgcgggctaatccgtcttggtag

SEQ ID NO: 292781 - DNA, 225 bp, Artificial Sequence
  derived and/or modified sequence
atgagcttatggggtctcgtgtcaaaaatgcctcccgaaaaggtccagcggctctacgtggactttcctcaacatcttagacatctgctgggggactggcttgaatcccagccatgggaattcctcgtcgggtccgatgccttctgctgtaacttagcctcagcattgctgtcagacacagtccagcatctccaggctagcgtcggagagcagggcgagggctag

SEQ ID NO: 292782 - DNA, 2544 bp, Artificial Sequence
  derived and/or modified sequence
atgagcctgtggggcctggtgtccaagatgcctcctgagaaggtgcagaggctgtatgtggacttcccccagcacctgcggcacctgctgggggactggctggagagccagccctgggagttcctggtgggcagtgatgccttctgctgcaacctggccagcgccctgctgagtgacacagtgcagcacctgcaggcctctgtgggggagcagggcgagggcagcaccatcctgcagcacatcagcaccctggagagcatctaccagagggaccccctgaagctggtggccaccttccggcagatcctgcagggcgagaagaaggctgtgatggagcagttccgccacctgcccatgcccttccactggaagcaggaggagctgaagttcaagacaggcctgcggcggctgcagcaccgggtgggggagatccacctgctgcgggaggccctgcagaagggagctgaggccggccaggtgtccctgcacagcctcatcgagaccccagccaatggaacaggccccagcgaggccctggccatgctgctgcaggagaccactggagagctggaggccgccaaggccctggtgctgaagaggatccagatctggaagaggcagcagcagctggccggaaatggagccccctttgaggagagcctggcccccctgcaggagcgctgtgagagcctggtggacatctacagccagctgcagcaggaggtgggcgctgctggaggagagctggagcccaagacccgggccagcctgaccggccgcctggatgaggtgctgcggaccctggtgaccagctgcttcctggtggagaagcagcccccccaggtgctgaagacccagaccaagttccaggccggcgtgcgcttcctgctgggcctgcgcttcctgggcgccccagccaagccacccctggtgcgggctgacatggtgacagagaagcaggcccgggagctgtctgtgccccagggccctggggccggggctgagagcactggagagatcatcaacaacacagtgcccctggagaacagcatccctggcaactgctgcagcgccctcttcaagaacctgctgctgaagaagatcaagagatgtgagaggaagggcacagagagcgtgacagaggagaagtgtgctgtgctcttcagcgccagcttcaccctgggccctgggaagctgcccatccagctgcaggccctgagcctgcccctggtggtgattgtgcacggcaaccaggacaacaatgccaaggccaccatcctgtgggacaatgccttcagcgagatggacagagtgccctttgtggtggccgagcgggtgccctgggagaagatgtgtgagaccctgaacctgaagttcatggccgaggtgggcaccaacagaggcctgctgcctgagcacttcctgttcctggcccagaagatcttcaatgacaacagcctgtccatggaggccttccagcacaggtctgtgtcctggagccagttcaacaaggagatcctgctgggccggggcttcaccttctggcagtggtttgatggagtgctggacctgaccaagcgctgcctgcggagctactggagcgacaggctcatcatcggcttcatcagcaagcagtatgtgaccagcctgctgctgaatgaaccagatggcaccttcctgctgcgcttcagtgacagcgagatcggcggcatcaccatcgcccacgtgatccggggccaggacggcagcccccagatcgagaacatccagcccttcagcgccaaggacctgagcatccgcagcctgggggaccgcatccgggacctggcccagctgaagaacctgtaccccaagaagcccaaggatgaggccttccgcagccactacaagccagagcagatgggcaaggatggccggggctacgtgcctgccaccatcaagatgacagtggagcgggaccagcccctgcccaccccagagctgcagatgcccaccatggtgcccagctatgacctgggcatggccccagacagctccatgtccatgcagctgggccctgacatggtgccccaggtgtacccaccccacagccacagcatccccccctaccagggcctgagccctgaggagagcgtgaatgtgctgagcgccttccaggagccccacctgcagatgccacccagcctgggccagatgagcctgccctttgaccagccccacccccagggcctgctgccctgccagccccaggagcacgctgtgagcagcccagaccccctgctgtgcagtgatgtgaccatggtggaggacagctgcctgagccagcctgtgacagccttcccccagggcacctggattggagaggacatcttcccccccctgctgcccccaacagagcaggacctgaccaagctgctgctggagggccagggcgagagcggcggcggcagcctgggcgcccagcccctgctgcagcccagccactacggccagagcggcatctccatgagccacatggacctgcgggccaaccccagctggtag

SEQ ID NO: 292783 - DNA, 2214 bp, Artificial Sequence
  derived and/or modified sequence
atggagcagttccgccacctgcccatgcccttccactggaagcaggaggagctgaagttcaagacaggcctgcggcggctgcagcaccgggtgggggagatccacctgctgcgggaggccctgcagaagggagctgaggccggccaggtgtccctgcacagcctcatcgagaccccagccaatggaacaggccccagcgaggccctggccatgctgctgcaggagaccactggagagctggaggccgccaaggccctggtgctgaagaggatccagatctggaagaggcagcagcagctggccggaaatggagccccctttgaggagagcctggcccccctgcaggagcgctgtgagagcctggtggacatctacagccagctgcagcaggaggtgggcgctgctggaggagagctggagcccaagacccgggccagcctgaccggccgcctggatgaggtgctgcggaccctggtgaccagctgcttcctggtggagaagcagcccccccaggtgctgaagacccagaccaagttccaggccggcgtgcgcttcctgctgggcctgcgcttcctgggcgccccagccaagccacccctggtgcgggctgacatggtgacagagaagcaggcccgggagctgtctgtgccccagggccctggggccggggctgagagcactggagagatcatcaacaacacagtgcccctggagaacagcatccctggcaactgctgcagcgccctcttcaagaacctgctgctgaagaagatcaagagatgtgagaggaagggcacagagagcgtgacagaggagaagtgtgctgtgctcttcagcgccagcttcaccctgggccctgggaagctgcccatccagctgcaggccctgagcctgcccctggtggtgattgtgcacggcaaccaggacaacaatgccaaggccaccatcctgtgggacaatgccttcagcgagatggacagagtgccctttgtggtggccgagcgggtgccctgggagaagatgtgtgagaccctgaacctgaagttcatggccgaggtgggcaccaacagaggcctgctgcctgagcacttcctgttcctggcccagaagatcttcaatgacaacagcctgtccatggaggccttccagcacaggtctgtgtcctggagccagttcaacaaggagatcctgctgggccggggcttcaccttctggcagtggtttgatggagtgctggacctgaccaagcgctgcctgcggagctactggagcgacaggctcatcatcggcttcatcagcaagcagtatgtgaccagcctgctgctgaatgaaccagatggcaccttcctgctgcgcttcagtgacagcgagatcggcggcatcaccatcgcccacgtgatccggggccaggacggcagcccccagatcgagaacatccagcccttcagcgccaaggacctgagcatccgcagcctgggggaccgcatccgggacctggcccagctgaagaacctgtaccccaagaagcccaaggatgaggccttccgcagccactacaagccagagcagatgggcaaggatggccggggctacgtgcctgccaccatcaagatgacagtggagcgggaccagcccctgcccaccccagagctgcagatgcccaccatggtgcccagctatgacctgggcatggccccagacagctccatgtccatgcagctgggccctgacatggtgccccaggtgtacccaccccacagccacagcatccccccctaccagggcctgagccctgaggagagcgtgaatgtgctgagcgccttccaggagccccacctgcagatgccacccagcctgggccagatgagcctgccctttgaccagccccacccccagggcctgctgccctgccagccccaggagcacgctgtgagcagcccagaccccctgctgtgcagtgatgtgaccatggtggaggacagctgcctgagccagcctgtgacagccttcccccagggcacctggattggagaggacatcttcccccccctgctgcccccaacagagcaggacctgaccaagctgctgctggagggccagggcgagagcggcggcggcagcctgggcgcccagcccctgctgcagcccagccactacggccagagcggcatctccatgagccacatggacctgcgggccaaccccagctggtag

SEQ ID NO: 292784 - DNA, 2040 bp, Artificial Sequence
  derived and/or modified sequence
atgagcctgtggggcctggtgtccaagatgcctcctgagaaggtgcagaggctgtatgtggacttcccccagcacctgcggcacctgctgggggactggctggagagccagccctgggagttcctggtgggcagtgatgccttctgctgcaacctggccagcgccctgctgagtgacacagtgcagcacctgcaggcctctgtgggggagcagggcgagggcagcaccatcctgcagcacatcagcaccctggagagcatctaccagagggaccccctgaagctggtggccaccttccggcagatcctgcagggcgagaagaaggctgtgatggagcagttccgccacctgcccatgcccttccactggaagcaggaggagctgaagttcaagacaggcctgcggcggctgcagcaccgggtgggggagatccacctgctgcgggaggccctgcagaagggagctgaggccggccaggtgtccctgcacagcctcatcgagaccccagccaatggaacaggccccagcgaggccctggccatgctgctgcaggagaccactggagagctggaggccgccaaggccctggtgctgaagaggatccagatctggaagaggcagcagcagctggccggaaatggagccccctttgaggagagcctggcccccctgcaggagcgctgtgagagcctggtggacatctacagccagctgcagcaggaggtgggcgctgctggaggagagctggagcccaagacccgggccagcctgaccggccgcctggatgaggtgctgcggaccctggtgaccagctgcttcctggtggagaagcagcccccccaggtgctgaagacccagaccaagttccaggccggcgtgcgcttcctgctgggcctgcgcttcctgggcgccccagccaagccacccctggtgcgggctgacatggtgacagagaagcaggcccgggagctgtctgtgccccagggccctggggccggggctgagagcactggagagatcatcaacaacacagtgcccctggagaacagcatccctggcaactgctgcagcgccctcttcaagaacctgctgctgaagaagatcaagagatgtgagaggaagggcacagagagcgtgacagaggagaagtgtgctgtgctcttcagcgccagcttcaccctgggccctgggaagctgcccatccagctgcaggccctgagcctgcccctggtggtgattgtgcacggcaaccaggacaacaatgccaaggccaccatcctgtgggacaatgccttcagcgagatggacagagtgccctttgtggtggccgagcgggtgccctgggagaagatgtgtgagaccctgaacctgaagttcatggccgaggtgggcaccaacagaggcctgctgcctgagcacttcctgttcctggcccagaagatcttcaatgacaacagcctgtccatggaggccttccagcacaggtctgtgtcctggagccagttcaacaaggagatcctgctgggccggggcttcaccttctggcagtggtttgatggagtgctggacctgaccaagcgctgcctgcggagctactggagcgacaggctcatcatcggcttcatcagcaagcagtatgtgaccagcctgctgctgaatgaaccagatggcaccttcctgctgcgcttcagtgacagcgagatcggcggcatcaccatcgcccacgtgatccggggccaggacggcagcccccagatcgagaacatccagcccttcagcgccaaggacctgagcatccgcagcctgggggaccgcatccgggacctggcccagctgaagaacctgtaccccaagaagcccaaggatgaggccttccgcagccactacaagccagagcagatgggcaaggatggccggggctacgtgcctgccaccatcaagatgacagtggagcgggaccagcccctgcccaccccagagctgcagatgcccaccatggtgcccagctatgacctgggcatggccctgatccccccatag

SEQ ID NO: 292785 - DNA, 2193 bp, Artificial Sequence
  derived and/or modified sequence
atggagcagttccgccacctgcccatgcccttccactggaagcaggaggagctgaagttcaagacaggcctgcggcggctgcagcaccgggtgggggagatccacctgctgcgggaggccctgcagaagggagctgaggccggccaggtgtccctgcacagcctcatcgagaccccagccaatggaacaggccccagcgaggccctggccatgctgctgcaggagaccactggagagctggaggccgccaaggccctggtgctgaagaggatccagatctggaagaggcagcagcagctggccggaaatggagccccctttgaggagagcctggcccccctgcaggagcgctgtgagagcctggtggacatctacagccagctgcagcaggaggtgggcgctgctggaggagagctggagcccaagacccgggccagcctgaccggccgcctggatgaggtgctgcggaccctggtgaccagctgcttcctggtggagaagcagcccccccaggtgctgaagacccagaccaagttccaggccggcgtgcgcttcctgctgggcctgcgcttcctgggcgccccagccaagccacccctggtgcgggctgacatggtgacagagaagcaggcccgggagctgtctgtgccccagggccctggggccggggctgagagcactggagagatcatcaacaacacagtgcccctggagaacagcatccctggcaactgctgcagcgccctcttcaagaacctgctgctgaagaagatcaagagatgtgagaggaagggcacagagagcgtgacagaggagaagtgtgctgtgctcttcagcgccagcttcaccctgggccctgggaagctgcccatccagctgcaggccctgagcctgcccctggtggtgattgtgcacggcaaccaggacaacaatgccaaggccaccatcctgtgggacaatgccttcagcgagatggacagagtgccctttgtggtggccgagcgggtgccctgggagaagatgtgtgagaccctgaacctgaagttcatggccgaggtgggcaccaacagaggcctgctgcctgagcacttcctgttcctggcccagaagatcttcaatgacaacagcctgtccatggaggccttccagcacaggtctgtgtcctggagccagttcaacaaggagatcctgctgggccggggcttcaccttctggcagtggtttgatggagtgctggacctgaccaagcgctgcctgcggagctactggagcgacaggctcatcatcggcttcatcagcaagcagtatgtgaccagcctgctgctgaatgaaccagatggcaccttcctgctgcgcttcagtgacagcgagatcggcggcatcaccatcgcccacgtgatccggggccaggacggcagcccccagatcgagaacatccagcccttcagcgccaaggacctgagcatccgcagcctgggggaccgcatccgggacctggcccagctgaagaacctgtaccccaagaagcccaaggatgaggccttccgcagccactacaagccagagcagatgggcaaggatggccggggctacgtgcctgccaccatcaagatgacagtggagcgggaccagcccctgcccaccccagagctgcagatgcccaccatggtgcccagctatgacctgggcatggccccagacagctccatgtccatgcagctgggccctgacatggtgccccaggtgtacccaccccacagccacagcatccccccctaccagggcctgagccctgaggagagcgtgaatgtgctgagcgccttccaggagccccacctgcagatgccacccagcctgggccagatgagcctgccctttgaccagccccacccccagggcctgctgccctgccagccccaggagcacgctgtgagcagcccagaccccctgctgtgcagtgatgtgaccatggtggaggacagctgcctgagccagcctgtgacagccttcccccagggcacctggattggagaggacatcttcccccccctgctgcccccaacagagcaggacctgaccaagctgctgctggagggccagggcgagagcggcggcggcagcctgggccacagccccagctgcagcccccccaccatgggcaacctgggcagccagtgccccacctggacctag

SEQ ID NO: 292786 - DNA, 195 bp, Artificial Sequence
  derived and/or modified sequence
atgagcctgtggggcctggtgtccaagatgcctcctgagaaggtgcagaggctgtatgtggacttcccccagcacctgcggcacctgctgggggactggctggagagccagccctgggagttcctggtgggcagtgatgccttctgctgcaacctggccagcgccctgctgagtgacacagtgcagcacctgtag

SEQ ID NO: 292787 - DNA, 435 bp, Artificial Sequence
  derived and/or modified sequence
atgagcctgtggggcctggtgtccaagatgcctcctgagaaggtgcagaggctgtatgtggacttcccccagcacctgcggcacctgctgggggactggctggagagccagccctgggagttcctggtgggcagtgatgccttctgctgcaacctggccagcgccctgctgagtgacacagtgcagcacctgcaggcctctgtgggggagcagggcgagggcagcaccatcctgcagcacatcagcaccctggagagcatctaccagagggaccccctgaagctggtggccaccttccggcagatcctgcagggcgagaagaaggctgtgatggagcagttccgccacctgcccatgcccttccactggaagcaggaggagctgaagttcaagacaggcctgcggcggctgcagcaccgggtgggggagatctag

SEQ ID NO: 292788 - DNA, 465 bp, Artificial Sequence
  derived and/or modified sequence
atgagcctgtggggcctggtgtccaagatgcctcctgagaaggtgcagaggctgtatgtggacttcccccagcacctgcggcacctgctgggggactggctggagagccagccctgggagttcctggtgggcagtgatgccttctgctgcaacctggccagcgccctgctgagtgacacagtgcagcacctgcaggcctctgtgggggagcagggcgagggcagcaccatcctgcagcacatcagcaccctggagagcatctaccagagggaccccctgaagctggtggccaccttccggcagatcctgcagggcgagaagaaggctgtgatggagcagttccgccacctgcccatgcccttccactggaagcaggaggagctgaagttcaagacaggcctgcggcggctgcagcaccgggtgggggagatccacctgctgcgggaggccctgcagaagggctag

SEQ ID NO: 292789 - DNA, 318 bp, Artificial Sequence
  derived and/or modified sequence
atgagcctgtggggcctggtgtccaagatgcctcctgagaaggtgcagaggctgtatgtggacttcccccagcacctgcggcacctgctgggggactggctggagagccagccctgggagttcctggtgggcagtgatgccttctgctgcaacctggccagcgccctgctgagtgacacagtgcagcacctgcaggcctctgtgggggagcagggcgagggcagcaccatcctgcagcacatcagcaccctggagagcatctaccagagggaccccctgaagctggtggccaccttccggcagatcctgcagggctag

SEQ ID NO: 292790 - DNA, 312 bp, Artificial Sequence
  derived and/or modified sequence
atgagcctgtggggcctggtgtccaagatgcctcctgagaaggtgcagaggctgtatgtggacttcccccagcacctgcggcacctgctgggggactggctggagagccagccctgggagttcctggtgggcagtgatgccttctgctgcaacctggccagcgccctgctgagtgacacagtgcagcacctgcaggcctctgtgggggagcagggcgagggcagcaccatcctgcagcacatcagcaccctggagagcatctaccagagggaccccctgaagctggtggccaccttccggcagatcctgtag

SEQ ID NO: 292791 - DNA, 480 bp, Artificial Sequence
  derived and/or modified sequence
atgagcctgtggggcctggtgtccaagatgcctcctgagaaggtgcagaggctgtatgtggacttcccccagcacctgcggcacctgctgggggactggctggagagccagccctgggagttcctggtgggcagtgatgccttctgctgcaacctggccagcgccctgctgagtgacacagtgcagcacctgcaggcctctgtgggggagcagggcgagggcagcaccatcctgcagcacatcagcaccctggagagcatctaccagagggaccccctgaagctggtggccaccttccggcagatcctgcagggcgagaagaaggctgtgatggagcagttccgccacctgcccatgcccttccactggaagcaggaggagctgaagttcaagacaggcctgcggcggctgcagcaccgggtgggggagatccacctgctgcgggaggccctgcagaagggagctgaggccggccagtag

SEQ ID NO: 292792 - DNA, 225 bp, Artificial Sequence
  derived and/or modified sequence
atgagcctgtggggcctggtgtccaagatgcctcctgagaaggtgcagaggctgtatgtggacttcccccagcacctgcggcacctgctgggggactggctggagagccagccctgggagttcctggtgggcagtgatgccttctgctgcaacctggccagcgccctgctgagtgacacagtgcagcacctgcaggcctctgtgggggagcagggcgagggctag

SEQ ID NO: 292793 - DNA, 2544 bp, Artificial Sequence
  derived and/or modified sequence
atgagcctgtggggcctggtgagcaagatgccccccgagaaggtgcaacggttgtatgttgattttccacaacacttgcggcatctgctcggggattggctcgaaagccagccttgggagtttctagttggctcagatgctttttgctgcaacttggcctcggcattgttgtccgacactgtccagcacctgcaagcaagtgtgggcgagcaaggcgagggcagcactatactccagcatatctcgaccctggaaagtatctaccagcgcgatccgctgaagcttgtggcaaccttccggcagatcctgcagggcgaaaagaaggccgtcatggagcagttcaggcatctgccaatgccgtttcactggaagcaggaggagctgaagtttaagacaggcctgcggcggctgcagcacagggttggcgaaatccacttgctacgcgaagccctgcagaaaggagcagaggcaggccaggtgtcactccacagcctgatcgaaaccccggccaacggcacgggcccttctgaggccctggctatgctcctccaggagaccacaggtgagttagaggcggctaaagctcttgtgttgaaacgcattcagatctggaagcgacagcaacagctggctggaaatggcgcaccatttgaagagtctttggccccactgcaggagaggtgtgagtccttggtggacatttattcccaactgcaacaggaggtgggggccgcagggggggagttagaacctaagacgcgcgcaagtctgacaggcagactagacgaagtgctcagaacgctggtcacatcctgcttcctggttgagaaacaaccacctcaagtgttaaagactcagaccaagtttcaggctggtgtaaggttccttctggggctgaggtttctgggagctcctgccaagccccccttagttagggccgatatggtaactgaaaaacaggctagggagctctccgtgcctcagggtcctggcgcgggagcagagtccactggtgaaattattaacaataccgtgcctctcgagaactctattcctggaaactgctgctccgcactctttaagaatcttctgctgaagaagatcaagcgctgcgagaggaagggcaccgagagcgtgactgaggagaaatgtgccgtgctcttttcggcatcctttacactggggccgggaaagctgccaatccagctgcaggctttgtctctgcctctggtggtcattgtgcacggaaaccaggataacaacgctaaagcgactatcctctgggataatgcattttctgagatggatagggtgccctttgtggttgccgagcgtgtcccatgggaaaagatgtgtgaaactctcaaccttaaatttatggctgaggtaggcacaaataggggactcttgcccgaacattttctgttccttgcgcagaagatctttaatgataattctctgtctatggaggcctttcagcatagatccgtttcatggtcgcagttcaacaaggagattttgctggggcgtgggtttactttttggcagtggttcgatggggtcttagatctgacgaaacgatgtttgagaagctattggtcagacaggctgatcatcggatttatttcaaagcagtatgtaacctccttgctccttaacgaacccgacgggacatttctgctccgattctcagattccgaaattggagggataacaattgcccacgtgatcaggggccaggatggaagcccccaaatcgaaaacatacagccgttctccgctaaggacctctctatacggtctcttggggaccgcatcagggatctcgctcagttgaagaatctataccctaagaagccaaaagatgaagcattcaggtcacactataagcctgaacagatggggaaggacggtaggggctacgtccccgctactataaaaatgactgtggaaagggaccagcccctacctacccctgagttacagatgcccacaatggttccaagctatgacctgggcatggcccctgatagcagcatgtctatgcagttgggccctgatatggtaccccaggtctatccccctcatagtcatagtattcccccttaccagggtctatcgcccgaggagtcggtcaatgtcctgtcagctttccaagagcctcacctgcaaatgccccccagcctagggcagatgagcctgccatttgaccagccccaccctcaaggactgttgccttgccaaccacaggagcacgcagtgtcttccccagacccactgctgtgttctgacgtaacaatggtggaagactcatgtctgtctcaaccagttacagctttcccccaaggcacatggatcggagaggacattttcccccccctgctgcctcccacagagcaggacctgacaaaactgctcctggagggccagggagaaagtggcggaggcagcctgggggctcagccactgcttcagccatcacactatggccagagcggcataagtatgagccacatggacctgagggctaacccgagctggtag

SEQ ID NO: 292794 - DNA, 2544 bp, Artificial Sequence
  derived and/or modified sequence
atgagcctgtggggcctggtgagcaagatgccccccgagaaggtgcagaggctgtacgtggatttcccccagcatctgcgccatctgcttggggattggctggaatctcagccttgggagtttctggtggggtctgacgcattctgctgcaacctggcttctgccctcctgtctgataccgtgcagcatctgcaagctagtgtcggagaacagggcgaagggtcaacgattctgcagcacatatcaacattggagagcatctaccagagagatccactgaagttggtggccacatttagacagatcctccaaggcgagaaaaaggccgtgatggaacagttccggcatctacccatgcctttccattggaaacaggaggaacttaagttcaagacgggtttgcgccgacttcaacacagggtgggcgagatccacctcctgagggaggcgttacagaagggtgccgaagctgggcaggtgtctctccactcactcatagagacacctgccaatgggaccggccccagcgaggcgcttgcaatgctacttcaggagacaacaggggaactggaagctgctaaagccctcgtcctgaagcgcatccagatttggaagcgtcagcagcagctcgctggcaacggagcacccttcgaagaaagcctggcgcctttgcaggagcgatgtgagtccctagtggatatttacagccaactgcagcaggaagttggcgccgccggcggcgagctcgagcccaagactcgggcatcgctgactggaaggctcgatgaggtcctgaggacactcgtaaccagttgctttttagtcgagaaacagccaccgcaggtgttgaagacccagaccaagtttcaggccggcgtccgtttccttcttggactgcgcttcctcggagcgcctgccaaacccccgctagtcagggccgacatggtcacggaaaagcaggcacgggagttgtccgtaccccagggtcctggggctggtgcggaaagcaccggtgagatcattaataatactgtcccgcttgaaaacagtatccccggtaactgctgctcagccctgttcaagaacctcctgctgaagaagattaagaggtgcgagcggaagggaacagaatccgtcaccgaggaaaagtgcgctgtgctctttagcgccagctttaccctgggccccggcaaattacctattcaattacaggccctgagcctgccactcgtggtaattgttcacggcaatcaggataacaacgctaaggccaccatactgtgggataacgcattctccgaaatggatcgtgtgcctttcgtagtcgcagagcgggtgccatgggagaaaatgtgtgagacgctgaatcttaagttcatggccgaggtgggtaccaacagggggttgctccccgaacacttcctcttccttgcccagaagatttttaatgataactcccttagcatggaggccttccaacacagatcagtgtcttggtctcagttcaacaaggagatattgttggggaggggcttcactttttggcagtggttcgatggagtgctggatctgacaaaaagatgcctgcgttcttactggtctgacagactaatcataggattcatatcaaagcagtacgttaccagcttgctgctgaatgagcctgatggcacttttctccttagattctcagacagcgaaatcgggggtattaccatcgcccacgtcatacggggccaagacggctcccctcagattgagaacatccagcctttttctgcaaaggatttgtctataagatccctgggcgaccgcattagagacctcgcccagcttaagaacttgtaccccaagaaaccaaaagacgaggcttttcgaagtcattataaacccgaacagatgggtaaagacggcagaggctacgtgcccgcaaccatcaagatgacggtggaacgggatcagccgctgccaacaccggagctccagatgcccaccatggtgccatcgtatgatttgggcatggcaccagactcctccatgtccatgcagctcggtccagacatggtgccccaggtgtatcccccccacagccactccattcccccctatcagggtttgagtccggaagaatcagtcaatgtattgagcgctttccaggagccacatctccagatgcctcccagcctggggcagatgtcgctcccctttgaccagccgcacccccagggccttctgccatgccagccacaggagcatgcggtgagttcaccagatcctctcctgtgtagtgacgtgacaatggtcgaagatagctgtctttcacaacctgtaactgcctttcctcaggggacatggataggtgaagatatttttcctcctttactgccccccacagagcaggacctgacaaaactactactggagggccagggtgaatccggcgggggctcactcggagcccagccacttctgcagccctcccattatggacagtccggcatttccatgtctcatatggacctacgggccaatccgtcctggtag

SEQ ID NO: 292795 - DNA, 2214 bp, Artificial Sequence
  derived and/or modified sequence
atggagcagttccggcacctgcccatgcccttccactggaagcaggaggaactgaagtttaaaactggacttcgacgattacagcaccgggtgggagagatccatctgctgagggaggccctccagaaaggcgccgaggccggacaagtctcactgcactcccttattgagacccctgctaacggcacagggccttcagaggccttggctatgctcttgcaagaaaccacaggcgagttagaggccgcaaaagcactggttctgaaaagaattcaaatttggaaacgtcagcagcagcttgccggtaatggcgccccgttcgaggagagtctggcccccctacaggagcggtgtgagtctttggtagacatttattcccagctgcagcaagaggtcggggcagctggcggtgaactcgagcccaaaactagggcttccttgacaggaagattggacgaggtgctccggacactcgttacgtcttgttttctcgtggagaagcaacccccacaggtcttgaagacccagactaagtttcaggcgggagtgaggttcctgctcggattacgcttcctgggcgccccagcaaagccccctctcgtgcgtgccgacatggtcaccgaaaagcaagctagagagctgagcgtgccgcaaggccctggggctggggccgaatctacgggcgagattatcaacaatacagtgccactggagaactcaattcctgggaattgctgcagtgcgctgtttaaaaacctgctcttgaaaaagattaaaaggtgtgaaagaaagggtacagagtcagtaactgaggaaaagtgcgctgtgctgttttctgcctcttttaccttaggcccaggcaagctgcccattcaactgcaagccctatcactgccactggttgtcatcgtccatggaaatcaggacaataatgcaaaagctacgattctgtgggacaacgcgttctccgaaatggacagagtgcctttcgtcgttgctgagagggtaccctgggagaagatgtgcgagactctcaatctgaagttcatggccgaagttgggactaatcgcgggctgttgccagagcacttcctgtttttggcacagaagatcttcaatgataacagtctatcaatggaggcttttcagcacaggtctgtgtcttggtcccagtttaacaaggagattctgctcggaaggggtttcaccttctggcagtggtttgatggggtgctggatcttactaagcggtgtctgcggtcatattggtctgacagactgattatcggctttatttctaaacagtacgtcacctctctattgttaaatgagcccgatggcacttttcttttacgcttcagtgactccgagatcggagggatcaccatagcccatgtgattcgcggccaggacggctccccgcagatcgaaaacatacagcctttctctgcgaaagacctgtccatccgtagtctgggcgaccgaattcgcgatctagcacaactgaaaaatctgtacccaaagaagccaaaggatgaggctttccggagccactataagcccgagcagatgggaaaggacggccgcggttacgtcccagctacgattaagatgaccgtggaacgggaccagccgctgcccactccagagctccaaatgccgactatggtgcccagctatgaccttggcatggctcctgattctagtatgagcatgcaactggggcctgatatggtgccacaggtttaccccccacattcgcattcaattcctccttatcaagggttgagcccagaagaatccgtcaacgtgctgagcgcgttccaggagcctcatctgcagatgcctccatcactaggccagatgtcactcccattcgatcagccacacccacagggacttcttccctgtcagccacaagaacacgctgtctcttctcctgatcccctgctctgctctgatgtcacgatggtggaagacagctgcttatcgcagccggtaaccgcctttccacaggggacctggataggagaggatatatttccacctctgttgcctcccaccgaacaggacctaaccaagctgctgctggaggggcagggggaaagcgggggtgggtccctgggggcccagcccctcctgcagcccagtcattacggccagagcgggatttctatgtctcacatggacttgagggcaaatcccagctggtag

SEQ ID NO: 292796 - DNA, 2214 bp, Artificial Sequence
  derived and/or modified sequence
atggagcagttccggcacctgcccatgcccttccactggaagcaggaagagctgaagtttaagaccggcctaaggcgcctccaacaccgcgtcggcgaaatccacctgctgcgcgaggctcttcaaaaaggcgcagaagccggacaggtgtctctacactcactgattgaaacccccgccaatggcacagggcctagcgaagcattagctatgctgctgcaggagacaaccggagagctcgaggcagccaaggcgcttgtgttaaagcgtatccagatttggaagcggcagcagcagctcgccggtaacggcgccccattcgaggagagcctggcaccactccaggaaaggtgtgagtctctggttgacatctatagccaattacagcaggaggtgggcgcggccggcggtgaacttgaacctaagactcgcgccagtctgactggtagactcgacgaggtcctgagaactctagtcacatcgtgttttcttgtagagaaacagccgccacaggtgttaaaaacacagacaaaattccaagctggagtgcgttttctgcttggcttgcgcttcctcggcgccccggctaaacctccgctggtgcgcgccgatatggtcaccgaaaagcaggcccgggagcttagtgtgccgcaaggtcccggagccggcgccgaatccaccggagaaattataaacaatacagtgcctctagaaaatagcatccctggaaattgttgttctgcattatttaagaatcttctattaaagaagatcaaaagatgcgagcgaaaagggaccgaatcggtcactgaagaaaagtgcgctgttctgttctccgcaagctttaccctcggacccggaaagcttccaatccaactgcaagccttgtctttgcctctagtggtgatcgttcacggtaatcaggataacaatgcaaaagctactatcttatgggacaatgctttctctgagatggaccgtgtaccttttgtggtcgccgagcgtgttccgtgggagaagatgtgcgaaaccctcaatcttaagttcatggctgaagttggcactaacaggggcctgcttcccgagcactttttgttcctggcccagaagattttcaacgataacagtctgagcatggaagctttccagcatcggagcgtttcttggtctcagtttaacaaagagattctcttgggaaggggatttacattttggcagtggtttgacggcgtcctcgacctaacaaagcggtgtctcaggtcatattggtccgatcggctgatcatcgggtttatctccaaacagtatgtgacctcactgttgctcaatgaacccgacggcacctttctcctccgcttttcggacagtgagattggcggcattaccatagcacacgtcataagaggccaggatgggagtcctcaaatcgagaacatccagccattcagcgctaaagacctatctattaggagcctgggtgacagaatcagggacctggcccaactaaagaatctttaccccaagaagcctaaggacgaagcttttcgttcccactacaagcccgagcaaatgggcaaagacggaagggggtatgttccagccacaattaagatgacagtggagagagaccaaccgctgccaacacccgagcttcagatgcctacaatggttccatcatatgatcttggcatggccccagattctagtatgtctatgcagttggggcctgatatggttccccaggtctaccccccacactctcacagtatccctccatatcagggactgtcacccgaggaatcagtcaacgtcctttccgctttccaggagccacatctccagatgccaccatcactgggccagatgagcctgcccttcgatcaaccccacccacaaggcctcctgccatgtcagcctcaagaacacgcggtgtcctcacccgacccactgctctgttcggacgtgactatggttgaagatagctgtctttcccaacctgtgaccgcgtttccgcagggtacatggattggcgaggacattttcccgcctttgctgcccccaactgagcaggacctaactaagctgttattagaaggacagggagagtctggcggcggatcactgggcgcccagcctctgctccaaccatcccattacggacagtccgggatttcaatgtcccacatggatctgcgggccaacccctcgtggtag

SEQ ID NO: 292797 - DNA, 2214 bp, Artificial Sequence
  derived and/or modified sequence
atggagcagttccggcacctgcccatgcccttccactggaagcaggaagagctgaaatttaaaacgggcctgaggcggctccaacaccgcgttggcgagatccatctgctgcgagaagcactgcaaaagggggccgaggccggccaagtaagcctccactcactcatagaaacaccagctaacggtaccggaccatccgaagccctggctatgttacttcaggaaaccactggcgagctcgaggccgcaaaggccctcgtgttgaaaaggatccagatttggaagagacagcagcagctcgccggcaacggcgcaccatttgaagagtctctggccccccttcaagaacggtgcgagtctctggttgatatctattctcagctgcaacaggaagtaggcgccgccgggggagaactggagccgaagaccagggcttctctgaccgggcgcttggatgaagtccttcggaccctggtgaccagctgctttttagtggaaaagcagccacctcaggtcctcaagacccagacgaagttccaggcaggcgttcgatttcttttgggtttgcgtttcctgggtgcgccagccaaacccccactggttagagcagacatggtcaccgaaaagcaggcgcgggaactcagtgtgccacagggcccaggcgcgggtgctgagtccacgggggagatcataaataataccgtccctcttgaaaattcaattcccggcaattgctgttctgcactgttcaaaaacctgctcctcaagaaaattaaacgctgcgaacgcaaaggaacagagagtgtgaccgaagagaagtgtgccgtgctgttcagtgcttcctttacactgggccccgggaaactgcctatccagttacaggctttgagcctcccactggtggttatagtgcacggtaaccaggacaacaacgcaaaggccacaattctctgggacaacgcctttagcgaaatggatcgcgtgccctttgtggtcgcggaaagagtcccctgggaaaagatgtgtgaaacacttaacctcaaattcatggccgaggtgggcacaaatcgagggctgttaccagaacattttctctttttggcgcagaagatcttcaacgacaattccttatccatggaagcttttcagcaccgttccgtcagctggtctcagttcaacaaggaaattctgctcggccgggggtttacattctggcagtggttcgacggggtgttggacctcaccaaaaggtgcctgagatcctattggtcggacaggctgatcattgggtttatcagcaaacagtacgttacaagtttgctcctgaatgaaccagatggaacttttctgctgaggttcagcgactcagagatcggaggtatcacgattgctcatgtaattcgcgggcaggatggatccccacagatcgagaatatacaacctttctctgccaaagatctgagcattcggagcctcggggatcgcattagggacttggctcagcttaagaacctctatccaaagaagccaaaggacgaggcattccggagccactataagccagagcagatgggcaaggacggtagggggtatgtcccagcaacaattaagatgacagttgaacgtgatcagcctctgcctacccctgagctgcagatgcctacaatggtgccatcgtacgacctgggaatggcccccgactcttctatgagtatgcagcttggcccggacatggtgccccaggtgtatcctcctcattcccattctatccccccatatcagggactctcaccagaagagtctgtgaatgtcttatcggcattccaggagccacacctccagatgcctccctctctgggccagatgtctctgccgtttgatcagccccacccacagggactgttaccatgccaaccgcaggagcacgcagtttccagcccggatcccctgctctgttctgatgtcacaatggtggaagacagttgccttagccagccagttaccgctttcccccagggcacttggattggtgaagacatcttccctcccctgttgccacccacagagcaagacctgacaaagctgttactggaaggacagggcgagtccgggggagggtctcttggagcgcagcccctactccaaccctcacactatggacagagtgggatctctatgagtcatatggatctgagagcaaatccgtcatggtag

SEQ ID NO: 292798 - DNA, 2040 bp, Artificial Sequence
  derived and/or modified sequence
atgagcctgtggggcctggtgagcaagatgccccccgagaaggtgcagaggttgtatgtcgatttcccccagcaccttcggcatctgctcggggactggttagagtctcagccatgggaatttctggtgggttcagacgccttctgctgcaacctcgcttccgccttgctcagcgatacagtccaacacctgcaagcgtctgtgggtgagcagggtgaaggcagcacgattctccagcacattagtaccttagagtctatctaccagcgcgatccactaaagcttgtcgcgacgtttaggcaaattctgcagggcgaaaagaaagcagttatggagcagttccgccacctgccaatgccatttcattggaagcaagaggagctcaagtttaagaccggccttagaagactgcagcacagggtgggtgagatacatctgttgcgagaagccttacaaaaaggcgccgaagccggccaggtgagtctgcattcactcattgagactcctgctaatgggactgggccttctgaagctctggctatgttactgcaagagaccacaggggagcttgaagctgccaaagccttggtactaaaacgcattcaaatttggaaacgtcaacagcagctggccggcaatggggccccattcgaggagtctcttgctccactgcaggaacgctgcgagtccctagtggacatatacagccaattgcagcaagaggtcggcgccgctggaggcgagctggagcccaagacaagagcctcgttgacgggccgccttgatgaggtgctgcgcaccctggttacatcttgctttcttgtggaaaaacagccccctcaggtactgaaaacccagacgaaattccaggcaggagtcaggtttctgcttggcctgaggtttttaggcgcacctgctaaaccccccctcgtgagagctgatatggtgactgagaagcaggccagggagttgtcagtgccccagggacccggggcaggcgccgaaagcacaggtgaaatcataaacaataccgtcccgctcgaaaactctattccaggtaactgctgcagtgccctattcaagaacctcctattaaaaaagattaagcgttgtgaaagaaaggggaccgagagcgttactgaagagaagtgcgctgtgctattcagtgcaagcttcactctcggacccggtaaacttcccatacagctgcaggccttgtcgttaccgctggttgttattgtccacgggaaccaggacaataatgctaaagccacaatcctctgggacaacgcattcagcgagatggatcgggtgcctttcgtcgtggctgagcgagtgccgtgggagaaaatgtgcgaaaccctgaatctaaagtttatggcagaggtgggcactaacaggggcctattgccagaacattttctgtttcttgcccagaaaattttcaatgacaactcactcagcatggaagccttccaacaccggtctgtgagctggtcccaatttaataaagagatcttgttgggtcgcggctttacattttggcagtggttcgacggtgtgttggatctaacaaagaggtgcctgagatcctactggtctgataggctgataataggattcatatccaagcagtacgtcacttcattactccttaatgagcctgatggcactttcctgcttcgcttttcagactctgagatcggtggtattaccatcgcgcatgtgatcagaggccaggatggctcgccgcaaatagagaacatccaacctttttccgcaaaggacctctcaattcggagcctcggcgacaggatcagggatcttgctcagctaaagaacttgtacccaaagaaaccaaaagacgaagcctttcggtcacattacaagcccgagcagatgggcaaggacgggcgggggtacgtgcctgcgacaatcaaaatgaccgtggagcgtgaccagcccctgcctacgccagaactgcagatgcctaccatggtaccatcatatgacctcggtatggccctcatccctccatag

SEQ ID NO: 292799 - DNA, 2193 bp, Artificial Sequence
  derived and/or modified sequence
atggagcagttccggcacctgcccatgcccttccactggaagcaggaagagctgaagtttaaaacaggcttgcgaaggttgcagcaccgggtaggtgaaatccatctgctcagagaggcactccagaaaggcgccgaagccggacaggtgagcctgcactcattgatagagacacctgcaaatggaaccgggcctagcgaggcgcttgccatgttgttgcaagagaccacaggagaactagaagccgctaaggccttggttctgaaaagaatccagatctggaagcggcagcagcaactcgccggcaacggcgccccttttgaagagtcgctcgcgcctttgcaggagcgctgcgagtctttggttgatatatattcccagctacagcaggaagtcggcgcggccggcggagaactcgaacctaaaacaagagcttctttgacgggccgtctggacgaagtccttcgcaccctggtgacctcatgtttcttggttgagaagcaacctccacaggtgttgaaaactcagaccaaatttcaggcgggagtaagattcctgctggggctgcggttcctgggcgcgccggcaaagcctccactcgtgcgggctgacatggtcactgaaaagcaggcgagggaactctccgtcccccagggccccggtgctggagcagagagtacgggcgagattatcaataataccgtgccactggaaaattctatcccaggaaattgctgctcggccctcttcaaaaatctcctcctaaaaaaaataaagaggtgcgaacgcaagggcacagagagtgtgactgaagaaaagtgcgccgttctgttttctgcctcatttacactcggcccaggaaagctcccaatacagttacaggccctgagcctccccctagttgtgatcgtccatggcaaccaggacaataatgcaaaagccaccatcctctgggacaatgctttttctgaaatggatagggtgccatttgtggtggcagaacgggtcccctgggagaaaatgtgcgaaactttgaatctcaagtttatggccgaggtggggacaaaccgcggactcttgcccgaacattttctttttcttgcccagaagatctttaacgataactcattatctatggaggccttccaacatcgctcagtgtcctggagtcagttcaacaaagaaatccttctggggcggggctttaccttctggcagtggtttgacggagtgctggacctgaccaaaaggtgtctgagatcatactggagcgacagacttatcataggatttataagtaaacagtatgtgactagcctactgctcaacgaacctgatggaacttttcttttacggttctcggatagcgagattggtgggatcacgattgctcatgttatcagaggacaggatgggagccctcagatagagaatatacagcccttttcggccaaagatctgagtatcagatccctaggggacagaattagagatctcgcccagcttaagaatctgtatcctaagaagccaaaggacgaagcttttcgatcccactacaagcccgagcaaatgggaaaagacggtagaggctatgttccagccactattaagatgaccgtagaacgggaccagcctttgccaactcccgaactgcagatgccaacaatggtgcccagctacgacttggggatggcccccgattcgtcaatgtcaatgcaacttggccccgacatggttccccaggtctacccaccacattctcactctattcctccataccagggcctatccccagaagagagcgtgaatgtcctctcagcgttccaggagccccacctgcagatgccccccagtctgggacagatgagtctgccttttgatcagcctcacccccaagggcttcttccatgccaacctcaagaacacgcggtctcctcccccgatcctctgctgtgcagcgacgtgactatggttgaggacagttgtctaagccaacccgtgacagctttcccgcagggaacttggatcggtgaagatatcttcccacctttgctgcctccaaccgagcaagacctgacaaagctgctcctcgaaggccagggcgagtctggaggcgggtccttgggccacagcccaagctgctcgcctccgacaatgggcaatctagggagtcaatgtcctacatggacatag

SEQ ID NO: 292800 - DNA, 2544 bp, Artificial Sequence
  derived and/or modified sequence
atgagcctgtggggcctggtgagcaagatgccccccgagaaggtgcaacgactttatgtagacttcccacagcatctcaggcacctcctgggggattggctcgagagccagccatgggaattcttagtaggcagcgacgccttctgctgtaacttagcatctgccttgctttccgataccgtacagcatctgcaagcatctgtgggcgagcagggtgaggggtcaaccatcctgcagcatatttccacgctggagtcaatctatcagagggaccctctcaagctcgtggccacctttcggcagatcttgcagggagagaagaaggccgtaatggagcagttccggcaccttccgatgccatttcactggaagcaggaggaactgaaatttaaaacaggccttaggcggctccaacaccgagtgggcgagatccacctgcttcgcgaagccctacagaaaggagccgaggccggacaggtgagtttgcactctcttatcgagaccccagccaatggtaccgggccatcagaagctctggccatgctgttacaggagaccacaggcgagttggaagccgcaaaagctcttgttcttaaacgtattcagatctggaagcgtcagcagcagctggcggggaacggtgcacccttcgaggaatctctggcccccctgcaggagcgctgtgagagtctcgttgacatttacagtcagctccagcaggaggtgggtgccgctggaggagaactggaaccaaaaactcgagcttcactcaccgggagacttgacgaagtgctccgcacactggtgacgagctgcttcctggtcgagaagcaaccgccccaggtacttaagactcagacaaagtttcaggccggggtgcgttttctcctcggtcttaggttcctgggcgcacccgctaaacccccactggtgcgcgctgatatggtcaccgagaagcaggctcgtgagctgagcgtgccccagggacctggtgccggcgctgaatcaaccggcgagattatcaataacaccgtcccattagagaattctatccccggcaattgctgtagcgccctcttcaagaacctcttactgaaaaagattaaacgctgcgagaggaagggaacagaatctgtcactgaagagaagtgtgctgtgctgttctccgcaagctttactctcgggcctggaaagctccctattcagttacaggctctgtccctgccattagtggtgatcgtccacgggaaccaggataacaacgccaaagcgacaatcctttgggataatgctttctctgagatggaccgcgttccatttgtagttgccgaacgcgtaccctgggagaagatgtgcgaaacactgaacctgaaattcatggctgaagtgggcactaataggggcctgctgcctgagcatttcctatttctggcccagaaaattttcaacgataactccctctccatggaggctttccagcaccgttctgtgagttggtctcagttcaataaagagattctccttgggcgcggtttcaccttctggcagtggtttgacggagtcttagacttgaccaagagatgcttaagatcctactggtccgacagattgatcatcgggttcattagcaagcagtacgtcacgtcactcctcttgaacgagccagacggtacttttcttctgcgtttcagcgactccgaaatcggcggaatcaccattgctcacgtgattcgcggacaggacggctcccctcagatcgagaacatccagcccttttccgcgaaggatctatctataagatctctgggcgatagaatcagggacctggcgcaactgaagaatctttaccctaaaaaacctaaggacgaggccttcagaagccattataagccggagcagatggggaaggatggcagaggctacgtgccagccaccatcaaaatgactgtcgaacgagatcagccactgcccactcccgaattgcaaatgcccactatggtcccaagctatgatctggggatggcccctgatagctcgatgtccatgcagctgggtccagacatggtgcctcaagtgtatccgcctcattctcattccatcccaccgtaccaagggctctccccggaagagtccgtcaatgtgctcagcgcctttcaggaaccacacttgcagatgcccccgtctctcggacagatgtcactgccatttgatcagcctcacccacaggggctgcttccttgccagccacaggaacacgcggtctctagtcctgatccgctgttatgttctgacgttacaatggtggaggactcgtgtctctcccagcccgtgaccgcttttcctcagggcacttggatcggtgaagatatatttccccctttgctacctcctaccgagcaggacctgactaagctgctcctcgaaggccagggtgagtctggaggcggatctctgggagctcagccactacttcaaccctcacactacgggcagagtgggatctccatgtcgcacatggatctaagagctaaccctagttggtag

SEQ ID NO: 292801 - DNA, 195 bp, Artificial Sequence
  derived and/or modified sequence
atgagcctgtggggcctggtgagcaagatgccccccgagaaggtgcagaggctgtacgtagatttccctcagcacctacgacacctcctgggcgattggcttgaaagtcagccctgggaatttctggtgggatctgatgctttctgctgtaatttagcctctgccctgttatctgatacggttcagcatttgtag

SEQ ID NO: 292802 - DNA, 435 bp, Artificial Sequence
  derived and/or modified sequence
atgagcctgtggggcctggtgagcaagatgccccccgagaaggtgcagaggctatacgtcgatttcccccagcatttgcgacacctgctaggcgactggctcgagtctcagccctgggagtttctggtgggctctgacgccttttgttgcaacctagctagtgcccttctgagcgacaccgtgcagcacctccaggcctctgtgggcgagcagggagaaggttctacaatcctgcagcacatctccacacttgagtctatttatcagagggaccctctcaaacttgtagctactttcagacagattctgcaaggtgagaagaaagctgttatggagcagttccggcatctccctatgccctttcattggaaacaggaagagcttaaattcaaaacaggactgaggagactccaacatcgggttggagaaatatag

SEQ ID NO: 292803 - DNA, 465 bp, Artificial Sequence
  derived and/or modified sequence
atgagcctgtggggcctggtgagcaagatgccccccgagaaggtgcagaggctctacgtggacttcccccagcacctgcgccatttgctgggcgattggctggagagtcagccatgggaatttctggtcggcagcgacgccttctgttgtaacctcgcctccgcgctgctgagcgataccgtacagcatctgcaggccagcgtcggtgagcagggagaaggatcaactatcttacagcatatttccacccttgaatccatctaccagcgtgatcccctcaaactggtagcgaccttccgacagatcttgcagggtgaaaaaaaggcagtaatggagcaattcaggcatcttccaatgcccttccactggaagcaagaggagctaaaattcaagactggacttaggagattgcagcatcgcgttggggagattcacttgttgagggaggccctgcagaaaggttag

SEQ ID NO: 292804 - DNA, 318 bp, Artificial Sequence
  derived and/or modified sequence
atgagcctgtggggcctggtgagcaagatgccccccgagaaggtgcagcgcctgtacgtggacttcccacagcatttgcgccacttgctcggcgattggttagagtcccagccctgggagtttctcgtcggctccgacgcgttctgttgtaacctggcctccgcccttctgagtgataccgtccagcacctacaggcctctgtgggtgagcagggagaaggttctaccatcttacagcatattagtacactcgaatctatttaccagcgcgatcccctgaaactggtggccacctttcgtcaaattctccagggatag

SEQ ID NO: 292805 - DNA, 312 bp, Artificial Sequence
  derived and/or modified sequence
atgagcctgtggggcctggtgagcaagatgccccccgagaaggtgcaacgactttatgtggattttccgcagcacctgaggcacctcctcggtgattggttggagtcacagccctgggaatttctcgtgggatcagatgccttctgctgtaacctggcatccgctctgctgtctgatactgtccaacatctgcaggcctccgtgggagaacagggcgaggggtcaaccattctgcagcacatttcgactctggagagcatatatcagagagacccattaaagttagtggccacattcagacagattttgtag

SEQ ID NO: 292806 - DNA, 480 bp, Artificial Sequence
  derived and/or modified sequence
atgagcctgtggggcctggtgagcaagatgccccccgagaaggtgcagcggttatacgtggacttccctcaacatttaagacacctcctgggcgattggctggagtctcagccatgggagtttctggtggggtctgacgccttttgttgcaatctggccagtgccctccttagcgataccgtgcaacatcttcaggcaagcgtgggagagcagggagagggtagcaccatcttgcagcacatcagcacactggagagcatatatcagagggaccccctcaagctggtggctacgtttcggcagatacttcaaggcgaaaagaaggcggtcatggagcaatttcgacatcttcctatgccctttcactggaaacaagaggagctgaagttcaagactgggctgagacggctgcagcacagggtgggggagatccacctgctccgtgaggccctccagaaaggagccgaggccggacagtag

SEQ ID NO: 292807 - DNA, 2544 bp, Artificial Sequence
  derived and/or modified sequence
atgagcctgtggggcctggtgagcaagatgccccccgagaaggtgcagcgcctttatgtcgacttcccacagcatctgcggcacctgctcggagattggttggagagccagccttgggaatttcttgtaggttcagatgcattctgctgtaacttagcatccgccctgttatccgatacagtgcagcatcttcaggcgagtgttggcgagcagggcgaggggtccacaatcctgcagcacatttctaccctcgaatcaatctatcagcgcgaccccctgaaactggtggctactttccgccaaatcctccagggagaaaaaaaagccgtgatggagcaatttcggcacctccccatgcccttccactggaagcaggaagaactcaagttcaagaccggcctgcgcagacttcagcatagggtaggggaaatacatttattacgcgaggcgctgcagaagggtgccgaggctgggcaagtcagcctgcatagcctcatcgaaacacctgccaatggcaccgggccatcagaggcactggccatgttactgcaggagacaacgggagaactagaagccgctaaagcactggtactgaaacgcattcagatatggaagcggcaacagcagctagccggaaatggcgccccgtttgaagaatctctcgctcccctgcaagaacgttgtgagagccttgtggacatctactctcagctgcagcaggaagtgggggcagctggtggcgaactcgagccaaagacaagagccagtctaactgggcgcctggatgaggtgctgagaactcttgttacttcctgcttcctggtggagaagcagccaccacaagttcttaaaacacagaccaagttccaagccggagttcgctttctgctcggtctcagattcctgggggccccggccaagcctcctttagtcagagccgatatggttactgaaaaacaagctcgcgaactttccgtgccgcagggtcccggagccggggcagagagcactggagagatcataaacaacaccgtaccactcgaaaattctatacccggcaattgttgtagcgccttgtttaagaaccttctgcttaaaaaaattaaaaggtgtgagcggaaagggaccgagtccgtcacagaggagaaatgtgctgtgctgttcagtgcatcctttaccctcggtcctggaaaactccccattcagctgcaggcccttagtctaccacttgtggtaatcgtccatggcaatcaagacaacaatgcaaaggcaaccatcctctgggacaatgcattttctgaaatggaccgcgtgcctttcgtagtagcagagagagtgccatgggagaaaatgtgcgagaccctgaacctcaagttcatggcggaggttggcaccaataggggattgctgccagaacattttctgtttctcgctcagaagatctttaacgataattcactatctatggaagcattccagcacagatccgtctcctggagccagtttaacaaagaaatattactaggcagaggctttacgttttggcagtggtttgatggggtcctggatctgactaaacgttgcctgagatcttattggagcgatcgtctgataatcggattcattagtaagcaatatgtgacaagtctgctattaaacgaacccgatggaacatttctgctacggttctctgacagtgagatcggggggatcacaattgcgcatgtgatccgcgggcaggacgggagcccccagatcgagaacatccaaccattcagcgctaaagacctatcaatcaggtcactgggcgataggatcagagacctggctcagctgaagaacctgtaccctaagaaacctaaggatgaagccttccggtctcattacaaaccagagcagatgggaaaagacggtagaggctatgtccccgcgacaattaagatgacagttgaacgggatcagcctctccccacaccagaactgcaaatgcctactatggtgccatcatatgacctgggaatggcccccgattcatctatgagtatgcaactgggtcccgatatggtcccccaggtctaccccccgcactcccactcgatacccccataccaggggctgtctccagaagagtctgtgaacgttctgagcgccttccaggagccccacctgcagatgccaccatccctggggcagatgtcactgccctttgaccagccacacccacaaggcttactgccatgccaaccacaggagcatgcagtttcaagccccgaccccctgctgtgttccgacgttacgatggtggaggactcttgcctgagccaacctgtcactgccttccctcaggggacctggatcggcgaggatatctttcctcccctgctgccaccaactgagcaggacctaaccaagttacttctggaggggcagggcgaaagtggaggagggagcctcggagctcagcccctgttgcagcccagccactacggtcaaagcgggatatccatgtcccatatggatctgcgcgctaacccctcctggtag

SEQ ID NO: 292808 - DNA, 225 bp, Artificial Sequence
  derived and/or modified sequence
atgagcctgtggggcctggtgagcaagatgccccccgagaaggtgcagcggctctatgtcgactttccccaacatctgcggcacttactcggcgactggctcgagtcccagccatgggaatttttggttggatcagatgcattctgctgcaatctggcaagtgctcttctcagcgacaccgtgcagcatctccaagcaagcgtgggggagcagggcgagggatag

SEQ ID NO: 292809 - DNA, 2544 bp, Artificial Sequence
  derived and/or modified sequence
atgagtttgtggggtctggtgtccaagatgccccctgaaaaggtgcagagattgtacgtcgattttccgcagcatctgcgacatctgctgggcgactggctggaaagtcagccttgggagttcctggtcggctcggatgcgttctgctgcaatcttgcatccgccctactctctgatactgtgcaacacttgcaggcctccgtgggcgagcagggggaaggaagtacgatcctgcagcacatttccaccttggagtccatctaccaaagagatcctttaaagctcgtggctacattcaggcaaatcttgcagggggagaagaaggcagtgatggaacagttccggcatctgcccatgccatttcactggaaacaggaagagctgaagttcaaaactggactgcggagactccagcatcgtgtgggggagatccacctgctaagagaagctctgcagaagggcgcagaggctggtcaggtatccttacattctttgatagaaactcctgcgaacggtaccggacccagtgaggctctggcaatgcttctccaggaaaccactggtgaacttgaagctgcaaaggcccttgtcctgaaacggatccagatctggaagaggcagcaacagttggcaggcaacggcgcaccatttgaagagagcctggcacccttacaagaacgatgcgaaagcctggtcgatatatatagccagctgcagcaggaggttggtgccgctggcggagaactggagcccaagaccagagccagtcttaccgggaggctcgacgaagtgctgcgaactttagttacttcatgctttctggttgagaagcaacctccccaggtattgaagacgcagacaaaatttcaagctggcgtaagattcctgctcggcttaaggtttctgggcgcacctgcaaagccaccgcttgtgcgggcagacatggtcactgaaaagcaggccagagagctctccgtgccacagggcccaggagccggtgcagagagtaccggagaaattatcaacaataccgtgcccttggaaaactccatcccaggaaattgctgtagtgcgttgtttaaaaatctcctactgaagaagatcaaacggtgcgagaggaaaggcacagagtctgttaccgaggaaaaatgtgcagtgctgttcagtgcctcatttactttaggacccggaaagttgccaatccaattacaagctctcagcctgccactggtggtaatagtccatggcaatcaggataacaatgccaaggcaacaattctttgggacaacgctttttctgagatggatcgggtgccattcgtagtagcagaaagagtcccatgggagaagatgtgtgaaacgctgaacctgaaatttatggctgaagtgggaaccaatcgcggactgcttcccgagcatttcctgtttctcgcccagaaaatctttaatgacaactccctcagtatggaggctttccaacatcgaagcgtgtcatggtcccagtttaacaaggagattctcctggggcgtggcttcacgttctggcagtggtttgatggagtgctggatctgactaagcgctgcctcagatcctactggagtgataggttgataattggatttatcagcaagcagtacgttacgagcctgctgttgaatgaacccgatggtacctttctgctacgtttttcagatagcgagatagggggaattacaattgctcacgtcatccggggacaggatggatctccccaaattgagaatatccagcctttcagcgccaaggacctatctatccgctccctcggggaccgcataagggacctggcgcagctcaaaaacctgtatccgaaaaagccaaaggacgaagctttccggtcacattacaaaccagaacaaatgggcaaggacggcagggggtatgtgcctgcaactatcaagatgaccgtagagcgtgaccagccactcccgacaccggaactgcagatgcccaccatggtgccttcttacgacctcggaatggctcctgattcctccatgtctatgcagctgggcccagacatggtgcctcaggtgtaccccccacacagccacagcatccccccttatcagggtctgagtcccgaggagtcggtcaatgtgttgtctgcgttccaggaaccccaccttcagatgccaccatccctgggccagatgagtctaccatttgatcagccacatcctcagggactcctgccctgtcagcctcaggagcacgctgtctcctccccggaccccttattgtgcagcgatgtgaccatggtggaggactcctgtctgagtcaaccagtgaccgcgtttcctcagggcacatggatcggggaggacattttccccccactcttgcccccaacagaacaggaccttaccaaacttctgctggaaggtcagggggagagcggagggggatctctcggagcacagcccctgctccagcctagtcactatggccaatctgggatctccatgagccacatggacctgcgtgcaaaccccagctggtag

SEQ ID NO: 292810 - DNA, 2544 bp, Artificial Sequence
  derived and/or modified sequence
atgtcactgtgggggctggtcagcaagatgccccctgagaaagtgcagaggctgtacgtcgattttccacaacacctgcgccatctattaggtgactggttggagtcacaaccgtgggagtttctcgtaggctccgacgccttttgttgtaacctcgcctcagcattgttgtctgacacagtgcaacatcttcaggcgtcggtgggcgagcagggcgaagggtcgactatcttgcagcatatttctacccttgagtccatttaccagagggatcctctgaaacttgtggcaacattccggcagatcctgcagggagagaagaaggccgtaatggaacaatttagacacctgcctatgccgttccattggaagcaggaggaactgaaattcaaaactgggctacgcagactccagcaccgagttggcgaaatccatcttctgagggaggctctgcagaaaggggcagaggccggtcaggtgtcattacattcacttatcgagacccccgctaatggcacaggaccctccgaggccttggctatgttgctgcaagaaacgactggagaactggaggctgctaaggccctggtactcaagcgaatccaaatttggaaacggcagcagcaactcgctggtaatggtgcaccttttgaggagtccctggccccactacaggagaggtgcgagagcctggttgacatctattcgcagcttcagcaggaggtcggggcagctggtggcgaactggagcccaagacccgggctagcctcaccgggagacttgatgaggttctgcggactctggtaacaagctgctttctagttgagaaacagcctccacaagtacttaaaacgcagaccaaattccaggctggcgtgaggttcctgctggggttgagatttcttggcgcacctgcaaaaccccctctggtccgggcagacatggtaacagaaaagcaagctagggagttgagtgtgccccagggcccaggtgcgggtgccgaatcaactggagagattatcaacaacacggttcccctggaaaactccattcccggaaactgttgcagtgccctttttaagaatctcctgctcaaaaaaatcaagcgttgcgagcggaagggaaccgaatccgtcacagaggagaagtgtgctgtgctgttcagtgcttcatttactctcggaccaggcaaactacctattcaactgcaggcattgtccctgcctctagttgtgatcgttcatggaaatcaggacaataatgctaaggctaccattctctgggacaatgcgttcagcgagatggaccgagtgccattcgtggtggccgaaagggtgccttgggaaaagatgtgcgaaacgctgaatctcaagttcatggccgaagtcggaactaaccggggactgctgcctgagcacttcctgttcttagcccagaagatttttaacgacaattctttgagcatggaggccttccagcaccgatctgtcagctggtcccagttcaacaaagagattctgctcggccgaggcttcactttttggcagtggtttgatggcgtgttggacttgaccaaacggtgtttgaggtcctattggagcgaccggctcattatcggatttatttccaaacagtacgtcacttcactgctgctgaacgaaccggacggcacattcttgctgaggtttagcgacagcgagatagggggaatcacaattgctcatgtcattagaggccaagatggaagtccccagattgaaaacatccaaccatttagcgccaaagatttgagcattcgatctttaggtgacaggatcagggatcttgcacagctaaagaatctataccccaagaagcccaaggatgaggcgtttcggtcgcactataagcctgagcagatgggcaaagatggaagagggtacgtaccagctaccattaagatgacagtggaaagagaccagcccctgcctactccagaactgcagatgcctactatggtccccagttatgatttgggaatggctcccgattcttcgatgtcaatgcagctcggtcctgatatggtccctcaggtttaccctcctcattctcacagcattcccccttaccaagggctgagtccggaggagtctgtgaacgtattgagtgcctttcaagaaccgcatcttcagatgcctccgagcctaggccagatgtcccttccctttgaccaaccccacccgcagggtctgctgccttgccaaccacaggaacatgccgttagctcccctgaccctctgctgtgttctgacgtcaccatggttgaagattcttgcctgtcacaaccggtaactgctttcccccaggggacctggatcggtgaggacatcttccctcctttgttgccacccactgaacaggacctgaccaaactgcttttagagggccagggggagtccggaggtggaagtcttggagctcagccgctgctgcaaccatcccactatgggcagtccggaattagcatgtcccacatggaccttcgtgcgaatcccagttggtag

SEQ ID NO: 292811 - DNA, 2214 bp, Artificial Sequence
  derived and/or modified sequence
atggagcaattccgtcacctgcccatgccctttcattggaagcaggaggagctcaaattcaagaccggcctgcgccgactgcagcaccgcgtaggcgaaatccatctgctcagggaagcattacaaaaaggcgctgaggctgggcaggtcagtctccattctctaattgagaccccagccaatggcactggcccttccgaggcactcgccatgctactgcaggaaaccactggggagctggaggccgctaaagccctggtgttgaagagaattcagatctggaagaggcaacagcagctcgccggtaatggcgcaccatttgaagagagcctggcgccactccaagagagatgcgagtcactagtggacatttactctcagctacagcaggaggttggtgccgctggcggtgaactggagccaaaaacacgcgctagtttgactggtagacttgacgaagtcctgcgcaccctcgtgacatcctgttttctcgtcgaaaagcagccgccacaggttttgaagactcagaccaagttccaggcaggcgtaagatttctgctgggcttaagattcctcggggctccggctaagccacctctggtcagagctgacatggtcacagaaaaacaggcaagggagcttagcgtgccacaaggccctggggcaggagcagagtctaccggagagatcatcaataataccgtccccctggaaaattccataccagggaattgctgttcagctctcttcaaaaacttactgctgaaaaagataaagcgctgcgaacggaaaggtaccgaatctgtgaccgaggagaagtgcgctgtattattcagtgccagttttacactcgggcctggcaaactgcccatacagctgcaggccttaagcctccccctggtggtgatagtgcatggtaaccaggataataacgctaaagccaccattctctgggataatgcctttagtgaaatggacagggtgcccttcgtggttgctgaacgcgtgccttgggaaaaaatgtgcgaaacactcaacctcaagttcatggccgaggtgggcaccaatagagggcttctccctgaacatttcctctttctggcacagaagatcttcaacgataactcactcagtatggaagccttccagcaccgatccgtgtcatggagccagttcaacaaggaaattctcctaggccgtgggtttaccttctggcagtggttcgatggggtattggatctgacaaaacgctgcctgcgcagctattggagtgataggttgattattggatttatttccaaacagtacgtgaccagcctacttctgaatgaacccgatggtacatttttgcttcgattcagtgacagtgagatcggcggtatcactatagcgcatgtgatacggggacaggatgggtccccgcagatagagaatatacagccattttcagccaaagatctctctataaggtcattaggagatcgaattcgagatttggcccagttgaaaaatctctacccgaagaagcccaaggacgaagcgtttaggtcacactacaagcccgagcagatggggaaagacggcaggggctatgtgcctgccaccataaagatgacagtggaacgagaccagccattgcccactcccgagctgcaaatgcccaccatggttccctcatatgacctcggaatggcccctgatagttccatgtccatgcaacttgggccagacatggtaccacaggtgtacccgccacattctcacagtattcccccatatcagggcttgagcccagaggaatccgttaatgtgctgtcagcctttcaagaaccccaccttcagatgccaccgagcttaggtcagatgtcactgcccttcgaccagccacaccctcaaggacttctcccgtgccagccccaggaacacgcggtgtcttcacctgaccctctgctgtgttcagacgtgactatggtggaggacagttgcttgtcccagccagtaaccgcgttcccccagggcacttggataggcgaggacatattccctcctctgctgccacccacagaacaggatctcactaaactccttctagaggggcagggggaatccggaggcggttccctgggcgctcagcccctgctgcagccaagccattacggtcagtctgggatttctatgtctcacatggatctgcgggcaaacccttcctggtag

SEQ ID NO: 292812 - DNA, 2214 bp, Artificial Sequence
  derived and/or modified sequence
atggaacagttccgacaccttccaatgcccttccactggaagcaagaagagctgaaatttaagaccgggctccgcaggctgcagcatagagtaggagagattcatcttctgagggaggcgctgcagaagggtgccgaagcaggtcaggtcagcttgcattccctgatcgagacccccgcaaacggaaccggcccttctgaagcgctggccatgctactccaggagaccacaggtgaactggaagccgcaaaggccctcgttttaaagcggattcagatttggaaaaggcagcagcagctcgcaggaaacggcgcaccctttgaggaatctctggcaccactgcaagagcggtgcgagagcctagtggatatctatagccagctccaacaggaggtaggcgctgcaggaggcgagctagagccaaagacccgagccagtctcactgggaggctagacgaggttcttaggactctcgtgacttcatgttttttagtggagaaacagccgccacaggtgctgaaaacccagacaaaatttcaagcaggcgtcagatttttactgggcctccggtttctcggggcacccgctaagcctccgctcgtgcgggcagatatggtgactgaaaaacaggctagagaactgtctgtcccgcagggcccaggggcaggagctgaaagcactggcgagataattaataacacagtgccactagagaactccatcccaggcaactgctgtagcgcactgttcaagaatctcctcctgaagaagattaagcgttgtgaacgaaagggaacagaatccgtgacagaggagaagtgcgccgtgctgttctccgccagcttcacactgggcccagggaagctccctattcagctccaggccctgagtcttccattggtggttatcgtacacggcaaccaggataacaacgcgaaggcaacaattttatgggacaatgcttttagtgagatggaccgggtgccttttgtagtcgctgaaagagtgccatgggaaaaaatgtgtgaaacactcaacctgaaattcatggcagaggtgggaacgaatcgcggtttgctgccggaacactttctcttcctggctcagaaaatttttaacgacaattcgctctctatggaggctttccagcataggagtgtctcgtggagtcagtttaataaggagattttactgggacggggttttactttctggcagtggtttgatggggtgctcgacctcaccaaaaggtgcctgaggagctactggagcgataggctgatcatcggtttcatctccaaacagtacgtaacatctctccttctaaacgaacccgatggcacctttctgctgcgattctccgactctgaaatcggcggaataacgatagctcatgttatccgcggacaggatggttctccccaaatagagaacatccaacctttcagcgccaaggacctctctattcgctcattgggggacagaattcgggatctggctcagttgaaaaacctgtatcccaagaaaccaaaagatgaagcttttaggtcccactataagcccgagcagatggggaaagacggacgcggatacgtgccagctacaatcaagatgacggttgaacgggatcagcccctgccaactccagagctgcagatgccaaccatggtgccgagttacgacctcggaatggcaccagatagctctatgtccatgcagctcggcccagacatggtcccacaggtttatcctccacactcccacagtatcccgccttaccagggtctctccccagaagagagtgtaaatgtactgagtgcattccaggagccgcacctccagatgccccctagccttgggcagatgagcctgccttttgatcagccacatccacaaggtcttctcccatgccagccgcaggaacatgcagtttcatcccctgacccgctgttgtgtagtgacgtaaccatggtagaggattcgtgcctgagccagcctgtcaccgcattcccccagggcacttggatcggcgaggacatcttcccaccacttctacccccaactgaacaggacctgacaaaactgctactggagggacagggagaatccgggggaggatccttgggcgctcagcctctgcttcagccatctcactacggccaaagcggaataagcatgtcccacatggatctgcgggctaacccgagttggtag

SEQ ID NO: 292813 - DNA, 2214 bp, Artificial Sequence
  derived and/or modified sequence
atggaacagttcaggcatcttcctatgccctttcactggaaacaggaggaattaaagtttaagacagggttacgcaggctgcaacatcgagttggggagatccacctgctgcgagaggccttgcagaaaggagcagaggctggccaggtttccctgcactccttgattgagacacccgcaaatgggaccggacccagcgaggcactggcaatgctgctccaggagaccaccggggagctagaggccgcaaaggcccttgtgctgaagcggatccagatctggaaaaggcagcaacagctcgccggaaatggggctccctttgaggagtctttggctcccttgcaggaacgatgcgaatccctcgtggatatttactcacagctgcagcaggaggttggtgccgctggcggagagctggagccaaagacaagggcttccctaaccggtagattggacgaggtgctcaggacattagtaacctcatgtttccttgtagagaaacagccaccccaggttctgaagactcagactaagtttcaggccggtgtgagatttttactcggcttgagattcctaggagcgccagcaaaaccacctctcgtgcgcgctgacatggttacggagaagcaagcaagagaactgagcgtccctcagggacccggagccggagctgagagcactggggaaataattaataatacagtgccccttgaaaatagcatcccaggcaattgctgtagcgccttgtttaagaatcttctgctgaagaagattaagcgctgcgagcgcaaagggaccgagtcagtgactgaagaaaagtgtgccgtactgttctccgcttccttcacccttggccctgggaagctgcctattcaattgcaggccctcagcctgcctttggtcgtgatcgtgcatggtaaccaggataacaatgctaaagccaccattctgtgggacaacgcattcagcgaaatggaccgcgtgccctttgtcgtggccgaaagggtgccctgggagaaaatgtgtgagactctgaacttaaaattcatggctgaagtaggaaccaacaggggcctgttgccagagcacttcttatttcttgcacagaagatctttaacgacaattccctgtccatggaggcctttcagcacaggagcgtgtcctggagtcagtttaataaagagatcttgctaggccgaggattcacattctggcagtggtttgacggagtgttggacctgacaaagaggtgcctgcggagctattggtcggaccgactaattattggatttatatcaaaacagtatgtgactagtctcctactaaacgaaccggacgggactttcctcctaagattttcggatagtgagattggcggaattaccatagcccacgtgatcaggggacaggacggctctcctcaaattgaaaacattcaaccatttagtgctaaggatttgtctattagaagcctcggggatcggattcgcgatctcgctcagctgaaaaacctctacccgaagaagcccaaagacgaggcctttcgctcacactataagcctgagcaaatgggaaaggacggccgtgggtacgtgcccgcaactatcaaaatgacggttgagcgggaccaaccactaccaactcccgaattacagatgccaaccatggtgccttcctacgacctggggatggccccagattcatcaatgagtatgcagctggggcctgacatggtgccccaagtctaccccccacactcacactcaatccccccttaccagggcctgtctccagaggaaagcgtcaatgtactgagtgccttccaggagccccacttgcagatgcctccgagtctggggcagatgtccttgccattcgatcaacctcatcctcagggactgctcccgtgccagccccaggaacacgctgtgtcaagtcctgacccgctactgtgctcagacgtgacaatggtcgaggattcttgcctttctcagcccgtcacagccttccctcagggaacatggatcggtgaagacatttttcctcccctgctccctcccactgagcaagatctgacaaagctcttgttggaaggacagggtgagtctgggggagggtccctgggggcacagcctctgctgcagccctctcactatgggcagtccgggatttcaatgagccatatggaccttcgagccaacccatcctggtag

SEQ ID NO: 292814 - DNA, 2040 bp, Artificial Sequence
  derived and/or modified sequence
atgtcactgtgggggctcgtgagcaaaatgccccctgagaaggtccagcggctctacgttgatttccctcaacacctgaggcacctgttgggcgactggttggagagccagccttgggaattcctggtgggttcagacgctttctgctgcaacctcgcaagcgctcttctgagtgacactgtccagcatctccaagcatctgtgggggaacagggagagggtagcacaattttacagcatattagcactctagaatcaatctaccagcgagaccctctgaagctcgtggcaaccttcagacagatcctgcagggagaaaagaaagcagttatggagcagttccgccacctgcccatgcccttccactggaagcaggaggagctcaagttcaagactggtttgaggcgccttcagcatcgagtaggcgagatccacttactccgcgaagctctacagaagggtgcagaagcagggcaggtatccttgcactcactgatcgagacacccgcaaacggtaccggtccgagtgaggccctagctatgcttctccaggagaccaccggagagctcgaagcggcaaaagccctcgttctcaaaaggatccagatctggaaacgacagcagcagctggccggaaacggcgcaccattcgaggagagtttggcacccttacaggaacgttgtgagtctcttgtagatatttacagccaactccaacaagaggttggcgcagccggtggtgagctcgagcctaagacacgggctagcctgacagggaggctagatgaggtgttacgcacattagtgacatcttgttttctggtggagaagcagccccctcaggtcttaaaaactcaaactaaattccaggcaggagtgagatttctgttaggtctccgatttctgggagcaccggcaaaaccacccctggtgcgcgcagacatggtcacagagaagcaggccagggagctgtccgtgccccagggtcccggtgccggagctgagagcacgggcgagatcataaacaataccgtccccctggaaaatagcattccaggcaattgctgttccgcactgttcaagaacctgttgttaaaaaaaattaagagatgcgagagaaaaggtacagaaagtgtgacagaggagaagtgcgccgtgctgttcagcgccagtttcacactcgggccaggaaaattgccaattcaactgcaagccctctccctgcccttggtagtaatcgtgcatggaaaccaggacaacaatgctaaagctactattctctgggataatgcttttagtgaaatggaccgagtgccatttgtcgtggctgagcgtgttccctgggaaaagatgtgcgagacactgaaccttaagttcatggccgaagtgggtacaaaccggggtctgctcccagagcactttctttttctcgcacagaagatcttcaacgacaactctctgtctatggaggcatttcagcacagaagcgtttcctggtcccaatttaacaaagagatactgctgggcagaggattcactttctggcaatggttcgatggtgtgctcgatctgactaaacgatgcctgcggtcatactggtctgacagactgataattggctttatcagtaagcagtacgtaacgagcctgctattaaacgagcccgacggtacattcctgctgcggttttcagactcggaaatcggaggtataacaattgcccacgttattcggggacaggatggctcaccccagatcgagaacatacagcctttttctgctaaagacctctcaattcgaagtctgggcgaccgtatcagggacttggcgcaactgaagaatctgtatcctaaaaaaccaaaagacgaggcttttcgatctcactacaaacctgaacagatgggcaaggacggtagagggtacgtgcccgcaacaatcaaaatgacggtcgagcgtgatcagccgttgcctacgcctgagttgcaaatgcccaccatggtaccctcttacgatcttgggatggccctcattcccccatag

SEQ ID NO: 292815 - DNA, 2193 bp, Artificial Sequence
  derived and/or modified sequence
atggagcagtttcggcatctgcccatgccctttcactggaaacaggaagaactgaagttcaagacagggctgaggcgattgcagcatagggttggggagattcatcttctgagagaggccttgcagaagggggcagaagccggtcaggtttctctgcacagccttattgagacccctgcaaacggcactggaccctccgaagctttggctatgcttctgcaggaaactacgggagaactggaggccgctaaagccctcgtcttaaagaggatccagatctggaagaggcagcagcagctggccggaaacggggcaccgttcgaggagtcccttgctccccttcaggaacgctgcgaatccctcgtcgacatctactcccagctccagcaggaagtaggggctgctggtggagagctggagcctaagaccagagcctcccttacgggaagactggacgaggtcctgcgaaccctggtgactagctgtttcctggtggagaagcagccccctcaggtgctcaaaacccagaccaaattccaggcaggagtaagatttctcttgggcctgaggtttcttggtgcccctgctaagcccccactcgtccgggctgacatggtgacagagaagcaggcgagagagctttctgtaccacagggtcccggagctggtgccgagtcaaccggtgagattataaataacactgttcccctcgaaaatagtatccctggcaattgttgctccgctctgtttaagaaccttctgctgaagaagatcaagcgttgtgagaggaagggcaccgagtcagtaactgaggagaagtgtgccgtcctgttttccgcatccttcaccctgggaccgggaaagcttccaattcagcttcaggccctttctctccctcttgttgtcattgtgcacggtaaccaggataacaatgcaaaagccactatactctgggacaatgctttttctgaaatggatagggtaccgtttgtagtcgcagaacgggtgccatgggaaaagatgtgcgagacgctgaacttgaaatttatggctgaagtaggtacgaatcgcggtcttctaccagagcatttcctttttctggctcagaagatttttaatgataacagtctttcaatggaggctttccagcacagaagcgtctcatggtctcagttcaacaaagagatcctgctgggaaggggctttacattttggcagtggttcgacggcgtgctggatttaactaagaggtgcctgaggtcatattggagcgaccgcctcattatcggctttatctccaaacaatacgtgaccagcttgctcttgaatgagcctgatggtaccttcctcttgcgcttttctgactccgagattgggggaatcaccatcgctcatgtgatccgcggtcaagacggaagtcctcagatcgagaacattcagccattctctgctaaagacctgtccattcgctccctgggtgatcggataagggacttggctcaattgaaaaacctataccctaagaaaccaaaggacgaagcttttcgctctcactacaagccagagcaaatgggaaaagatgggcgaggctatgtgcccgctactatcaaaatgacagtggagcgagaccagccacttccaacccctgaattgcagatgccaaccatggtaccaagttatgatctgggtatggcgcctgattccagtatgtccatgcagctcggcccagacatggtgcctcaggtctatcccccacatagtcactctatccctccataccaaggtctctctcctgaagaatctgtaaacgtgctctcggcattccaagagcctcatctccagatgcctccctcccttggacagatgtcactaccattcgaccagccccaccctcagggattgctaccttgtcaacctcaggaacacgcagtgagctctccagaccctctgctgtgtagcgatgtcacaatggtggaggattcttgcctgagtcagccagtaactgccttccctcagggtacatggatcggagaggacatcttcccaccattattgcctcccaccgaacaggatctgactaagttgctgctggagggccagggtgagagtggagggggatcacttggccattctccatcgtgctcaccccctacaatgggcaacctggggtcccaatgtcctacttggacgtag

SEQ ID NO: 292816 - DNA, 2544 bp, Artificial Sequence
  derived and/or modified sequence
atgagcttgtggggccttgtgagcaagatgcctccagaaaaggtgcagaggctgtacgttgattttccacagcacctgaggcatttgcttggagactggctggaatctcagccctgggaatttctggtggggtctgatgctttttgctgcaaccttgcatctgctcttctttccgataccgtccagcacctgcaggcgagcgtcggggagcaaggggagggcagtacgattttgcagcacatctccaccttggaatccatctatcagcgtgatcccctgaagctagttgctacattccgccagatcctgcaaggagaaaagaaagccgtcatggaacagttccgccatctgccaatgccattccactggaagcaggaagagttgaaattcaagaccggccttagacgtctccagcatcgagtcggcgagattcacctcctgcgcgaagccttacagaaaggcgctgaagccggtcaagtcagcctgcacagcctgatcgagaccccggctaacggcacaggccctagtgaggcattggccatgctactccaggaaacaactggcgagttggaagccgcaaaggctctagtactaaaacgaatccagatctggaaacgtcagcagcagctggccggaaacggagcccctttcgaggagtctctcgctcccttgcaggaacggtgtgaatccctggttgacatctattctcaattgcaacaagaggtgggtgccgcaggcggtgaactggaacccaagacgcgggcaagccttaccgggagactggacgaggtgttgaggacgctcgtgactagttgctttcttgttgagaagcagcccccacaggtcctcaagacccaaacgaagttccaggctggagtgcgcttcctcctgggcctccgctttctcggagcaccagctaagccaccattggtccgggcagatatggtgacggagaaacaagcccgagagctgagcgttcctcagggccctggggctggcgctgaaagtactggagaaattattaacaacactgttccactcgagaactctataccagggaattgctgctccgcattgtttaagaatttgttgctgaagaagatcaagcgctgtgaaaggaaggggaccgagagtgttaccgaagaaaagtgtgccgtactgttttctgcctcatttacgctggggcctgggaagttaccaattcagcttcaggccctgtccttgccactggttgtgatcgtccatggaaatcaggataataacgcaaaagctactatcctgtgggacaatgctttctctgaaatggacagggtaccttttgtggtggccgagagagttccctgggaaaagatgtgcgaaactctcaatcttaaattcatggccgaggttggcaccaatcggggtctgctccccgagcacttcctatttttagcacaaaaaatttttaatgataatagtctttccatggaggcgtttcagcatcggtcagtgtcctggtcccaatttaacaaggagatccttctggggaggggcttcactttctggcagtggttcgacggcgtcctggatctgactaagaggtgtctccgaagctactggagtgacaggcttattattggattcatttctaagcagtatgtgacctcactgctgttgaacgagcctgacgggacatttctcctgcggttctccgacagcgagatcgggggaataactatcgcacacgtgatcagaggccaagacgggagccctcagattgagaatattcaaccgttttctgccaaggatctatccatccgctccctaggtgatagaatccgggacttggcacagctgaaaaacctctaccccaaaaagccgaaggatgaagcattcaggtcacactacaaaccggaacaaatggggaaagatggcagagggtacgtgcctgccacaatcaagatgacggtagaacgggaccaacccttgcctacccccgaattacagatgccaacaatggtgccttcctacgacctggggatggccccagacagcagtatgtccatgcagctggggccagacatggtgccccaagtgtaccctccccacagccattccatcccaccttaccagggcctaagccccgaggagagtgtgaacgtgctctccgccttccaggagccacacctccagatgcccccatccttgggtcagatgagtctaccatttgaccagcctcatccgcagggcctcctaccgtgtcagccccaggaacacgctgtttccagtccggaccctctgctgtgcagtgacgtaactatggtagaagactcatgcctctctcaacccgtgactgctttcccgcaggggacatggatcggagaggatattttccctccactgttgccaccaaccgagcaggacctcacaaagttgctccttgagggccagggcgaatctggcggaggctctctcggggcacagccgctgctgcagccctcacactatggacagagtggcatttcaatgtctcacatggatctcagggcaaacccatcctggtag

SEQ ID NO: 292817 - DNA, 195 bp, Artificial Sequence
  derived and/or modified sequence
atgtcactttgggggttggtgtcaaaaatgccccctgaaaaagtgcagaggctgtacgtcgacttcccacagcatcttcgacacctgttaggcgactggttggaaagccagccatgggagtttctcgtgggctccgacgctttttgttgtaatttagcgtccgccctgctttccgacaccgtacaacatctatag

SEQ ID NO: 292818 - DNA, 435 bp, Artificial Sequence
  derived and/or modified sequence
atgagcctttggggactagtgtcaaagatgccccctgagaaggttcaacgtctatatgtggattttccccaacacttgcgccacctgctgggcgattggttggagtcacaaccatgggaatttctcgtcggttcagatgctttctgctgtaacctggcatcggctctcctctctgacacagtgcaacacttgcaggcgagcgttggggagcaaggggaaggttctactatcctgcagcacataagtacactggagagcatttaccaacgcgatcctctgaagctggtggccacctttagacagatccttcagggagagaagaaagccgttatggagcagtttcgccacctccctatgcccttccactggaagcaggaggagctgaagtttaaaactggtttgcggaggctgcagcacagggttggagagatttag

SEQ ID NO: 292819 - DNA, 465 bp, Artificial Sequence
  derived and/or modified sequence
atgtctttatggggattggttagtaagatgcctcctgaaaaggtccagaggctctacgtagactttccccagcacttgaggcacctgctcggagattggctggaaagccagccttgggagtttttagtcggcagcgatgctttttgctgcaatctggcatcagccctgttatccgatacagtacagcacctgcaggcctccgttggcgaacaaggagaaggctccaccattctgcagcacatctccacgctggagtccatttatcagagggacccactcaaattggtggccacgttccggcagatattgcagggtgagaagaaagcagtgatggagcagttccgacacctgcccatgcctttccattggaaacaggaggagctgaaattcaagaccggactgcggagattgcagcacagagtgggcgagatccatctcctccgggaggcattgcaaaagggctag

SEQ ID NO: 292820 - DNA, 318 bp, Artificial Sequence
  derived and/or modified sequence
atgtccctatggggccttgtgtccaagatgccgccagaaaaggttcagaggctgtatgtagactttccgcagcatttgcgccatctgcttggagactggcttgagagccagccctgggagttccttgtgggcagcgatgccttttgctgcaacttggccagcgccctgctctctgacacagtgcagcacttacaagcctctgttggagaacagggagaaggctcgaccatcctacaacatatttccactctagagtccatctatcaacgtgaccctctaaagttggtggctactttccgccagatactgcagggctag

SEQ ID NO: 292821 - DNA, 312 bp, Artificial Sequence
  derived and/or modified sequence
atgagtttatggggactcgtcagtaagatgccaccagaaaaagttcagcggctctacgtggatttcccgcagcacctccggcacctattgggcgattggttagagagccaaccctgggagttcctagtgggatccgatgccttttgctgtaacctggcttcagcactgttgtcagacaccgttcagcatctgcaggcctctgtgggcgaacaaggcgagggatctaccatcctccagcatatctcaactttggaatccatctatcagagagacccactgaaattggttgctactttccgccagattttatag

SEQ ID NO: 292822 - DNA, 480 bp, Artificial Sequence
  derived and/or modified sequence
atgagcctgtggggactggtgagtaagatgcccccagaaaaggtgcagagattatacgtggactttccccaacacctgagacacctgttgggagactggctggaatcccagccatgggagttcttggtgggcagcgacgctttttgctgcaatctggcctcggcccttctttctgatacggttcagcatctccaagcctcggttggagagcagggcgaaggaagcaccatcttgcagcatatttcaaccttggagagtatttatcagagggaccccctaaagctggtggccacgttcaggcagattctgcagggggagaaaaaggccgtaatggaacaatttcgccaccttccaatgcccttccattggaaacaagaagagcttaagtttaagacaggactgaggcgactgcaacatagagtgggtgagattcacctactgcgcgaggcccttcagaagggagcagaagccggacagtag

SEQ ID NO: 292823 - DNA, 2544 bp, Artificial Sequence
  derived and/or modified sequence
atgtctctttgggggctggtgtcgaaaatgccaccagagaaggtccagaggctctatgtcgatttcccacagcacctgcgtcacctgctcggggattggctggagtctcagccttgggagtttctggtgggttccgatgccttctgttgtaatctcgcatccgctctgttgtccgacaccgtgcagcatttacaggcgagcgtcggtgagcagggagaagggtccacaatccttcagcatattagtacacttgaatcaatttaccagcgcgatccacttaagctcgtagcaacgttccgacagatcctgcagggtgagaaaaaggcagtaatggaacagtttaggcatctgcctatgcccttccactggaagcaagaggagctaaaattcaaaaccgggctgagacgactgcagcatcgagtaggtgaaattcatcttctgcgcgaagccttgcagaaaggagctgaggcaggccaagtgagccttcacagtctgatagagacccccgcaaatggcacagggccttcagaagccctcgccatgttgctgcaggagacaaccggagaactcgaagcagcaaaggcattggtgcttaaacgcattcaaatatggaaaagacaacagcagctggccggtaatggcgctccatttgaggagtctttagcacctttacaggaacggtgtgaaagcctggtcgatatatatagtcaactgcagcaagaagtgggtgccgctggaggggagctagagcccaagactcgggcatccctcacaggcagactcgacgaagtgcttaggaccctcgtcacgagctgttttctggttgagaagcagccgcctcaggtcttaaaaactcaaacaaagttccaagccggtgtccggttccttcttggcctgcgattcttgggcgcacctgccaagccaccattagtccgcgctgacatggttactgagaaacaggccagggagctcagcgtcccacaggggccaggtgccggtgcggaatccaccggagagatcattaataatacggtccccctggaaaactccattccaggaaactgctgtagcgcgctttttaaaaacctcttgcttaagaaaatcaaacgctgtgagaggaaaggcaccgagtccgtgacagaggagaagtgtgcagttctgttcagcgctagtttcacgctcggcccaggtaaacttcccattcagctccaggccctgtcactgcctttggtagttatcgtgcacggaaatcaggacaacaacgcgaaggctaccattctgtgggacaatgccttctctgaaatggaccgggtcccatttgtagtggcggaacgggtaccatgggagaaaatgtgtgagacgctcaatctcaaattcatggccgaggtcggaaccaaccggggactgcttcccgaacacttcctgttcttggcgcagaagatatttaatgacaattcgctgtcgatggaggcattccagcacaggtctgtgtcctggagccagttcaacaaggagattctgttgggtaggggctttacattttggcagtggttcgatggcgtgctggacctgacaaagagatgcctgaggtcatattggagcgataggctaatcatcggatttatctccaaacagtatgtgacttctcttctgctgaatgagcctgacgggacctttctgctgagattcagtgactccgagatcggtggcattacaatcgcgcacgttattcgcggtcaggatggtagcccacagatcgagaacatccaacctttctctgctaaagacttgtcaatccgatcactgggtgaccgaatccgcgacctcgcacaactgaagaacctttaccctaagaagcctaaggacgaggcatttaggtctcactacaagccggagcagatgggtaaagacggcagaggatatgtgccagctaccatcaagatgaccgtggagagagaccaacctttgcctacacccgagctgcaaatgccaactatggtgccctcatacgacctgggcatggcaccagactcctcaatgagcatgcagctgggtcctgacatggtccctcaggtgtatcctcctcactcacattccataccgccttatcagggtttgtctcccgaagagtccgtaaatgtgcttagcgccttccaagaacctcacctgcaaatgcctccgtcactgggacagatgtccctgcccttcgaccagcctcaccctcagggcttactcccatgtcagccccaagagcatgccgtgtccagtcccgacccattgctgtgtagtgatgtgaccatggtggaggactcttgtcttagtcaacccgtgaccgcattcccacagggaacttggatcggcgaggatatcttccctcccctacttccgcctacagagcaggacctcactaagttactgctggagggacagggggaaagcggcggaggtagtctaggagcccagcccctcttgcagccttcacattatggtcagtctggtatttccatgtcccatatggatctccgtgccaatccaagttggtag

SEQ ID NO: 292824 - DNA, 225 bp, Artificial Sequence
  derived and/or modified sequence
atgtcactgtgggggctcgtctctaaaatgcctcctgaaaaagtgcagagattgtacgtggacttccctcaacacttgcggcaccttctgggcgactggctagagtctcagccctgggagttcttggtcggttcagatgcgttctgctgtaaccttgcctctgccttattgagtgacactgtgcagcatcttcaggccagtgtgggcgagcagggagagggctag

SEQ ID NO: 292825 - DNA, 4034 bp, Artificial Sequence
  derived and/or modified sequence
tttctcttctctgtgtcgtcagagctccagggagggacctgggtagaaggagaagccggaaacagcgggctggggcagccactgcttacactgaagagggaggacgggagaggagtgtgtgtgtgtgtgtgtgtgtgtgtgtgtatgtatgtgtgtgctttatcttatttttctttttggtggtggtggtggaaggggggaggtgctagcagggccagccttgaactcgctggacagagctacagacctatggggcctggaagtgcccgctgagaaagggagaagacagcagaggggttgccgaggcaacctccaagtcccagatcatgtctctgtggggtctggtctccaagatgcccccagaaaaagtgcagcggctctatgtcgactttccccaacacctgcggcatcttctgggtgactggctggagagccagccctgggagttcctggtcggctccgacgccttctgctgcaacttggctagtgccctactttcagacactgtccagcaccttcaggcctcggtgggagagcagggggaggggagcaccatcttgcaacacatcagcacccttgagagcatatatcagagggaccccctgaagctggtggccactttcagacaaatacttcaaggagagaaaaaagctgttatggaacagttccgccacttgccaatgcctttccactggaagcaggaagaactcaagtttaagacaggcttgcggaggctgcagcaccgagtaggggagatccaccttctccgagaagccctgcagaagggggctgaggctggccaagtgtctctgcacagcttgatagaaactcctgctaatgggactgggccaagtgaggccctggccatgctactgcaggagaccactggagagctagaggcagccaaagccctagtgctgaagaggatccagatttggaaacggcagcagcagctggcagggaatggcgcaccgtttgaggagagcctggccccactccaggagaggtgtgaaagcctggtggacatttattcccagctacagcaggaggtaggggcggctggtggggagcttgagcccaagacccgggcatcgctgactggccggctggatgaagtcctgagaaccctcgtcaccagttgcttcctggtggagaagcagcccccccaggtactgaagactcagaccaagttccaggctggagttcgattcctgttgggcttgaggttcctgggggccccagccaagcctccgctggtcagggccgacatggtgacagagaagcaggcgcgggagctgagtgtgcctcagggtcctggggctggagcagaaagcactggagaaatcatcaacaacactgtgcccttggagaacagcattcctgggaactgctgctctgccctgttcaagaacctgcttctcaagaagatcaagcggtgtgagcggaagggcactgagtctgtcacagaggagaagtgcgctgtgctcttctctgccagcttcacacttggccccggcaaactccccatccagctccaggccctgtctctgcccctggtggtcatcgtccatggcaaccaagacaacaatgccaaagccactatcctgtgggacaatgccttctctgagatggaccgcgtgccctttgtggtggctgagcgggtgccctgggagaagatgtgtgaaactctgaacctgaagttcatggctgaggtggggaccaaccgggggctgctcccagagcacttcctcttcctggcccagaagatcttcaatgacaacagcctcagtatggaggccttccagcaccgttctgtgtcctggtcgcagttcaacaaggagatcctgctgggccgtggcttcaccttttggcagtggtttgatggtgtcctggacctcaccaaacgctgtctccggagctactggtctgaccggctgatcattggcttcatcagcaaacagtacgttactagccttcttctcaatgagcccgacggaacctttctcctccgcttcagcgactcagagattgggggcatcaccattgcccatgtcatccggggccaggatggctctccacagatagagaacatccagccattctctgccaaagacctgtccattcgctcactgggggaccgaatccgggatcttgctcagctcaaaaatctctatcccaagaagcccaaggatgaggctttccggagccactacaagcctgaacagatgggtaaggatggcaggggttatgtcccagctaccatcaagatgaccgtggaaagggaccaaccacttcctaccccagagctccagatgcctaccatggtgccttcttatgaccttggaatggcccctgattcctccatgagcatgcagcttggcccagatatggtgccccaggtgtacccaccacactctcactccatccccccgtatcaaggcctctccccagaagaatcagtcaacgtgttgtcagccttccaggagcctcacctgcagatgccccccagcctgggccagatgagcctgccctttgaccagcctcacccccagggcctgctgccgtgccagcctcaggagcatgctgtgtccagccctgaccccctgctctgctcagatgtgaccatggtggaagacagctgcctgagccagccagtgacagcgtttcctcagggcacttggattggtgaagacatattccctcctctgctgcctcccactgaacaggacctcactaagcttctcctggaggggcaaggggagtcggggggagggtccttgggggcacagcccctcctgcagccctcccactatgggcaatctgggatctcaatgtcccacatggacctaagggccaaccccagttggtgatcccagctggagggagaacccaaagagacagctcttctactacccccacagacctgctctggacacttgctcatgccctgccaagcagcagatggggagggtgccctcctatccccacctactcctgggtcaggaggaaaagactaacaggagaatgcacagtgggtggagccaatccactccttcctttctatcattcccctgcccacctccttccagcactgactggaagggaagttcaggctctgagacacaccccaacatgcctgcacctgcagcgcgcacacgcacgcacacacacatacagagctctctgagggtgatggggctgagcaggaggggggctgggtaagagcacaggttagggcatggaaggcttctccgcccattctgacccagggcctaggacggataggcaggaacatacagacacatttacactagaggccagggatagaggatattgggtctcagccctaggggaatgggaagcagctcaagggaccctgggtgggagcataggaggggtctggacatgtggttactagtacaggttttgccctgattaaaaaatctcccaaagccccaaattcctgttagccaggtggaggcttctgatacgtgtatgagactatgcaaaagtacaagggctgagattcttcgtgtatagctgtgtgaacgtgtatgtacctaggatatgttaaatgtatagctggcaccttagttgcatgaccacatagaacatgtgtctatctgcttttgcctacgtgacaacacaaatttgggagggtgagacactgcacagaagacagcagcaagtgtgctggcctctctgacatatgctaacccccaaatactctgaatttggagtctgactgtgcccaagtgggtccaagtggctgtgacatctacgtatggctccacacctccaatgctgcctgggagccagggtgagagtctgggtccaggcctggccatgtggccctccagtgtatgagagggccctgcctgctgcatcttttctgttgccccatccaccgccagcttcccttcactcccctatcccattctccctctcaaggcaggggtcatagatcctaagccataaaataaattttattccaaaataacaaaataaataatctactgtacacaatctgaaaa

SEQ ID NO: 292826 - DNA, 3037 bp, Artificial Sequence
  derived and/or modified sequence
aaacagcgggctggggcagccactgcttacactgaagagggaggacgggagaggagtgtgtgtgtgtgtgtgtgtgtgtgtgtgtatgtatgtgtgtgctttatcttatttttctttttggtggtggtggtggaaggggggaggtgctagcagggccagccttgaactcgctggacagagctacagacctatggggcctggaagtgcccgctgagaaagggagaagacagcagaggggttgccgaggtgaggggttgcctccgaggcaacctccaagtcccagatcatgtctctgtggggtctggtctccaagatgcccccagaaaaagtgcagcggctctatgtcgactttccccaacacctgcggcatcttctgggtgactggctggagagccagccctgggagttcctggtcggctccgacgccttctgctgcaacttggctagtgccctactttcagacactgtccagcaccttcaggcctcggtgggagagcagggggaggggagcaccatcttgcaacacatcagcacccttgagagcatatatcagagggaccccctgaagctggtggccactttcagacaaatacttcaaggagagaaaaaagctgttatggaacagttccgccacttgccaatgcctttccactggaagcaggaagaactcaagtttaagacaggcttgcggaggctgcagcaccgagtaggggagatccaccttctccgagaagccctgcagaagggggctgaggctggccaagtgtctctgcacagcttgatagaaactcctgctaatgggactgggccaagtgaggccctggccatgctactgcaggagaccactggagagctagaggcagccaaagccctagtgctgaagaggatccagatttggaaacggcagcagcagctggcagggaatggcgcaccgtttgaggagagcctggccccactccaggagaggtgtgaaagcctggtggacatttattcccagctacagcaggaggtaggggcggctggtggggagcttgagcccaagacccgggcatcgctgactggccggctggatgaagtcctgagaaccctcgtcaccagttgcttcctggtggagaagcagcccccccaggtactgaagactcagaccaagttccaggctggagttcgattcctgttgggcttgaggttcctgggggccccagccaagcctccgctggtcagggccgacatggtgacagagaagcaggcgcgggagctgagtgtgcctcagggtcctggggctggagcagaaagcactggagaaatcatcaacaacactgtgcccttggagaacagcattcctgggaactgctgctctgccctgttcaagaacctgcttctcaagaagatcaagcggtgtgagcggaagggcactgagtctgtcacagaggagaagtgcgctgtgctcttctctgccagcttcacacttggccccggcaaactccccatccagctccaggccctgtctctgcccctggtggtcatcgtccatggcaaccaagacaacaatgccaaagccactatcctgtgggacaatgccttctctgagatggaccgcgtgccctttgtggtggctgagcgggtgccctgggagaagatgtgtgaaactctgaacctgaagttcatggctgaggtggggaccaaccgggggctgctcccagagcacttcctcttcctggcccagaagatcttcaatgacaacagcctcagtatggaggccttccagcaccgttctgtgtcctggtcgcagttcaacaaggagatcctgctgggccgtggcttcaccttttggcagtggtttgatggtgtcctggacctcaccaaacgctgtctccggagctactggtctgaccggctgatcattggcttcatcagcaaacagtacgttactagccttcttctcaatgagcccgacggaacctttctcctccgcttcagcgactcagagattgggggcatcaccattgcccatgtcatccggggccaggatggctctccacagatagagaacatccagccattctctgccaaagacctgtccattcgctcactgggggaccgaatccgggatcttgctcagctcaaaaatctctatcccaagaagcccaaggatgaggctttccggagccactacaagcctgaacagatgggtaaggatggcaggggttatgtcccagctaccatcaagatgaccgtggaaagggaccaaccacttcctaccccagagctccagatgcctaccatggtgccttcttatgaccttggaatggcccctgattcctccatgagcatgcagcttggcccagatatggtgccccaggtgtacccaccacactctcactccatccccccgtatcaaggcctctccccagaagaatcagtcaacgtgttgtcagccttccaggagcctcacctgcagatgccccccagcctgggccagatgagcctgccctttgaccagcctcacccccagggcctgctgccgtgccagcctcaggagcatgctgtgtccagccctgaccccctgctctgctcagatgtgaccatggtggaagacagctgcctgagccagccagtgacagcgtttcctcagggcacttggattggtgaagacatattccctcctctgctgcctcccactgaacaggacctcactaagcttctcctggaggggcaaggggagtcggggggagggtccttgggggcacagcccctcctgcagccctcccactatgggcaatctgggatctcaatgtcccacatggacctaagggccaaccccagttggtgatcccagctggagggagaacccaaagagacagctcttctactacccccacagacctgctctggacacttgctcatgccctgccaagcagcagatggggagggtgccctcctatccccacctactcctgggtcaggaggaaaagactaacaggagaatgcacagtgggtggagccaatccactccttcctttctatcattcccctgccc

SEQ ID NO: 292827 - DNA, 2703 bp, Artificial Sequence
  derived and/or modified sequence
agacctatggggcctggaagtgcccgctgagaaagggagaagacagcagaggggttgccgaggcaacctccaagtcccagatcatgtctctgtggggtctggtctccaagatgcccccagaaaaagtgcagcggctctatgtcgactttccccaacacctgcggcatcttctgggtgactggctggagagccagccctgagcatatatcagagggaccccctgaagctggtggccactttcagacaaatacttcaaggagagaaaaaagctgttatggaacagttccgccacttgccaatgcctttccactggaagcaggaagaactcaagtttaagacaggcttgcggaggctgcagcaccgagtaggggagatccaccttctccgagaagccctgcagaagggggctgaggctggccaagtgtctctgcacagcttgatagaaactcctgctaatgggactgggccaagtgaggccctggccatgctactgcaggagaccactggagagctagaggcagccaaagccctagtgctgaagaggatccagatttggaaacggcagcagcagctggcagggaatggcgcaccgtttgaggagagcctggccccactccaggagaggtgtgaaagcctggtggacatttattcccagctacagcaggaggtaggggcggctggtggggagcttgagcccaagacccgggcatcgctgactggccggctggatgaagtcctgagaaccctcgtcaccagttgcttcctggtggagaagcagcccccccaggtactgaagactcagaccaagttccaggctggagttcgattcctgttgggcttgaggttcctgggggccccagccaagcctccgctggtcagggccgacatggtgacagagaagcaggcgcgggagctgagtgtgcctcagggtcctggggctggagcagaaagcactggagaaatcatcaacaacactgtgcccttggagaacagcattcctgggaactgctgctctgccctgttcaagaacctgcttctcaagaagatcaagcggtgtgagcggaagggcactgagtctgtcacagaggagaagtgcgctgtgctcttctctgccagcttcacacttggccccggcaaactccccatccagctccaggccctgtctctgcccctggtggtcatcgtccatggcaaccaagacaacaatgccaaagccactatcctgtgggacaatgccttctctgagatggaccgcgtgccctttgtggtggctgagcgggtgccctgggagaagatgtgtgaaactctgaacctgaagttcatggctgaggtggggaccaaccgggggctgctcccagagcacttcctcttcctggcccagaagatcttcaatgacaacagcctcagtatggaggccttccagcaccgttctgtgtcctggtcgcagttcaacaaggagatcctgctgggccgtggcttcaccttttggcagtggtttgatggtgtcctggacctcaccaaacgctgtctccggagctactggtctgaccggctgatcattggcttcatcagcaaacagtacgttactagccttcttctcaatgagcccgacggaacctttctcctccgcttcagcgactcagagattgggggcatcaccattgcccatgtcatccggggccaggatggctctccacagatagagaacatccagccattctctgccaaagacctgtccattcgctcactgggggaccgaatccgggatcttgctcagctcaaaaatctctatcccaagaagcccaaggatgaggctttccggagccactacaagcctgaacagatgggtaaggatggcaggggttatgtcccagctaccatcaagatgaccgtggaaagggaccaaccacttcctaccccagagctccagatgcctaccatggtgccttcttatgaccttggaatggcccctgattcctccatgagcatgcagcttggcccagatatggtgccccaggtgtacccaccacactctcactccatccccccgtatcaaggcctctccccagaagaatcagtcaacgtgttgtcagccttccaggagcctcacctgcagatgccccccagcctgggccagatgagcctgccctttgaccagcctcacccccagggcctgctgccgtgccagcctcaggagcatgctgtgtccagccctgaccccctgctctgctcagatgtgaccatggtggaagacagctgcctgagccagccagtgacagcgtttcctcagggcacttggattggtgaagacatattccctcctctgctgcctcccactgaacaggacctcactaagcttctcctggaggggcaaggggagtcggggggagggtccttgggggcacagcccctcctgcagccctcccactatgggcaatctgggatctcaatgtcccacatggacctaagggccaaccccagttggtgatccctgactggaagggaagttcaggctctgagacacaccccaacatgcctgcacctgcagcgcgcacacgcacgcacacacatttacactagaggccagggatagaggatattgggtctcagccctaggggaatgggaagcagctcaagggaccctgggtgggagcataggaggggtctggacatgtggttactagtacaggttttgccctgatt

SEQ ID NO: 292828 - DNA, 2886 bp, Artificial Sequence
  derived and/or modified sequence
gcagccactgcttacactgaagagggaggacgggagaggagtgtgtgtgtgtgtgtgtgtgtgtgtgtgtatgtatgtgtgtgctttatcttatttttctttttggtggtggtggtggaaggggggaggtgctagcagggccagccttgaactcgctggacagagctacagacctatggggcctggaagtgcccgctgagaaagggagaagacagcagaggggttgccgagggagttcctggtcggctccgacgccttctgctgcaacttggctagtgccctactttcagacactgtccagcaccttcaggcctcggtgggagagcagggggaggggagcaccatcttgcaacacatcagcacccttgagagcatatatcagagggaccccctgaagctggtggccactttcagacaaatacttcaaggagagaaaaaagctgttatggaacagttccgccacttgccaatgcctttccactggaagcaggaagaactcaagtttaagacaggcttgcggaggctgcagcaccgagtaggggagatccaccttctccgagaagccctgcagaagggggctgaggctggccaagtgtctctgcacagcttgatagaaactcctgctaatgggactgggccaagtgaggccctggccatgctactgcaggagaccactggagagctagaggcagccaaagccctagtgctgaagaggatccagatttggaaacggcagcagcagctggcagggaatggcgcaccgtttgaggagagcctggccccactccaggagaggtgtgaaagcctggtggacatttattcccagctacagcaggaggtaggggcggctggtggggagcttgagcccaagacccgggcatcgctgactggccggctggatgaagtcctgagaaccctcgtcaccagttgcttcctggtggagaagcagcccccccaggtactgaagactcagaccaagttccaggctggagttcgattcctgttgggcttgaggttcctgggggccccagccaagcctccgctggtcagggccgacatggtgacagagaagcaggcgcgggagctgagtgtgcctcagggtcctggggctggagcagaaagcactggagaaatcatcaacaacactgtgcccttggagaacagcattcctgggaactgctgctctgccctgttcaagaacctgcttctcaagaagatcaagcggtgtgagcggaagggcactgagtctgtcacagaggagaagtgcgctgtgctcttctctgccagcttcacacttggccccggcaaactccccatccagctccaggccctgtctctgcccctggtggtcatcgtccatggcaaccaagacaacaatgccaaagccactatcctgtgggacaatgccttctctgagatggaccgcgtgccctttgtggtggctgagcgggtgccctgggagaagatgtgtgaaactctgaacctgaagttcatggctgaggtggggaccaaccgggggctgctcccagagcacttcctcttcctggcccagaagatcttcaatgacaacagcctcagtatggaggccttccagcaccgttctgtgtcctggtcgcagttcaacaaggagatcctgctgggccgtggcttcaccttttggcagtggtttgatggtgtcctggacctcaccaaacgctgtctccggagctactggtctgaccggctgatcattggcttcatcagcaaacagtacgttactagccttcttctcaatgagcccgacggaacctttctcctccgcttcagcgactcagagattgggggcatcaccattgcccatgtcatccggggccaggatggctctccacagatagagaacatccagccattctctgccaaagacctgtccattcgctcactgggggaccgaatccgggatcttgctcagctcaaaaatctctatcccaagaagcccaaggatgaggctttccggagccactacaagcctgaacagatgggtaaggatggcaggggttatgtcccagctaccatcaagatgaccgtggaaagggaccaaccacttcctaccccagagctccagatgcctaccatggtgccttcttatgaccttggaatggcccctgattcctccatgagcatgcagcttggcccagatatggtgccccaggtgtacccaccacactctcactccatccccccgtatcaaggcctctccccagaagaatcagtcaacgtgttgtcagccttccaggagcctcacctgcagatgccccccagcctgggccagatgagcctgccctttgaccagcctcacccccagggcctgctgccgtgccagcctcaggagcatgctgtgtccagccctgaccccctgctctgctcagatgtgaccatggtggaagacagctgcctgagccagccagtgacagcgtttcctcagggcacttggattggtgaagacatattccctcctctgctgcctcccactgaacaggacctcactaagcttctcctggaggggcaaggggagtcggggggagggtccttgggggcacagcccctcctgcagccctcccactatgggcaatctgggatctcaatgtcccacatggacctaagggccaaccccagttggtgatcccagctggagggagaacccaaagagacagctcttctactacccccacagacctgctctggacacttgctcatgccctgccaagcagcagatggggagggtgccctcctatccccacctactcctgggtcaggaggaaaagactaacaggagaatgcacagtgggtggagccaatccactccttcctttctatcattcccctgcccacctccttccagcactgact

SEQ ID NO: 292829 - DNA, 2879 bp, Artificial Sequence
  derived and/or modified sequence
acactgaagagggaggacgggagaggagtgtgtgtgtgtgtgtgtgtgtgtgtgtgtatgtatgtgtgtgctttatcttatttttctttttggtggtggtggtggaaggggggaggtgctagcagggccagccttgaactcgctggacagagctacagacctatggggcctggaagtgcccgctgagaaagggagaagacagcagaggggttgccgagagcatatatcagagggaccccctgaagctggtggccactttcagacaaatacttcaaggagagaaaaaagctgttatggaacagttccgccacttgccaatgcctttccactggaagcaggaagaactcaagtttaagacaggcttgcggaggctgcagcaccgagtaggggagatccaccttctccgagaagccctgcagaagggggctgaggctggccaagtgtctctgcacagcttgatagaaactcctgctaatgggactgggccaagtgaggccctggccatgctactgcaggagaccactggagagctagaggcagccaaagccctagtgctgaagaggatccagatttggaaacggcagcagcagctggcagggaatggcgcaccgtttgaggagagcctggccccactccaggagaggtgtgaaagcctggtggacatttattcccagctacagcaggaggtaggggcggctggtggggagcttgagcccaagacccgggcatcgctgactggccggctggatgaagtcctgagaaccctcgtcaccagttgcttcctggtggagaagcagcccccccaggtactgaagactcagaccaagttccaggctggagttcgattcctgttgggcttgaggttcctgggggccccagccaagcctccgctggtcagggccgacatggtgacagagaagcaggcgcgggagctgagtgtgcctcagggtcctggggctggagcagaaagcactggagaaatcatcaacaacactgtgcccttggagaacagcattcctgggaactgctgctctgccctgttcaagaacctgcttctcaagaagatcaagcggtgtgagcggaagggcactgagtctgtcacagaggagaagtgcgctgtgctcttctctgccagcttcacacttggccccggcaaactccccatccagctccaggccctgtctctgcccctggtggtcatcgtccatggcaaccaagacaacaatgccaaagccactatcctgtgggacaatgccttctctgagatggaccgcgtgccctttgtggtggctgagcgggtgccctgggagaagatgtgtgaaactctgaacctgaagttcatggctgaggtggggaccaaccgggggctgctcccagagcacttcctcttcctggcccagaagatcttcaatgacaacagcctcagtatggaggccttccagcaccgttctgtgtcctggtcgcagttcaacaaggagatcctgctgggccgtggcttcaccttttggcagtggtttgatggtgtcctggacctcaccaaacgctgtctccggagctactggtctgaccggctgatcattggcttcatcagcaaacagtacgttactagccttcttctcaatgagcccgacggaacctttctcctccgcttcagcgactcagagattgggggcatcaccattgcccatgtcatccggggccaggatggctctccacagatagagaacatccagccattctctgccaaagacctgtccattcgctcactgggggaccgaatccgggatcttgctcagctcaaaaatctctatcccaagaagcccaaggatgaggctttccggagccactacaagcctgaacagatgggtaaggatggcaggggttatgtcccagctaccatcaagatgaccgtggaaagggaccaaccacttcctaccccagagctccagatgcctaccatggtgccttcttatgaccttggaatggcccctgattcctccatgagcatgcagcttggcccagatatggtgccccaggtgtacccaccacactctcactccatccccccgtatcaaggcctctccccagaagaatcagtcaacgtgttgtcagccttccaggagcctcacctgcagatgccccccagcctgggccagatgagcctgccctttgaccagcctcacccccagggcctgctgccgtgccagcctcaggagcatgctgtgtccagccctgaccccctgctctgctcagatgtgaccatggtggaagacagctgcctgagccagccagtgacagcgtttcctcagggcacttggattggtgaagacatattccctcctctgctgcctcccactgaacaggacctcactaagcttctcctggaggggcaaggggagtcggggggagggtccttgggggcacagcccctcctgcagccctcccactatgggcaatctgggatctcaatgtcccacatggacctaagggccaaccccagttggtgatcccagctggagggagaacccaaagagacagctcttctactacccccacagacctgctctggacacttgctcatgccctgccaagcagcagatggggagggtgccctcctatccccacctactcctgggtcaggaggaaaagactaacaggagaatgcacagtgggtggagccaatccactccttcctttctatcattcccctgcccacctccttccagcactgactggaagggaagttcaggctctgagacacaccccaacatgcctgcacctgcagcgcgcacacgcacgcacacacacatacagagctctctgagggtgatggggctgagcaggaggggggctgggtaagagcacaggttagggcatgg

SEQ ID NO: 292830 - DNA, 2037 bp, Artificial Sequence
  derived and/or modified sequence
atgtctctgtggggtctggtctccaagatgcccccagaaaaagtgcagcggctctatgtcgactttccccaacacctgcggcatcttctgggtgactggctggagagccagccctgggagttcctggtcggctccgacgccttctgctgcaacttggctagtgccctactttcagacactgtccagcaccttcaggcctcggtgggagagcagggggaggggagcaccatcttgcaacacatcagcacccttgagagcatatatcagagggaccccctgaagctggtggccactttcagacaaatacttcaaggagagaaaaaagctgttatggaacagttccgccacttgccaatgcctttccactggaagcaggaagaactcaagtttaagacaggcttgcggaggctgcagcaccgagtaggggagatccaccttctccgagaagccctgcagaagggggctgaggctggccaagtgtctctgcacagcttgatagaaactcctgctaatgggactgggccaagtgaggccctggccatgctactgcaggagaccactggagagctagaggcagccaaagccctagtgctgaagaggatccagatttggaaacggcagcagcagctggcagggaatggcgcaccgtttgaggagagcctggccccactccaggagaggtgtgaaagcctggtggacatttattcccagctacagcaggaggtaggggcggctggtggggagcttgagcccaagacccgggcatcgctgactggccggctggatgaagtcctgagaaccctcgtcaccagttgcttcctggtggagaagcagcccccccaggtactgaagactcagaccaagttccaggctggagttcgattcctgttgggcttgaggttcctgggggccccagccaagcctccgctggtcagggccgacatggtgacagagaagcaggcgcgggagctgagtgtgcctcagggtcctggggctggagcagaaagcactggagaaatcatcaacaacactgtgcccttggagaacagcattcctgggaactgctgctctgccctgttcaagaacctgcttctcaagaagatcaagcggtgtgagcggaagggcactgagtctgtcacagaggagaagtgcgctgtgctcttctctgccagcttcacacttggccccggcaaactccccatccagctccaggccctgtctctgcccctggtggtcatcgtccatggcaaccaagacaacaatgccaaagccactatcctgtgggacaatgccttctctgagatggaccgcgtgccctttgtggtggctgagcgggtgccctgggagaagatgtgtgaaactctgaacctgaagttcatggctgaggtggggaccaaccgggggctgctcccagagcacttcctcttcctggcccagaagatcttcaatgacaacagcctcagtatggaggccttccagcaccgttctgtgtcctggtcgcagttcaacaaggagatcctgctgggccgtggcttcaccttttggcagtggtttgatggtgtcctggacctcaccaaacgctgtctccggagctactggtctgaccggctgatcattggcttcatcagcaaacagtacgttactagccttcttctcaatgagcccgacggaacctttctcctccgcttcagcgactcagagattgggggcatcaccattgcccatgtcatccggggccaggatggctctccacagatagagaacatccagccattctctgccaaagacctgtccattcgctcactgggggaccgaatccgggatcttgctcagctcaaaaatctctatcccaagaagcccaaggatgaggctttccggagccactacaagcctgaacagatgggtaaggatggcaggggttatgtcccagctaccatcaagatgaccgtggaaagggaccaaccacttcctaccccagagctccagatgcctaccatggtgccttcttatgaccttggaatggccctgattcctcca

SEQ ID NO: 292831 - DNA, 2776 bp, Artificial Sequence
  derived and/or modified sequence
actgcttacactgaagagggaggacgggagaggagtgtgtgtgtgtgtgtgtgtgtgtgtgtgtatgtatgtgtgtgctttatcttatttttctttttggtggtggtggtggaaggggggaggtgctagcagggccagccttgaactcgctggacagagctacagacctatggggcctggaagtgcccgctgagaaagggagaagacagcagaggggttgccgaggcaacctccaagtcccagatcatgtctctgtggggtctggtctccaagatgcccccagaaaaagtgcagcggctctatgtcgactttccccaacacctgcggcatcttctgggtgactggctggagagccagccctgagcatatatcagagggaccccctgaagctggtggccactttcagacaaatacttcaaggagagaaaaaagctgttatggaacagttccgccacttgccaatgcctttccactggaagcaggaagaactcaagtttaagacaggcttgcggaggctgcagcaccgagtaggggagatccaccttctccgagaagccctgcagaagggggctgaggctggccaagtgtctctgcacagcttgatagaaactcctgctaatgggactgggccaagtgaggccctggccatgctactgcaggagaccactggagagctagaggcagccaaagccctagtgctgaagaggatccagatttggaaacggcagcagcagctggcagggaatggcgcaccgtttgaggagagcctggccccactccaggagaggtgtgaaagcctggtggacatttattcccagctacagcaggaggtaggggcggctggtggggagcttgagcccaagacccgggcatcgctgactggccggctggatgaagtcctgagaaccctcgtcaccagttgcttcctggtggagaagcagcccccccaggtactgaagactcagaccaagttccaggctggagttcgattcctgttgggcttgaggttcctgggggccccagccaagcctccgctggtcagggccgacatggtgacagagaagcaggcgcgggagctgagtgtgcctcagggtcctggggctggagcagaaagcactggagaaatcatcaacaacactgtgcccttggagaacagcattcctgggaactgctgctctgccctgttcaagaacctgcttctcaagaagatcaagcggtgtgagcggaagggcactgagtctgtcacagaggagaagtgcgctgtgctcttctctgccagcttcacacttggccccggcaaactccccatccagctccaggccctgtctctgcccctggtggtcatcgtccatggcaaccaagacaacaatgccaaagccactatcctgtgggacaatgccttctctgagatggaccgcgtgccctttgtggtggctgagcgggtgccctgggagaagatgtgtgaaactctgaacctgaagttcatggctgaggtggggaccaaccgggggctgctcccagagcacttcctcttcctggcccagaagatcttcaatgacaacagcctcagtatggaggccttccagcaccgttctgtgtcctggtcgcagttcaacaaggagatcctgctgggccgtggcttcaccttttggcagtggtttgatggtgtcctggacctcaccaaacgctgtctccggagctactggtctgaccggctgatcattggcttcatcagcaaacagtacgttactagccttcttctcaatgagcccgacggaacctttctcctccgcttcagcgactcagagattgggggcatcaccattgcccatgtcatccggggccaggatggctctccacagatagagaacatccagccattctctgccaaagacctgtccattcgctcactgggggaccgaatccgggatcttgctcagctcaaaaatctctatcccaagaagcccaaggatgaggctttccggagccactacaagcctgaacagatgggtaaggatggcaggggttatgtcccagctaccatcaagatgaccgtggaaagggaccaaccacttcctaccccagagctccagatgcctaccatggtgccttcttatgaccttggaatggcccctgattcctccatgagcatgcagcttggcccagatatggtgccccaggtgtacccaccacactctcactccatccccccgtatcaaggcctctccccagaagaatcagtcaacgtgttgtcagccttccaggagcctcacctgcagatgccccccagcctgggccagatgagcctgccctttgaccagcctcacccccagggcctgctgccgtgccagcctcaggagcatgctgtgtccagccctgaccccctgctctgctcagatgtgaccatggtggaagacagctgcctgagccagccagtgacagcgtttcctcagggcacttggattggtgaagacatattccctcctctgctgcctcccactgaacaggacctcactaagcttctcctggaggggcaaggggagtcggggggagggtccttggggcacagcccctcctgcagccctcccactatgggcaatctgggatctcaatgtcccacatggacctaagggccaaccccagttggtgatcccagctggagggagaacccaaagagacagctcttctactacccccacagacctgctctggacacttgctcatgccctgccaagcagcagatggggagggtgccctcctatccccacctactcct

SEQ ID NO: 292832 - DNA, 3119 bp, Artificial Sequence
  derived and/or modified sequence
cctgtcctggtcaagccaatcgacccagccttgttatgggttggggtggggagaaatgtgtcctcctgatggctggggaagaagaggggttggatatttctagccagggccatgccaggaggctggtcactctgcaaggggatgcagaggaaagcggtgcccactcactccagaggacctttctctcttgggctagagaaaggcctattggaggaacctgagcaggaggggcaacctccaagtcccagatcatgtctctgtggggtctggtctccaagatgcccccagaaaaagtgcagcggctctatgtcgactttccccaacacctgcggcatcttctgggtgactggctggagagccagccctgggagttcctggtcggctccgacgccttctgctgcaacttggctagtgccctactttcagacactgtccagcaccttcaggcctcggtgggagagcagggggaggggagcaccatcttgcaacacatcagcacccttgagagcatatatcagagggaccccctgaagctggtggccactttcagacaaatacttcaaggagagaaaaaagctgttatggaacagttccgccacttgccaatgcctttccactggaagcaggaagaactcaagtttaagacaggcttgcggaggctgcagcaccgagtaggggagatccaccttctccgagaagccctgcagaagggggctgaggctggccaagtgtctctgcacagcttgatagaaactcctgctaatgggactgggccaagtgaggccctggccatgctactgcaggagaccactggagagctagaggcagccaaagccctagtgctgaagaggatccagatttggaaacggcagcagcagctggcagggaatggcgcaccgtttgaggagagcctggccccactccaggagaggtgtgaaagcctggtggacatttattcccagctacagcaggaggtaggggcggctggtggggagcttgagcccaagacccgggcatcgctgactggccggctggatgaagtcctgagaaccctcgtcaccagttgcttcctggtggagaagcagcccccccaggtactgaagactcagaccaagttccaggctggagttcgattcctgttgggcttgaggttcctgggggccccagccaagcctccgctggtcagggccgacatggtgacagagaagcaggcgcgggagctgagtgtgcctcagggtcctggggctggagcagaaagcactggagaaatcatcaacaacactgtgcccttggagaacagcattcctgggaactgctgctctgccctgttcaagaacctgcttctcaagaagatcaagcggtgtgagcggaagggcactgagtctgtcacagaggagaagtgcgctgtgctcttctctgccagcttcacacttggccccggcaaactccccatccagctccaggccctgtctctgcccctggtggtcatcgtccatggcaaccaagacaacaatgccaaagccactatcctgtgggacaatgccttctctgagatggaccgcgtgccctttgtggtggctgagcgggtgccctgggagaagatgtgtgaaactctgaacctgaagttcatggctgaggtggggaccaaccgggggctgctcccagagcacttcctcttcctggcccagaagatcttcaatgacaacagcctcagtatggaggccttccagcaccgttctgtgtcctggtcgcagttcaacaaggagatcctgctgggccgtggcttcaccttttggcagtggtttgatggtgtcctggacctcaccaaacgctgtctccggagctactggtctgaccggctgatcattggcttcatcagcaaacagtacgttactagccttcttctcaatgagcccgacggaacctttctcctccgcttcagcgactcagagattgggggcatcaccattgcccatgtcatccggggccaggatggctctccacagatagagaacatccagccattctctgccaaagacctgtccattcgctcactgggggaccgaatccgggatcttgctcagctcaaaaatctctatcccaagaagcccaaggatgaggctttccggagccactacaagcctgaacagatgggtaaggatggcaggggttatgtcccagctaccatcaagatgaccgtggaaagggaccaaccacttcctaccccagagctccagatgcctaccatggtgccttcttatgaccttggaatggcccctgattcctccatgagcatgcagcttggcccagatatggtgccccaggtgtacccaccacactctcactccatccccccgtatcaaggcctctccccagaagaatcagtcaacgtgttgtcagccttccaggagcctcacctgcagatgccccccagcctgggccagatgagcctgccctttgaccagcctcacccccagggcctgctgccgtgccagcctcaggagcatgctgtgtccagccctgaccccctgctctgctcagatgtgaccatggtggaagacagctgcctgagccagccagtgacagcgtttcctcagggcacttggattggtgaagacatattccctcctctgctgcctcccactgaacaggacctcactaagcttctcctggaggggcaaggggagtcggggggagggtccttgggggcacagcccctcctgcagccctcccactatgggcaatctgggatctcaatgtcccacatggacctaagggccaaccccagttggtgatcccagctggagggagaacccaaagagacagctcttctactacccccacagacctgctctggacacttgctcatgccctgccaagcagcagatggggagggtgccctcctatccccacctactcctgggtcaggaggaaaagactaacaggagaatgcacagtgggtggagccaatccactccttcctttctatcattcccctgcccacctccttccagcactgactggaagggaagttcaggctctgagacacaccccaacatgcctgcacctgcagcgcgcacacgcacgcacacacacatacagagctctctgagggtgat

SEQ ID NO: 292833 - DNA, 670 bp, Artificial Sequence
  derived and/or modified sequence
agagctccagggagggacctgggtagaaggagaagccggaaacagcgggctggggcagccactgcttacactgaagagggaggacgggagaggagtgtgtgtgtgtgtgtgtgtgtgtgtgtgtatgtatgtgtgtgctttatcttatttttctttttggtggtggtggtggaaggggggaggtgctagcagggccagccttgaactcgctggacagagctacagacctatggggcctggaagtgcccgctgagaaagggagaagacagcagaggggttgccgagagaaaggcctattggaggaacctgagcaggaggggtaaggattctgccttgaggagaaaagagctggggtaagtgggcactggaggaaagaggggcatgaaggtcttggagcagaaacgtccagagaagggacctctccattttccatccctctgagaggcctgggagaggcaacctccaagtcccagatcatgtctctgtggggtctggtctccaagatgcccccagaaaaagtgcagcggctctatgtcgactttccccaacacctgcggcatcttctgggtgactggctggagagccagccctgggagttcctggtcggctccgacgccttctgctgcaacttggctagtgccctactttcagacactgtccagcaccttca

SEQ ID NO: 292834 - DNA, 553 bp, Artificial Sequence
  derived and/or modified sequence
acagacctatggggcctggaagtgcccgctgagaaagggagaagacagcagaggggttgccgagagaaaggcctattggaggaacctgagcaggaggggcaacctccaagtcccagatcatgtctctgtggggtctggtctccaagatgcccccagaaaaagtgcagcggctctatgtcgactttccccaacacctgcggcatcttctgggtgactggctggagagccagccctgggagttcctggtcggctccgacgccttctgctgcaacttggctagtgccctactttcagacactgtccagcaccttcaggcctcggtgggagagcagggggaggggagcaccatcttgcaacacatcagcacccttgagagcatatatcagagggaccccctgaagctggtggccactttcagacaaatacttcaaggagagaaaaaagctgttatggaacagttccgccacttgccaatgcctttccactggaagcaggaagaactcaagtttaagacaggcttgcggaggctgcagcaccgagtaggggagatcca

SEQ ID NO: 292835 - DNA, 603 bp, Artificial Sequence
  derived and/or modified sequence
ggttctctatcgctcatacccagcactaccaagtcaggggccttcctgcagtaccattcagctgcacccagatgccccaagagcaatgagcccacacgcagagctggaggacctgaaaggcaacctccaagtcccagatcatgtctctgtggggtctggtctccaagatgcccccagaaaaagtgcagcggctctatgtcgactttccccaacacctgcggcatcttctgggtgactggctggagagccagccctgggagttcctggtcggctccgacgccttctgctgcaacttggctagtgccctactttcagacactgtccagcaccttcaggcctcggtgggagagcagggggaggggagcaccatcttgcaacacatcagcacccttgagagcatatatcagagggaccccctgaagctggtggccactttcagacaaatacttcaaggagagaaaaaagctgttatggaacagttccgccacttgccaatgcctttccactggaagcaggaagaactcaagtttaagacaggcttgcggaggctgcagcaccgagtaggggagatccaccttctccgagaagccctgcagaaggggg

SEQ ID NO: 292836 - DNA, 565 bp, Artificial Sequence
  derived and/or modified sequence
cctgtcctggtcaagccaatcgacccagccttgttatgggttggggtggggagaaatgtgtcctcctgatggctggggaagaagaggggttggatatttctagccagggccatgccaggaggctggtcactctgcaaggggatgcagaggaaagcggtgcccactcactccagaggacctttctctcttgggctagagaaaggcctattggaggaacctgagcaggaggggcaacctccaagtcccagatcatgtctctgtggggtctggtctccaagatgcccccagaaaaagtgcagcggctctatgtcgactttccccaacacctgcggcatcttctgggtgactggctggagagccagccctgggagttcctggtcggctccgacgccttctgctgcaacttggctagtgccctactttcagacactgtccagcaccttcaggcctcggtgggagagcagggggaggggagcaccatcttgcaacacatcagcacccttgagagcatatatcagagggaccccctgaagctggtggccactttcagacaaatacttcaagg

SEQ ID NO: 292837 - DNA, 644 bp, Artificial Sequence
  derived and/or modified sequence
aaacagcgggctggggcagccactgcttacactgaagagggaggacgggagaggagtgtgtgtgtgtgtgtgtgtgtgtgtgtgtatgtatgtgtgtgctttatcttatttttctttttggtggtggtggtggaaggggggaggtgctagcagggccagccttgaactcgctggacagagctacagacctatggggcctggaagtgcccgctgagaaagggagaagacagcagaggggttgccgagagaaaggcctattggaggaacctgagcaggaggggtaaggattctgccttgaggagaaaagagctggggcaacctccaagtcccagatcatgtctctgtggggtctggtctccaagatgcccccagaaaaagtgcagcggctctatgtcgactttccccaacacctgcggcatcttctgggtgactggctggagagccagccctgggagttcctggtcggctccgacgccttctgctgcaacttggctagtgccctactttcagacactgtccagcaccttcaggcctcggtgggagagcagggggaggggagcaccatcttgcaacacatcagcacccttgagagcatatatcagagggaccccctgaagctggtggccactttcagacaaatactt

SEQ ID NO: 292838 - DNA, 661 bp, Artificial Sequence
  derived and/or modified sequence
acattcacgcattgggcaactcagagaagctgttttaactttcgatcctgtggtcccacaatcagaggactcgggcagataggggttgagataagcgagtttaggccaccaagcgggcggacgaggatcccagaccttgcgcttcccttctgagtttgggaggcaacctccaagtcccagatcatgtctctgtggggtctggtctccaagatgcccccagaaaaagtgcagcggctctatgtcgactttccccaacacctgcggcatcttctgggtgactggctggagagccagccctgggagttcctggtcggctccgacgccttctgctgcaacttggctagtgccctactttcagacactgtccagcaccttcaggcctcggtgggagagcagggggaggggagcaccatcttgcaacacatcagcacccttgagagcatatatcagagggaccccctgaagctggtggccactttcagacaaatacttcaaggagagaaaaaagctgttatggaacagttccgccacttgccaatgcctttccactggaagcaggaagaactcaagtttaagacaggcttgcggaggctgcagcaccgagtaggggagatccaccttctccgagaagccctgcagaagggggctgaggctggccaag

SEQ ID NO: 292839 - DNA, 2924 bp, Artificial Sequence
  derived and/or modified sequence
gtatgcaggagtgggggctggggagagggtgcccccaggggtccaagggggacgcggaatctcactcaccgtcgatagccgccgcgaccagagctgagagcaggggcagcagcaggagcaacggcggggcaacctccaagtcccagatcatgtctctgtggggtctggtctccaagatgcccccagaaaaagtgcagcggctctatgtcgactttccccaacacctgcggcatcttctgggtgactggctggagagccagccctgggagttcctggtcggctccgacgccttctgctgcaacttggctagtgccctactttcagacactgtccagcaccttcaggcctcggtgggagagcagggggaggggagcaccatcttgcaacacatcagcacccttgagagcatatatcagagggaccccctgaagctggtggccactttcagacaaatacttcaaggagagaaaaaagctgttatggaacagttccgccacttgccaatgcctttccactggaagcaggaagaactcaagtttaagacaggcttgcggaggctgcagcaccgagtaggggagatccaccttctccgagaagccctgcagaagggggctgaggctggccaagtgtctctgcacagcttgatagaaactcctgctaatgggactgggccaagtgaggccctggccatgctactgcaggagaccactggagagctagaggcagccaaagccctagtgctgaagaggatccagatttggaaacggcagcagcagctggcagggaatggcgcaccgtttgaggagagcctggccccactccaggagaggtgtgaaagcctggtggacatttattcccagctacagcaggaggtaggggcggctggtggggagcttgagcccaagacccgggcatcgctgactggccggctggatgaagtcctgagaaccctcgtcaccagttgcttcctggtggagaagcagcccccccaggtactgaagactcagaccaagttccaggctggagttcgattcctgttgggcttgaggttcctgggggccccagccaagcctccgctggtcagggccgacatggtgacagagaagcaggcgcgggagctgagtgtgcctcagggtcctggggctggagcagaaagcactggagaaatcatcaacaacactgtgcccttggagaacagcattcctgggaactgctgctctgccctgttcaagaacctgcttctcaagaagatcaagcggtgtgagcggaagggcactgagtctgtcacagaggagaagtgcgctgtgctcttctctgccagcttcacacttggccccggcaaactccccatccagctccaggccctgtctctgcccctggtggtcatcgtccatggcaaccaagacaacaatgccaaagccactatcctgtgggacaatgccttctctgagatggaccgcgtgccctttgtggtggctgagcgggtgccctgggagaagatgtgtgaaactctgaacctgaagttcatggctgaggtggggaccaaccgggggctgctcccagagcacttcctcttcctggcccagaagatcttcaatgacaacagcctcagtatggaggccttccagcaccgttctgtgtcctggtcgcagttcaacaaggagatcctgctgggccgtggcttcaccttttggcagtggtttgatggtgtcctggacctcaccaaacgctgtctccggagctactggtctgaccggctgatcattggcttcatcagcaaacagtacgttactagccttcttctcaatgagcccgacggaacctttctcctccgcttcagcgactcagagattgggggcatcaccattgcccatgtcatccggggccaggatggctctccacagatagagaacatccagccattctctgccaaagacctgtccattcgctcactgggggaccgaatccgggatcttgctcagctcaaaaatctctatcccaagaagcccaaggatgaggctttccggagccactacaagcctgaacagatgggtaaggatggcaggggttatgtcccagctaccatcaagatgaccgtggaaagggaccaaccacttcctaccccagagctccagatgcctaccatggtgccttcttatgaccttggaatggcccctgattcctccatgagcatgcagcttggcccagatatggtgccccaggtgtacccaccacactctcactccatccccccgtatcaaggcctctccccagaagaatcagtcaacgtgttgtcagccttccaggagcctcacctgcagatgccccccagcctgggccagatgagcctgccctttgaccagcctcacccccagggcctgctgccgtgccagcctcaggagcatgctgtgtccagccctgaccccctgctctgctcagatgtgaccatggtggaagacagctgcctgagccagccagtgacagcgtttcctcagggcacttggattggtgaagacatattccctcctctgctgcctcccactgaacaggacctcactaagcttctcctggaggggcaaggggagtcggggggagggtccttgggggcacagcccctcctgcagccctcccactatgggcaatctgggatctcaatgtcccacatggacctaagggccaaccccagttggtgatcccagctggagggagaacccaaagagacagctcttctactacccccacagacctgctctggacacttgctcatgccctgccaagcagcagatggggagggtgccctcctatccccacctactcctgggtcaggaggaaaagactaacaggagaatgcacagtgggtggagccaatccactccttcctttctatcattcccctgcccacctccttccagcactgactggaa

SEQ ID NO: 292840 - DNA, 644 bp, Artificial Sequence
  derived and/or modified sequence
cttccccttcaaggggctgaagacaaaaggtgcccctgtcctggtcaagccaatcgacccagccttgttatgggttggggtggggagaaatgtgtcctcctgatggctggggaagaagaggggttggatatttctagccagggccatgccaggaggctggtcactctgcaaggggatgcagaggaaagcggtgcccactcactccagaggacctttctctcttgggctagagaaaggcctattggaggaacctgagcaggaggggtaaggattctgccttgaggagaaaagagctggggtaagtgggcactggaggaaagaggggcatgaaggtcttggagcagaaacgtccagagaagggacctctccattttccatccctctgagaggcctgggagaggcaacctccaagtcccagatcatgtctctgtggggtctggtctccaagatgcccccagaaaaagtgcagcggctctatgtcgactttccccaacacctgcggcatcttctgggtgactggctggagagccagccctgggagttcctggtcggctccgacgccttctgctgcaacttggctagtgccctactttcagacactgtccagcaccttcaggcctcggtgggagagcagggggagggga

SEQ ID NO: 292841 - DNA, 2544 bp, Artificial Sequence
  derived and/or modified sequence
atgagcctgtggggcctggtgagcaagatgccccccgagaaggtgcagagactgtacgtggacttcccccagcacctgagacacctgctgggcgactggctggagagccagccctgggagttcctggtgggcagcgacgccttctgctgcaacctggccagcgccctgctgagcgacaccgtgcagcacctgcaggccagcgtgggcgagcagggcgagggcagcaccatcctgcagcacatcagcaccctggagagcatctaccagagagaccccctgaagctggtggccaccttcagacagatcctgcagggcgagaagaaggccgtgatggagcagttcagacacctgcccatgcccttccactggaagcaggaggagctgaagttcaagaccggcctgagaagactgcagcacagagtgggcgagatccacctgctgagagaggccctgcagaagggcgccgaggccggccaggtgagcctgcacagcctgatcgagacccccgccaacggcaccggccccagcgaggccctggccatgctgctgcaggagaccaccggcgagctggaggccgccaaggccctggtgctgaagagaatccagatctggaagagacagcagcagctggccggcaacggcgcccccttcgaggagagcctggcccccctgcaggagagatgcgagagcctggtggacatctacagccagctgcagcaggaggtgggcgccgccggcggcgagctggagcccaagaccagagccagcctgaccggcagactggacgaggtgctgagaaccctggtgaccagctgcttcctggtggagaagcagcccccccaggtgctgaagacccagaccaagttccaggccggcgtgagattcctgctgggcctgagattcctgggcgcccccgccaagccccccctggtgagagccgacatggtgaccgagaagcaggccagagagctgagcgtgccccagggccccggcgccggcgccgagagcaccggcgagatcatcaacaacaccgtgcccctggagaacagcatccccggcaactgctgcagcgccctgttcaagaacctgctgctgaagaagatcaagagatgcgagagaaagggcaccgagagcgtgaccgaggagaagtgcgccgtgctgttcagcgccagcttcaccctgggccccggcaagctgcccatccagctgcaggccctgagcctgcccctggtggtgatcgtgcacggcaaccaggacaacaacgccaaggccaccatcctgtgggacaacgccttcagcgagatggacagagtgcccttcgtggtggccgagagagtgccctgggagaagatgtgcgagaccctgaacctgaagttcatggccgaggtgggcaccaacagaggcctgctgcccgagcacttcctgttcctggcccagaagatcttcaacgacaacagcctgagcatggaggccttccagcacagaagcgtgagctggagccagttcaacaaggagatcctgctgggcagaggcttcaccttctggcagtggttcgacggcgtgctggacctgaccaagagatgcctgagaagctactggagcgacagactgatcatcggcttcatcagcaagcagtacgtgaccagcctgctgctgaacgagcccgacggcaccttcctgctgagattcagcgacagcgagatcggcggcatcaccatcgcccacgtgatcagaggccaggacggcagcccccagatcgagaacatccagcccttcagcgccaaggacctgagcatcagaagcctgggcgacagaatcagagacctggcccagctgaagaacctgtaccccaagaagcccaaggacgaggccttcagaagccactacaagcccgagcagatgggcaaggacggcagaggctacgtgcccgccaccatcaagatgaccgtggagagagaccagcccctgcccacccccgagctgcagatgcccaccatggtgcccagctacgacctgggcatggcccccgacagcagcatgagcatgcagctgggccccgacatggtgccccaggtgtaccccccccacagccacagcatccccccctaccagggcctgagccccgaggagagcgtgaacgtgctgagcgccttccaggagccccacctgcagatgccccccagcctgggccagatgagcctgcccttcgaccagccccacccccagggcctgctgccctgccagccccaggagcacgccgtgagcagccccgaccccctgctgtgcagcgacgtgaccatggtggaggacagctgcctgagccagcccgtgaccgccttcccccagggcacctggatcggcgaggacatcttcccccccctgctgccccccaccgagcaggacctgaccaagctgctgctggagggccagggcgagagcggcggcggcagcctgggcgcccagcccctgctgcagcccagccactacggccagagcggcatcagcatgagccacatggacctgagagccaaccccagctggtag

SEQ ID NO: 292842 - DNA, 2214 bp, Artificial Sequence
  derived and/or modified sequence
atggagcagttcagacacctgcccatgcccttccactggaagcaggaggagctgaagttcaagaccggcctgagaagactgcagcacagagtgggcgagatccacctgctgagagaggccctgcagaagggcgccgaggccggccaggtgagcctgcacagcctgatcgagacccccgccaacggcaccggccccagcgaggccctggccatgctgctgcaggagaccaccggcgagctggaggccgccaaggccctggtgctgaagagaatccagatctggaagagacagcagcagctggccggcaacggcgcccccttcgaggagagcctggcccccctgcaggagagatgcgagagcctggtggacatctacagccagctgcagcaggaggtgggcgccgccggcggcgagctggagcccaagaccagagccagcctgaccggcagactggacgaggtgctgagaaccctggtgaccagctgcttcctggtggagaagcagcccccccaggtgctgaagacccagaccaagttccaggccggcgtgagattcctgctgggcctgagattcctgggcgcccccgccaagccccccctggtgagagccgacatggtgaccgagaagcaggccagagagctgagcgtgccccagggccccggcgccggcgccgagagcaccggcgagatcatcaacaacaccgtgcccctggagaacagcatccccggcaactgctgcagcgccctgttcaagaacctgctgctgaagaagatcaagagatgcgagagaaagggcaccgagagcgtgaccgaggagaagtgcgccgtgctgttcagcgccagcttcaccctgggccccggcaagctgcccatccagctgcaggccctgagcctgcccctggtggtgatcgtgcacggcaaccaggacaacaacgccaaggccaccatcctgtgggacaacgccttcagcgagatggacagagtgcccttcgtggtggccgagagagtgccctgggagaagatgtgcgagaccctgaacctgaagttcatggccgaggtgggcaccaacagaggcctgctgcccgagcacttcctgttcctggcccagaagatcttcaacgacaacagcctgagcatggaggccttccagcacagaagcgtgagctggagccagttcaacaaggagatcctgctgggcagaggcttcaccttctggcagtggttcgacggcgtgctggacctgaccaagagatgcctgagaagctactggagcgacagactgatcatcggcttcatcagcaagcagtacgtgaccagcctgctgctgaacgagcccgacggcaccttcctgctgagattcagcgacagcgagatcggcggcatcaccatcgcccacgtgatcagaggccaggacggcagcccccagatcgagaacatccagcccttcagcgccaaggacctgagcatcagaagcctgggcgacagaatcagagacctggcccagctgaagaacctgtaccccaagaagcccaaggacgaggccttcagaagccactacaagcccgagcagatgggcaaggacggcagaggctacgtgcccgccaccatcaagatgaccgtggagagagaccagcccctgcccacccccgagctgcagatgcccaccatggtgcccagctacgacctgggcatggcccccgacagcagcatgagcatgcagctgggccccgacatggtgccccaggtgtaccccccccacagccacagcatccccccctaccagggcctgagccccgaggagagcgtgaacgtgctgagcgccttccaggagccccacctgcagatgccccccagcctgggccagatgagcctgcccttcgaccagccccacccccagggcctgctgccctgccagccccaggagcacgccgtgagcagccccgaccccctgctgtgcagcgacgtgaccatggtggaggacagctgcctgagccagcccgtgaccgccttcccccagggcacctggatcggcgaggacatcttcccccccctgctgccccccaccgagcaggacctgaccaagctgctgctggagggccagggcgagagcggcggcggcagcctgggcgcccagcccctgctgcagcccagccactacggccagagcggcatcagcatgagccacatggacctgagagccaaccccagctggtag

SEQ ID NO: 292843 - DNA, 2040 bp, Artificial Sequence
  derived and/or modified sequence
atgagcctgtggggcctggtgagcaagatgccccccgagaaggtgcagagactgtacgtggacttcccccagcacctgagacacctgctgggcgactggctggagagccagccctgggagttcctggtgggcagcgacgccttctgctgcaacctggccagcgccctgctgagcgacaccgtgcagcacctgcaggccagcgtgggcgagcagggcgagggcagcaccatcctgcagcacatcagcaccctggagagcatctaccagagagaccccctgaagctggtggccaccttcagacagatcctgcagggcgagaagaaggccgtgatggagcagttcagacacctgcccatgcccttccactggaagcaggaggagctgaagttcaagaccggcctgagaagactgcagcacagagtgggcgagatccacctgctgagagaggccctgcagaagggcgccgaggccggccaggtgagcctgcacagcctgatcgagacccccgccaacggcaccggccccagcgaggccctggccatgctgctgcaggagaccaccggcgagctggaggccgccaaggccctggtgctgaagagaatccagatctggaagagacagcagcagctggccggcaacggcgcccccttcgaggagagcctggcccccctgcaggagagatgcgagagcctggtggacatctacagccagctgcagcaggaggtgggcgccgccggcggcgagctggagcccaagaccagagccagcctgaccggcagactggacgaggtgctgagaaccctggtgaccagctgcttcctggtggagaagcagcccccccaggtgctgaagacccagaccaagttccaggccggcgtgagattcctgctgggcctgagattcctgggcgcccccgccaagccccccctggtgagagccgacatggtgaccgagaagcaggccagagagctgagcgtgccccagggccccggcgccggcgccgagagcaccggcgagatcatcaacaacaccgtgcccctggagaacagcatccccggcaactgctgcagcgccctgttcaagaacctgctgctgaagaagatcaagagatgcgagagaaagggcaccgagagcgtgaccgaggagaagtgcgccgtgctgttcagcgccagcttcaccctgggccccggcaagctgcccatccagctgcaggccctgagcctgcccctggtggtgatcgtgcacggcaaccaggacaacaacgccaaggccaccatcctgtgggacaacgccttcagcgagatggacagagtgcccttcgtggtggccgagagagtgccctgggagaagatgtgcgagaccctgaacctgaagttcatggccgaggtgggcaccaacagaggcctgctgcccgagcacttcctgttcctggcccagaagatcttcaacgacaacagcctgagcatggaggccttccagcacagaagcgtgagctggagccagttcaacaaggagatcctgctgggcagaggcttcaccttctggcagtggttcgacggcgtgctggacctgaccaagagatgcctgagaagctactggagcgacagactgatcatcggcttcatcagcaagcagtacgtgaccagcctgctgctgaacgagcccgacggcaccttcctgctgagattcagcgacagcgagatcggcggcatcaccatcgcccacgtgatcagaggccaggacggcagcccccagatcgagaacatccagcccttcagcgccaaggacctgagcatcagaagcctgggcgacagaatcagagacctggcccagctgaagaacctgtaccccaagaagcccaaggacgaggccttcagaagccactacaagcccgagcagatgggcaaggacggcagaggctacgtgcccgccaccatcaagatgaccgtggagagagaccagcccctgcccacccccgagctgcagatgcccaccatggtgcccagctacgacctgggcatggccctgatccccccctag

SEQ ID NO: 292844 - DNA, 2193 bp, Artificial Sequence
  derived and/or modified sequence
atggagcagttcagacacctgcccatgcccttccactggaagcaggaggagctgaagttcaagaccggcctgagaagactgcagcacagagtgggcgagatccacctgctgagagaggccctgcagaagggcgccgaggccggccaggtgagcctgcacagcctgatcgagacccccgccaacggcaccggccccagcgaggccctggccatgctgctgcaggagaccaccggcgagctggaggccgccaaggccctggtgctgaagagaatccagatctggaagagacagcagcagctggccggcaacggcgcccccttcgaggagagcctggcccccctgcaggagagatgcgagagcctggtggacatctacagccagctgcagcaggaggtgggcgccgccggcggcgagctggagcccaagaccagagccagcctgaccggcagactggacgaggtgctgagaaccctggtgaccagctgcttcctggtggagaagcagcccccccaggtgctgaagacccagaccaagttccaggccggcgtgagattcctgctgggcctgagattcctgggcgcccccgccaagccccccctggtgagagccgacatggtgaccgagaagcaggccagagagctgagcgtgccccagggccccggcgccggcgccgagagcaccggcgagatcatcaacaacaccgtgcccctggagaacagcatccccggcaactgctgcagcgccctgttcaagaacctgctgctgaagaagatcaagagatgcgagagaaagggcaccgagagcgtgaccgaggagaagtgcgccgtgctgttcagcgccagcttcaccctgggccccggcaagctgcccatccagctgcaggccctgagcctgcccctggtggtgatcgtgcacggcaaccaggacaacaacgccaaggccaccatcctgtgggacaacgccttcagcgagatggacagagtgcccttcgtggtggccgagagagtgccctgggagaagatgtgcgagaccctgaacctgaagttcatggccgaggtgggcaccaacagaggcctgctgcccgagcacttcctgttcctggcccagaagatcttcaacgacaacagcctgagcatggaggccttccagcacagaagcgtgagctggagccagttcaacaaggagatcctgctgggcagaggcttcaccttctggcagtggttcgacggcgtgctggacctgaccaagagatgcctgagaagctactggagcgacagactgatcatcggcttcatcagcaagcagtacgtgaccagcctgctgctgaacgagcccgacggcaccttcctgctgagattcagcgacagcgagatcggcggcatcaccatcgcccacgtgatcagaggccaggacggcagcccccagatcgagaacatccagcccttcagcgccaaggacctgagcatcagaagcctgggcgacagaatcagagacctggcccagctgaagaacctgtaccccaagaagcccaaggacgaggccttcagaagccactacaagcccgagcagatgggcaaggacggcagaggctacgtgcccgccaccatcaagatgaccgtggagagagaccagcccctgcccacccccgagctgcagatgcccaccatggtgcccagctacgacctgggcatggcccccgacagcagcatgagcatgcagctgggccccgacatggtgccccaggtgtaccccccccacagccacagcatccccccctaccagggcctgagccccgaggagagcgtgaacgtgctgagcgccttccaggagccccacctgcagatgccccccagcctgggccagatgagcctgcccttcgaccagccccacccccagggcctgctgccctgccagccccaggagcacgccgtgagcagccccgaccccctgctgtgcagcgacgtgaccatggtggaggacagctgcctgagccagcccgtgaccgccttcccccagggcacctggatcggcgaggacatcttcccccccctgctgccccccaccgagcaggacctgaccaagctgctgctggagggccagggcgagagcggcggcggcagcctgggccacagccccagctgcagcccccccaccatgggcaacctgggcagccagtgccccacctggacctag

SEQ ID NO: 292845 - DNA, 195 bp, Artificial Sequence
  derived and/or modified sequence
atgagcctgtggggcctggtgagcaagatgccccccgagaaggtgcagagactgtacgtggacttcccccagcacctgagacacctgctgggcgactggctggagagccagccctgggagttcctggtgggcagcgacgccttctgctgcaacctggccagcgccctgctgagcgacaccgtgcagcacctgtag

SEQ ID NO: 292846 - DNA, 435 bp, Artificial Sequence
  derived and/or modified sequence
atgagcctgtggggcctggtgagcaagatgccccccgagaaggtgcagagactgtacgtggacttcccccagcacctgagacacctgctgggcgactggctggagagccagccctgggagttcctggtgggcagcgacgccttctgctgcaacctggccagcgccctgctgagcgacaccgtgcagcacctgcaggccagcgtgggcgagcagggcgagggcagcaccatcctgcagcacatcagcaccctggagagcatctaccagagagaccccctgaagctggtggccaccttcagacagatcctgcagggcgagaagaaggccgtgatggagcagttcagacacctgcccatgcccttccactggaagcaggaggagctgaagttcaagaccggcctgagaagactgcagcacagagtgggcgagatctag

SEQ ID NO: 292847 - DNA, 465 bp, Artificial Sequence
  derived and/or modified sequence
atgagcctgtggggcctggtgagcaagatgccccccgagaaggtgcagagactgtacgtggacttcccccagcacctgagacacctgctgggcgactggctggagagccagccctgggagttcctggtgggcagcgacgccttctgctgcaacctggccagcgccctgctgagcgacaccgtgcagcacctgcaggccagcgtgggcgagcagggcgagggcagcaccatcctgcagcacatcagcaccctggagagcatctaccagagagaccccctgaagctggtggccaccttcagacagatcctgcagggcgagaagaaggccgtgatggagcagttcagacacctgcccatgcccttccactggaagcaggaggagctgaagttcaagaccggcctgagaagactgcagcacagagtgggcgagatccacctgctgagagaggccctgcagaagggctag

SEQ ID NO: 292848 - DNA, 318 bp, Artificial Sequence
  derived and/or modified sequence
atgagcctgtggggcctggtgagcaagatgccccccgagaaggtgcagagactgtacgtggacttcccccagcacctgagacacctgctgggcgactggctggagagccagccctgggagttcctggtgggcagcgacgccttctgctgcaacctggccagcgccctgctgagcgacaccgtgcagcacctgcaggccagcgtgggcgagcagggcgagggcagcaccatcctgcagcacatcagcaccctggagagcatctaccagagagaccccctgaagctggtggccaccttcagacagatcctgcagggctag

SEQ ID NO: 292849 - DNA, 312 bp, Artificial Sequence
  derived and/or modified sequence
atgagcctgtggggcctggtgagcaagatgccccccgagaaggtgcagagactgtacgtggacttcccccagcacctgagacacctgctgggcgactggctggagagccagccctgggagttcctggtgggcagcgacgccttctgctgcaacctggccagcgccctgctgagcgacaccgtgcagcacctgcaggccagcgtgggcgagcagggcgagggcagcaccatcctgcagcacatcagcaccctggagagcatctaccagagagaccccctgaagctggtggccaccttcagacagatcctgtag

SEQ ID NO: 292850 - DNA, 480 bp, Artificial Sequence
  derived and/or modified sequence
atgagcctgtggggcctggtgagcaagatgccccccgagaaggtgcagagactgtacgtggacttcccccagcacctgagacacctgctgggcgactggctggagagccagccctgggagttcctggtgggcagcgacgccttctgctgcaacctggccagcgccctgctgagcgacaccgtgcagcacctgcaggccagcgtgggcgagcagggcgagggcagcaccatcctgcagcacatcagcaccctggagagcatctaccagagagaccccctgaagctggtggccaccttcagacagatcctgcagggcgagaagaaggccgtgatggagcagttcagacacctgcccatgcccttccactggaagcaggaggagctgaagttcaagaccggcctgagaagactgcagcacagagtgggcgagatccacctgctgagagaggccctgcagaagggcgccgaggccggccagtag

SEQ ID NO: 292851 - DNA, 225 bp, Artificial Sequence
  derived and/or modified sequence
atgagcctgtggggcctggtgagcaagatgccccccgagaaggtgcagagactgtacgtggacttcccccagcacctgagacacctgctgggcgactggctggagagccagccctgggagttcctggtgggcagcgacgccttctgctgcaacctggccagcgccctgctgagcgacaccgtgcagcacctgcaggccagcgtgggcgagcagggcgagggctag

SEQ ID NO: 292852 - protein, 237 aa, Artificial Sequence
  derived and/or modified sequence
MAGVSACIKYSMFTFNFLFWLCGILILALAIWVRVSNDSQAIFGSEDVGSSSYVAVDILIAVGAIIMILGFLGCCGAIKESRCMLLLFFIGLLLILLLQVATGILGAVFKSKSDRIVNETLYENTKLLSATGESEKQFQEAIIVFQEEFKCCGLVNGAADWGNNFQHYPELCACLDKQRPCQSYNGKQVYKETCISFIKDFLAKNLIIVIGISFGLAVIEILGLVFSMVLYCQIGNK

SEQ ID NO: 292853 - DNA, 714 bp, Artificial Sequence
  derived and/or modified sequence
atggccggcgtgagcgcctgcatcaagtacagcatgttcaccttcaacttcctgttctggctgtgcggcatcctgatcctggccctggccatctgggtgagagtgagcaacgacagccaggccatcttcggcagcgaggacgtgggcagcagcagctacgtggccgtggacatcctgatcgccgtgggcgccatcatcatgatcctgggcttcctgggctgctgcggcgccatcaaggagagcagatgcatgctgctgctgttcttcatcggcctgctgctgatcctgctgctgcaggtggccaccggcatcctgggcgccgtgttcaagagcaagagcgacagaatcgtgaacgagaccctgtacgagaacaccaagctgctgagcgccaccggcgagagcgagaagcagttccaggaggccatcatcgtgttccaggaggagttcaagtgctgcggcctggtgaacggcgccgccgactggggcaacaacttccagcactaccccgagctgtgcgcctgcctggacaagcagagaccctgccagagctacaacggcaagcaggtgtacaaggagacctgcatcagcttcatcaaggacttcctggccaagaacctgatcatcgtgatcggcatcagcttcggcctggccgtgatcgagatcctgggcctggtgttcagcatggtgctgtactgccagatcggcaacaagtag

SEQ ID NO: 292854 - DNA, 714 bp, Artificial Sequence
  derived and/or modified sequence
atggccggagtctccgcgtgcatcaagtattcaatgttcacatttaactttctgttctggctttgtggtatcctcatattggctctggccatttgggtcagagtttctaatgacagccaagcaatcttcggcagcgaagatgttggcagcagcagctacgtcgccgttgacattttgattgcggtgggcgcaattataatgatcctcgggtttctgggttgttgcggtgccattaaggaatctagatgtatgctcctgcttttctttattgggctgctgctgatactgcttctgcaggtggccacagggatcttgggcgcagtctttaagagtaaaagtgaccgcatcgtaaacgagacgctgtatgaaaatacgaagcttctctctgcaaccggggagtccgagaagcagttccaggaggctatcattgtatttcaggaggaattcaaatgctgcggcctcgtgaatggggcggctgattgggggaataacttccagcactatccagagttatgtgcgtgtctggacaagcaaaggccttgtcaaagttacaatggaaagcaagtttacaaggaaacctgtatcagtttcattaaagatttcttagctaaaaacttaataatcgtcatcggaatttcattcggtctagccgtgatcgagatcttggggctggtgttttcaatggtactttactgccaaatcggaaacaagtag

SEQ ID NO: 292855 - DNA, 714 bp, Artificial Sequence
  derived and/or modified sequence
atggcgggagtcagcgcttgcataaaatactctatgtttacttttaactttcttttttggctttgtgggatcctcatcttggcactagctatctgggtacgtgtgagcaacgatagccaggctatcttcgggtcagaggacgttggcagtagctcatacgtcgcagtagatatactcattgctgttggggctattatcatgatcctgggctttctgggatgttgcggtgcgattaaggaatccaggtgcatgctgctcttattttttatcggcctcttactaatccttctcttgcaggtcgcgactggaattctaggcgcggtgttcaaatcaaagtcagaccgcatcgtcaatgagaccctctacgagaatacaaaactgctatctgcgacgggcgagagcgaaaaacagttccaggaggcgatcattgtttttcaagaggaattcaagtgttgtggactcgtaaacggggcggcagactggggaaacaacttccagcactatcctgagctgtgtgcatgcctcgacaagcaacggccttgccaatcatacaatggcaaacaggtgtacaaagagacctgcatttcctttatcaaggattttctcgccaagaatcttataatcgttatcgggattagctttggcctagccgttatcgagattctcggactagttttctccatggtgttgtactgtcagatcggcaataagtag

SEQ ID NO: 292856 - DNA, 714 bp, Artificial Sequence
  derived and/or modified sequence
atggccggcgtgagtgcatgtatcaaatatagcatgttcacgttcaattttctgttctggctctgtgggatcctcatactggcccttgcaatttgggtccgagtatctaacgatagtcaagctatatttggaagtgaggatgtgggtagctcttcttatgtggcagtcgatattttaatagccgtcggggccatcattatgattctcggtttcttgggctgctgtggagcgattaaggagtccagatgcatgctgttgttgttttttattggcctgcttctgattcttttgctgcaagtcgccaccgggatcctgggcgccgtattcaaaagcaaaagtgaccggattgtcaatgagacgctgtacgagaacactaagctcctgagtgccacgggagagagtgaaaagcagtttcaggaggctattatagtctttcaggaggagtttaagtgttgtggtctggtaaacggcgccgcggattggggaaacaacttccagcactacccggaactatgcgcgtgtctggataaacaaagaccctgtcagtcctacaacggcaaacaagtctataaggagacatgcatctcttttattaaggatttcctggctaagaacctgatcatcgtcatcggaatttcattcgggctggcggttatagagatcctagggcttgtgttctcaatggtgctctactgtcaaattggcaacaaatag

SEQ ID NO: 292857 - DNA, 714 bp, Artificial Sequence
  derived and/or modified sequence
atggccggcgtgtctgcctgcatcaagtacagcatgttcaccttcaacttcctgttctggctgtgtggcatcctgatcctggccctggccatctgggtgcgggtgtccaatgacagccaggccatctttggaagtgaagatgtgggcagcagcagctatgtggccgtggacatcctgattgctgtgggcgccatcatcatgatcctgggcttcctgggctgctgcggggccatcaaggagagccgctgcatgctgctgctcttcttcatcggcctgctgctgatcctgctgctgcaggtggccaccggcatcctgggcgctgtgttcaagagcaagagtgaccgcatcgtgaatgagaccctgtatgagaacaccaagctgctgagcgccactggagagagcgagaagcagttccaggaggccatcatcgtgttccaggaggagttcaagtgctgcggcctggtgaatggagctgctgactggggcaacaacttccagcactacccagagctgtgtgcctgcctggacaagcagaggccctgccagagctacaacgggaagcaggtgtacaaggagacctgcatctccttcatcaaggacttcctggccaagaacctgatcatcgtcatcggcatcagctttggcctggccgtgattgagatcctgggcctggtgttctccatggtgctgtactgccagatcggcaacaagtag

SEQ ID NO: 292858 - DNA, 714 bp, Artificial Sequence
  derived and/or modified sequence
atggccggcgtgagcgcctgcatcaagtacagcatgttcaccttcaatttcctattttggttatgtggtatcctcattctggctttggcgatttgggtgcgggtgagcaacgactctcaggcaatctttggatctgaggatgttgggtcttcatcgtacgttgcagtggacatcctcattgctgtgggcgctataataatgatcctgggtttcctcggttgttgtggtgctattaaggagtcccgctgtatgcttctcctcttttttattgggcttctgctgatcctcctactgcaagtggcaactgggatcctgggggccgtttttaagtccaagtccgatagaattgtgaatgaaacactgtacgagaatacaaaacttttaagcgctaccggtgagtcggagaagcaatttcaagaagcaatcatagtttttcaggaagaattcaaatgctgcggtttggtgaatggcgcggccgactgggggaataacttccagcattaccctgaactgtgtgcttgcctggacaagcaacgcccttgccagtcctacaatggaaagcaagtgtacaaggagacttgtatctcattcattaaggatttcttagcgaaaaatctcataatcgtgataggaatttctttcggcttggccgtgattgaaatcttagggctggtcttctccatggtcctctactgtcagattggtaataagtag

SEQ ID NO: 292859 - DNA, 714 bp, Artificial Sequence
  derived and/or modified sequence
atggccggcgtgagcgcctgcatcaagtacagcatgttcaccttcaatttccttttttggttgtgcgggattctcatcctggcattagcgatctgggtgcgtgtgtctaatgatagccaggccatattcggaagtgaggatgtgggcagcagtagctacgtggcggtggacatcttaattgccgttggagctattataatgatcctgggtttcctcggctgttgtggtgctatcaaggaatctaggtgtatgttactcctctttttcattggtctcctgctcatcctgttactgcaggtcgctacgggcatcctaggtgccgtgtttaagtccaagagcgataggattgtcaatgagaccctgtatgagaacacgaaactcttaagtgctactggcgagtctgagaaacagttccaggaagccatcattgtgttccaagaagagttcaaatgttgtggcctcgtgaatggagccgcggactggggcaataacttccagcactatcccgaactgtgcgcttgcctcgataagcaacggccttgccaatcatacaacgggaagcaagtttataaggagacctgcatctcattcatcaaagattttctagcgaagaatctgatcatcgtaataggtatctccttcggcctagctgtgatcgagatactgggtctagtgttcagcatggtcctgtactgccagatcgggaataagtag

SEQ ID NO: 292860 - DNA, 714 bp, Artificial Sequence
  derived and/or modified sequence
atggccggcgtgagcgcctgcatcaagtacagcatgttcaccttcaacttcctcttttggctctgtggaatccttatacttgctctcgctatttgggtgcgtgtttccaacgattcacaggccattttcggctctgaagacgtggggagctcttcctacgttgcagtcgatatcttgatcgcagtaggagctatcatcatgatcctcggatttctggggtgctgcggcgcgattaaagagagtcgctgtatgcttctgctgttcttcatcggcttgctgcttattctcctgctgcaggtagctactgggatcctcggggctgtctttaagtccaaaagtgaccgtatcgtcaatgagacactgtatgaaaatacgaagctcctctctgcaacaggagaatcagagaaacaatttcaagaagccatcattgtgttccaggaggagttcaaatgctgcgggttggtcaatggcgctgccgattggggaaataatttccagcattatccagagctctgcgcctgtttggacaaacagagaccttgccagagttacaacggcaagcaagtttacaaagagacctgcatttcttttattaaagactttctggccaaaaatctcattattgtgataggcatttcctttggtctggcagtcattgaaatcttagggctggtgtttagcatggtcctttactgtcagatcggaaataagtag

SEQ ID NO: 292861 - DNA, 714 bp, Artificial Sequence
  derived and/or modified sequence
atggcaggagtcagcgcctgtattaagtactcgatgttcacatttaactttctgttctggctgtgtgggattctcatcctggccctggcaatatgggtgcgggtgtccaacgacagtcaggctattttcggatctgaagacgtgggtagtagctcttacgtcgctgtggacattctgatcgccgttggggctatcataatgattcttggcttcttaggctgttgtggcgctataaaagaaagcagatgtatgctccttctgtttttcatagggctcctgctcatactgctactacaggtcgccactggcattcttggagcagtgttcaaatctaagtccgatcgcatagttaatgagactctctacgaaaatactaagctgctgagcgctacaggagaatctgaaaaacagtttcaggaggcgatcatagttttccaggaagaattcaagtgctgcggcctggtgaacggagccgcagactgggggaacaattttcagcactaccctgagctttgcgcctgcctcgacaaacagagaccttgccaatcctataacggaaagcaggtgtataaagaaacctgtataagcttcattaaggacttcctagctaagaatctgattatagttattgggatctctttcggactcgccgtaatcgagatcttgggcttggtgttcagtatggtgctgtactgtcaaatcggaaataagtag

SEQ ID NO: 292862 - DNA, 714 bp, Artificial Sequence
  derived and/or modified sequence
atggctggagtgagcgcttgtataaagtattccatgttcaccttcaattttctattctggttatgtgggattctgatcctggctctcgctatatgggtgagggtgagcaacgactcccaggccattttcggtagtgaggacgtgggaagcagctcatatgtggcagtcgatatcctgattgccgtgggggctattattatgatcctgggctttctgggctgctgtggggctatcaaagaatccagatgtatgctgctgctgttcttcattggacttctgttaatcctgctcttacaggtggccaccggtatacttggtgctgtgtttaagagcaagtccgacaggattgtcaatgagaccctctatgagaataccaagctgctttcggccacgggggagtcggagaaacagtttcaggaggccattatcgtgtttcaggaagaattcaagtgctgcggactcgtcaacggtgcggctgactgggggaataatttccagcactaccctgagctttgcgcttgtctcgataaacagcggccatgtcaatcttataacgggaaacaggtctacaaagagacctgcatctcattcataaaggacttcctcgctaagaacctgattattgtgattggcatctcatttgggctggcagttatcgaaatcttgggtctcgtgtttagtatggtcctatattgtcagatagggaataaatag

SEQ ID NO: 292863 - DNA, 714 bp, Artificial Sequence
  derived and/or modified sequence
atggccggagtgagcgcctgcattaaatacagtatgtttaccttcaattttctcttttggctatgtggcatcctcatcttagctctggcgatatgggtacgcgtttcgaatgattcacaggcaatcttcggatcagaggatgttggatcctcctcttacgtagctgtggacattcttatagctgttggagcaattattatgattctgggcttcctcggatgctgcggcgctattaaggagtctcgttgcatgttgctcttgttctttattggcctccttctgattctcctgctgcaggtggctaccggcatcttaggggcagtgtttaaaagtaaatcagaccggatcgtcaacgagactttatacgagaacactaagctcctctctgccacaggtgaatccgagaaacaattccaggaggctatcatagtgtttcaggaagaattcaaatgttgcggactcgtgaacggagccgcagactggggaaacaacttccaacattatccagaattatgcgcctgtctggataaacaacgaccttgtcagtcatataatggcaagcaggtgtacaaagagacctgcatttccttcataaaagatttcttagccaagaacttgattatagtgattggcatctctttcgggcttgccgtcatcgagattctcgggctggtcttcagcatggttctttattgccagattggtaacaagtag

SEQ ID NO: 292864 - DNA, 1227 bp, Artificial Sequence
  derived and/or modified sequence
gtgccattctcttgcctgatccagtgccattcccttcacttgatatctgtttactttagaggaggcagtttttgagaaaggatcataaatatcctggcccagtgccccaggagctatgacaagcaaaggaacatacttgcctggagatagcctttgcgatatttaaatgtccgtggatacagaaatctctgcaggcaagttgctccagagcatattgcaggacaagcctgtaacgaatagttaaattcacggcatctggattcctaatccttttccgaaatggcaggtgtgagtgcctgtataaaatattctatgtttaccttcaacttcttgttctggctatgtggtatcttgatcctagcattagcaatatgggtacgagtaagcaatgactctcaagcaatttttggttctgaagatgtaggctctagctcctacgttgctgtggacatattgattgctgtaggtgccatcatcatgattctgggcttcctgggatgctgcggtgctataaaagaaagtcgctgcatgcttctgttgtttttcataggcttgcttctgatcctgctcctgcaggtggcgacaggtatcctaggagctgttttcaaatctaagtctgatcgcattgtgaatgaaactctctatgaaaacacaaagcttttgagcgccacaggggaaagtgaaaaacaattccaggaagccataattgtgtttcaagaagagtttaaatgctgcggtttggtcaatggagctgctgattggggaaataattttcaacactatcctgaattatgtgcctgtctagataagcagagaccatgccaaagctataatggaaaacaagtttacaaagagacctgtatttctttcataaaagacttcttggcaaaaaatttgattatagttattggaatatcatttggactggcagttattgagatactgggtttggtgttttctatggtcctgtattgccagatcgggaacaaatgaatctgtggatgcatcaacctatcgtcagtcaaacccctttaaaatgttgctttggctttgtaaatttaaatatgtaagtgctatataagtcaggagcagctgtctttttaaaatgtctcggctagctagaccacagatatcttctagacatattgaacacatttaagatttgagggatataagggaaaatgatatgaatgtgtatttttactcaaaataaaagtaactgtttac

SEQ ID NO: 292865 - DNA, 1516 bp, Artificial Sequence
  derived and/or modified sequence
gctttgtagtagagatagctgttcaggaggaggaaatgtgaattctgagagcgtgatcatttaggagagatttccattcctggaacgatatcactaccacatgcacgagtgcaattgaagggaaacctggtggggaaacagttttaacattctttcagaaaaagaatcactacctagtggaaaatgttgtgcaagcctcttcatgtttcttccctccagaaaacaactaaacagatggaagaactggttcacaaacatcccaactctctcctgccaaggtccagtgggcttgttgctccagacctcatgccttctggacccagacatctctgcaatctcggaactggaatacaccacttcttgtcaaggtactagcaagttgactatgaactgctgggagataagaccatctgatttatccgtgtacatacagcagctagcacaccgtggatacagaaatctctgcaggcaagttgctccagagcatattgcaggacaagcctgtaacgaatagttaaattcacggcatctggattcctaatccttttccgaaatggcaggtgtgagtgcctgtataaaatattctatgtttaccttcaacttcttgttctggctatgtggtatcttgatcctagcattagcaatatgggtacgagtaagcaatgactctcaagcaatttttggttctgaagatgtaggctctagctcctacgttgctgtggacatattgattgctgtaggtgccatcatcatgattctgggcttcctgggatgctgcggtgctataaaagaaagtcgctgcatgcttctgttgtttttcataggcttgcttctgatcctgctcctgcaggtggcgacaggtatcctaggagctgttttcaaatctaagtctgatcgcattgtgaatgaaactctctatgaaaacacaaagcttttgagcgccacaggggaaagtgaaaaacaattccaggaagccataattgtgtttcaagaagagtttaaatgctgcggtttggtcaatggagctgctgattggggaaataattttcaacactatcctgaattatgtgcctgtctagataagcagagaccatgccaaagctataatggaaaacaagtttacaaagagacctgtatttctttcataaaagacttcttggcaaaaaatttgattatagttattggaatatcatttggactggcagttattgagatactgggtttggtgttttctatggtcctgtattgccagatcgggaacaaatgaatctgtggatgcatcaacctatcgtcagtcaaacccctttaaaatgttgctttggctttgtaaatttaaatatgtaagtgctatataagtcaggagcagctgtctttttaaaatgtctcggctagctagaccacagatatcttctagacatattgaacacatttaagatttgagggatataagggaaaatgatatgaatgtgtatttttactcaaaataaaagtaactgtttacgttggtgcttttcta

SEQ ID NO: 292866 - DNA, 1168 bp, Artificial Sequence
  derived and/or modified sequence
gtgtgggttaatagcctttgcgatatttaaatgtgtgggttaatttttttatccagtttaataactttttattcctccctctacttctttgctttctctttctgctctgaagccgtggatacagaaatctctgcaggcaagttgctccagagcatattgcaggacaagcctgtaacgaatagttaaattcacggcatctggattcctaatccttttccgaaatggcaggtgtgagtgcctgtataaaatattctatgtttaccttcaacttcttgttctggctatgtggtatcttgatcctagcattagcaatatgggtacgagtaagcaatgactctcaagcaatttttggttctgaagatgtaggctctagctcctacgttgctgtggacatattgattgctgtaggtgccatcatcatgattctgggcttcctgggatgctgcggtgctataaaagaaagtcgctgcatgcttctgttgtttttcataggcttgcttctgatcctgctcctgcaggtggcgacaggtatcctaggagctgttttcaaatctaagtctgatcgcattgtgaatgaaactctctatgaaaacacaaagcttttgagcgccacaggggaaagtgaaaaacaattccaggaagccataattgtgtttcaagaagagtttaaatgctgcggtttggtcaatggagctgctgattggggaaataattttcaacactatcctgaattatgtgcctgtctagataagcagagaccatgccaaagctataatggaaaacaagtttacaaagagacctgtatttctttcataaaagacttcttggcaaaaaatttgattatagttattggaatatcatttggactggcagttattgagatactgggtttggtgttttctatggtcctgtattgccagatcgggaacaaatgaatctgtggatgcatcaacctatcgtcagtcaaacccctttaaaatgttgctttggctttgtaaatttaaatatgtaagtgctatataagtcaggagcagctgtctttttaaaatgtctcggctagctagaccacagatatcttctagacatattgaacacatttaagatttgagggatataagggaaaatgatatgaatgtgtatttttactcaaaataaaagtaactgttta

SEQ ID NO: 292867 - protein, 16 aa, Artificial Sequence
  derived and/or modified sequence
MATIEEIAHQIIEQQM

SEQ ID NO: 292868 - protein, 106 aa, Artificial Sequence
  derived and/or modified sequence
MHSRPWAWGASEMCFCFFEMGSFCCPSRSTVARSQLTAASTSWAQVILPPQPPECLLLVFMMTWGPGILHLCCSGASPAPGAHQPQLRREALICRAKQLCFHVDPA

SEQ ID NO: 292869 - DNA, 1470 bp, Artificial Sequence
  derived and/or modified sequence
atgctgttcaagctgctgcagcgccagacctacacctgcctgagccaccgctacggcctgtacgtgtgcttcctgggcgtggtggtgaccatcgtgagcgccttccagttcggcgaggtggtgctggagtggagccgcgaccagtaccacgtgctgttcgacagctaccgcgacaacatcgccggcaagagcttccagaaccgcctgtgcctgcccatgcccatcgacgtggtgtacacctgggtgaacggcaccgacctggagctgctgaaggagctgcagcaggtgcgcgagcagatggaggaggagcagaaggccatgcgcgagatcctgggcaagaacaccaccgagcccaccaagaagagcgagaagcagctggagtgcctgctgacccactgcatcaaggtgcccatgctggtgctggaccccgccctgcccgccaacatcaccctgaaggacctgcccagcctgtaccccagcttccacagcgccagcgacatcttcaacgtggccaagcccaagaaccccagcaccaacgtgagcgtggtggtgttcgacagcaccaaggacgtggaggacgcccacagcggcctgctgaagggcaacagccgccagaccgtgtggcgcggctacctgaccaccgacaaggaggtgcccggcctggtgctgatgcaggacctggccttcctgagcggcttcccccccaccttcaaggagaccaaccagctgaagaccaagctgcccgagaacctgagcagcaaggtgaagctgctgcagctgtacagcgaggccagcgtggccctgctgaagctgaacaaccccaaggacttccaggagctgaacaagcagaccaagaagaacatgaccatcgacggcaaggagctgaccatcagccccgcctacctgctgtgggacctgagcgccatcagccagagcaagcaggacgaggacatcagcgccagccgcttcgaggacaacgaggagctgcgctacagcctgcgcagcatcgagcgccacgccccctgggtgcgcaacatcttcatcgtgaccaacggccagatccccagctggctgaacctggacaacccccgcgtgaccatcgtgacccaccaggacgtgttccgcaacctgagccacctgcccaccttcagcagccccgccatcgagagccacatccaccgcatcgagggcctgagccagaagttcatctacctgaacgacgacgtgatgttcggcaaggacgtgtggcccgacgacttctacagccacagcaagggccagaaggtgtacctgacctggcccgtgcccaactgcgccgagggctgccccggcagctggatcaaggacggctactgcgacaaggcctgcaacaacagcgcctgcgactgggacggcggcgactgcagcggcaaggacgtgctgaactgcaacagcttcatcttcatggagtacttcctgctgaaccactac

SEQ ID NO: 292870 - DNA, 1473 bp, Artificial Sequence
  derived and/or modified sequence
atgctgttcaagctgctgcagagacagacctacacctgcctgagccacagatacggcctgtacgtgtgcttcctgggcgtggtggtgaccatcgtgagcgccttccagttcggcgaggtggtgctggagtggagcagagaccagtaccacgtgctgttcgacagctacagagacaacatcgccggcaagagcttccagaacagactgtgcctgcccatgcccatcgacgtggtgtacacctgggtgaacggcaccgacctggagctgctgaaggagctgcagcaggtgagagagcagatggaggaggagcagaaggccatgagagagatcctgggcaagaacaccaccgagcccaccaagaagagcgagaagcagctggagtgcctgctgacccactgcatcaaggtgcccatgctggtgctggaccccgccctgcccgccaacatcaccctgaaggacctgcccagcctgtaccccagcttccacagcgccagcgacatcttcaacgtggccaagcccaagaaccccagcaccaacgtgagcgtggtggtgttcgacagcaccaaggacgtggaggacgcccacagcggcctgctgaagggcaacagcagacagaccgtgtggagaggctacctgaccaccgacaaggaggtgcccggcctggtgctgatgcaggacctggccttcctgagcggcttcccccccaccttcaaggagaccaaccagctgaagaccaagctgcccgagaacctgagcagcaaggtgaagctgctgcagctgtacagcgaggccagcgtggccctgctgaagctgaacaaccccaaggacttccaggagctgaacaagcagaccaagaagaacatgaccatcgacggcaaggagctgaccatcagccccgcctacctgctgtgggacctgagcgccatcagccagagcaagcaggacgaggacatcagcgccagcagattcgaggacaacgaggagctgagatacagcctgagaagcatcgagagacacgccccctgggtgagaaacatcttcatcgtgaccaacggccagatccccagctggctgaacctggacaaccccagagtgaccatcgtgacccaccaggacgtgttcagaaacctgagccacctgcccaccttcagcagccccgccatcgagagccacatccacagaatcgagggcctgagccagaagttcatctacctgaacgacgacgtgatgttcggcaaggacgtgtggcccgacgacttctacagccacagcaagggccagaaggtgtacctgacctggcccgtgcccaactgcgccgagggctgccccggcagctggatcaaggacggctactgcgacaaggcctgcaacaacagcgcctgcgactgggacggcggcgactgcagcggcaaggacgtgctgaactgcaacagcttcatcttcatggagtacttcctgctgaaccactactag

SEQ ID NO: 292871 - DNA, 1473 bp, Artificial Sequence
  derived and/or modified sequence
atgctgtttaagctcctgcagagacagacctacacgtgcttatcccacagatacggcctgtacgtttgttttctgggcgtcgtggtcacaatcgtctctgcctttcagtttggggaggtcgtcctggaatggtcacgggatcagtatcacgtactgtttgattcttaccgcgacaacatcgctggcaagtcatttcagaaccgtctgtgcctgccaatgccaatagatgtcgtgtacacctgggtaaatgggacagacctggagctgctgaaagaacttcagcaagtaagagaacagatggaggaggagcagaaggccatgcgggagattctgggcaagaatacaaccgagcccaccaagaagagtgagaaacaactagaatgtctgcttacccactgtatcaaggtacccatgctggtgctggaccccgccttgcccgcaaatatcacgttgaaagacctgccttccctgtatccaagcttccactccgcctctgacatcttcaatgtcgccaaaccaaagaaccctagtactaatgtgagcgtggtggtgttcgatagcacaaaagacgtggaggacgctcactcagggttgttaaagggcaattcgagacagacggtgtggcgggggtatttgaccactgacaaggaggtacccgggttagtcctaatgcaggatcttgctttcctgtccggatttccacctacattcaaggaaactaatcagctcaaaaccaagttgcctgaaaacctctccagcaaggttaagttacttcaactatactctgaggcttcagtggcactgctaaaattgaataaccctaaagatttccaagaactgaataagcaaacaaaaaaaaacatgactatcgacggtaaggagctgactatttcaccggcctacctactctgggacttgtcagccatctcacagagtaagcaagacgaagacatttcagctagcaggtttgaggataacgaggagcttaggtattctctgcgatctatagaacgccacgccccttgggtgagaaacatatttattgtgaccaatggccaaatcccttcctggttgaatctagacaaccccagggtgaccattgtgactcaccaggatgtatttagaaacctctctcatttgcctacctttagcagcccagcaatcgagtcccatattcacaggatagagggcctctcccaaaagttcatttatctgaacgacgatgtgatgtttggcaaagatgtctggcccgacgatttttattctcattcgaaagggcagaaggtctatctcacttggcccgtacccaattgcgccgaaggatgccccggctcctggattaaggatggctactgcgacaaagcctgcaataattcggcttgtgattgggatggcggcgattgtagtgggaaggatgtcttaaactgcaatagtttcatcttcatggagtactttctgttaaaccactactag

SEQ ID NO: 292872 - DNA, 1473 bp, Artificial Sequence
  derived and/or modified sequence
atgctgttcaagctgctgcagaggcagacctacacctgcctgagccacagatatggcctgtatgtgtgcttcctgggcgtggtggtgaccatcgtgtctgccttccagtttggagaggtggtgctggagtggagccgggaccagtaccacgtgctgtttgacagctacagagacaacattgctgggaagagcttccagaaccggctgtgcctgcccatgcccattgatgtggtgtacacctgggtgaatggaacagacctggagctgctgaaggagctgcagcaggtgcgggagcagatggaggaggagcagaaggccatgagggagatcctgggcaagaacaccacagagcccaccaagaagtctgagaagcagctggagtgcctgctgacccactgcatcaaggtgcccatgctggtgctggaccctgccctgcctgccaacatcaccctgaaggacctgcccagcctgtaccccagcttccacagcgccagtgacatcttcaacgtggccaagcccaagaaccccagcaccaacgtgtctgtggtggtgtttgacagcaccaaggatgtggaggatgcccacagcggcctgctgaagggcaacagccggcagacagtgtggaggggctacctgaccacagacaaggaggtgcccggcctggtgctgatgcaggacctggccttcctgagcggcttcccccccaccttcaaggagaccaaccagctgaagaccaagctgcctgagaacctgagcagcaaggtgaagctgctgcagctgtacagcgaggcctctgtggccctgctgaagctgaacaaccccaaggacttccaggagctgaacaagcagaccaagaagaacatgaccattgatggcaaggagctgaccatcagccctgcctacctgctgtgggacctgagcgccatcagccagagcaagcaggatgaggacatcagcgccagcagatttgaggacaatgaggagctgcgctacagcctgcggagcattgaaagacatgccccctgggtgaggaacatcttcatcgtgaccaacggccagatccccagctggctgaacctggacaacccccgggtgaccatcgtgacccaccaggatgtgttcaggaacctgagccacctgcccaccttcagcagccctgccatcgagagccacatccacagaattgagggcctgagccagaagttcatctacctgaatgatgatgtgatgtttgggaaggatgtgtggccagatgacttctacagccacagcaagggccagaaggtgtacctgacctggcctgtgcccaactgtgccgagggctgccccggctcctggatcaaggatggctactgtgacaaggcctgcaacaacagcgcctgtgactgggatggaggagactgcagcggcaaggatgtgctgaactgcaacagcttcatcttcatggagtacttcctgctgaaccactactag

SEQ ID NO: 292873 - DNA, 1473 bp, Artificial Sequence
  derived and/or modified sequence
atgctgttcaagctgctgcagcggcagacctacacctgcctgagccaccgatatgggctgtacgtgtgcttcttaggcgttgtcgtcaccattgtgtcggcattccagtttggcgaagttgtattagagtggagccgcgaccagtaccacgtgctattcgatagttatcgggataacatagcaggcaaaagcttccagaataggctgtgtctccctatgcccatcgatgtggtatacacttgggttaacggcaccgacctagaactgctgaaagaactccagcaagtgcgggagcaaatggaggaagaacagaaggcaatgcgcgagatcctgggaaaaaatacaaccgaaccaactaagaagagtgagaaacagttagaatgtctgctgacccactgtataaaggtgcctatgcttgtactggatccagcactgccagccaatattacccttaaggaccttcctagcctgtatccaagtttccattcagcctccgatatatttaacgtggccaagcctaaaaatcccagtacgaatgtaagcgtcgtggttttcgattccacaaaggacgtggaggacgcccattctgggctcctcaaggggaactcccggcagacagtatggcggggctatttgactaccgataaggaagtcccaggccttgttctgatgcaggatttggcctttctttccggttttcctcccactttcaaggagacaaaccaactgaagaccaagttgcccgaaaatttgtcgtccaaagtgaagttactccagctatacagcgaggcatctgtggctctccttaagctcaacaatccaaaagacttccaggagctcaacaaacagacaaaaaagaatatgactatcgacggcaaggaactgactatctcacccgcttatctgttatgggacctgagcgctatctcacagagcaagcaggacgaggacattagcgccagcaggtttgaggataacgaggaactccgatattccttgcgctccatcgagcggcacgcaccctgggtccgtaacatctttatagtgaccaacggccagatcccctcatggctcaacctggataaccctcgggtgacaatcgtaacccaccaagatgtgttccgaaatctatctcatcttcccaccttctcaagccctgccatcgaatcccatattcataggattgagggcctgtcccaaaaatttatctacctgaatgatgacgtcatgtttgggaaggatgtgtggcctgacgacttttacagccacagtaaaggacagaaggtttatttgacgtggccagtgccaaattgcgcggaggggtgcccaggcagctggattaaagatggttactgcgacaaggcctgcaacaattccgcctgtgactgggacggtggagattgttccggcaaagatgtgctcaattgcaacagctttatctttatggagtattttcttctgaatcattattag

SEQ ID NO: 292874 - DNA, 1473 bp, Artificial Sequence
  derived and/or modified sequence
atgctgtttaagctgcttcagcgacagacctacacatgcttaagccaccggtacgggctatacgtatgctttttaggtgtggtcgtcacaattgtgagcgccttccagttcggcgaggtggtacttgaatggtcgcgtgaccagtatcacgtgctgtttgactcttacagggacaatatcgccggaaagtccttccagaatcggttgtgcctgcccatgccaatcgacgttgtgtacacatgggtcaacggaaccgacctggaattattaaaggaactgcagcaggtgcgggagcagatggaagaggagcagaaggcgatgagagaaatccttggcaagaacacaactgaacccactaagaaatcagaaaaacagctcgaatgtcttcttacacattgtatcaaagtgcccatgctggtgctggatccggcattaccagctaacatcactctgaaagatcttccaagtttgtatccttcctttcattccgcatctgatatcttcaatgtggctaaacctaaaaacccgtccaccaatgtatccgtggtggtgtttgactccaccaaagacgtcgaagacgcacattcaggcctgctgaaaggaaactctcgacagactgtgtggcgagggtaccttacaactgataaagaagtcccgggactcgtcctgatgcaggatctggccttcctatctggcttcccaccaacatttaaagaaacaaaccagctaaaaactaagcttccagaaaatctgtcgtccaaggtcaaattgctgcagctttactctgaagccagcgtcgctctgctcaagttgaacaatccaaaggactttcaggagctcaataaacagaccaagaagaacatgacgatcgacgggaaggaactgaccatttcgcctgcatatcttctgtgggacctcagtgctatttcccagagcaaacaagacgaggacatcagtgcaagccggttcgaagataacgaggaacttaggtacagtctgaggagcattgagagacacgccccttgggtccgcaacatcttcattgttaccaatggacaaatcccctcttggttgaacctcgacaaccccagagtgaccattgtcacccaccaggacgttttcagaaacctatcgcatctgccaacattttcttcacccgcaatagaaagtcacattcaccgtattgaaggtctttcccagaagtttatctacctgaatgacgatgttatgttcgggaaggacgtatggcctgatgatttttatagccactccaagggccaaaaagtgtatctgacctggcctgttcctaactgcgcagagggctgcccaggcagctggatcaaggacggctattgcgacaaagcttgcaacaactcagcttgtgattgggacggcggtgattgttctggaaaagatgtgttaaattgtaactctttcatattcatggaatatttcctccttaaccattactag

SEQ ID NO: 292875 - DNA, 1678 bp, Artificial Sequence
  derived and/or modified sequence
cggagctgcaatgagcggcgcccggaggctgtgacctgcgcgcggcggcccgaccggggcccctgaatggcggctcgctgaggcggcggcggcggcggcggcggctcaggctcctcggggcgtggcgtggcggtgaaggggtgatgctgttcaagctcctgcagagacagacctatacctgcctgtcccacaggtatgggctctacgtgtgcttcttgggcgtcgttgtcaccatcgtctccgccttccagttcggagaggtggttctggaatggagccgagatcaataccatgttttgtttgattcctatagagacaatattgctggaaagtcctttcagaatcggctttgtctgcccatgccgattgacgttgtttacacctgggtgaatggcacagatcttgaactactgaaggaactacagcaggtcagagaacagatggaggaggagcagaaagcaatgagagaaatccttgggaaaaacacaacggaacctactaagaagagtgagaagcagttagagtgtttgctaacacactgcattaaggtgccaatgcttgtcctggacccagccctgccagccaacatcaccctgaaggacctgccatctctttatccttcttttcattctgccagtgacattttcaatgttgcaaaaccaaaaaacccttctaccaatgtctcagttgttgtttttgacagtactaaggatgttgaagatgcccactctggactgcttaaaggaaatagcagacagacagtatggaggggctacttgacaacagataaagaagtccctggattagtgctaatgcaagatttggctttcctgagtggatttccaccaacattcaaggaaacaaatcaactaaaaacaaaattgccagaaaatctttcctctaaagtcaaactgttgcagttgtattcagaggccagtgtagcgcttctaaaactgaataaccccaaggattttcaagaattgaataagcaaactaagaagaacatgaccattgatggaaaagaactgaccataagtcctgcatatttattatgggatctgagcgccatcagccagtctaagcaggatgaagacatctctgccagtcgttttgaagataacgaagaactgaggtactcattgcgatctatcgagaggcatgcaccatgggttcggaatattttcattgtcaccaacgggcagattccatcctggctgaaccttgacaatcctcgagtgacaatagtaacacaccaggatgtttttcgaaatttgagccacttgcctacctttagttcacctgctattgaaagtcacattcatcgcatcgaagggctgtcccagaagtttatttacctaaatgatgatgtcatgtttgggaaggatgtctggccagatgatttttacagtcactccaaaggccagaaggtttatttgacatggcctgtgccaaactgtgccgagggctgcccaggttcctggattaaggatggctattgtgacaaggcttgtaataattcagcctgcgattgggatggtggggattgctctggtaaggatgtgttaaactgtaattcgttcatttttatggaatattttcttcttaatcattattgaacatgtgctatagacttaaccaaacattctttatgtattaataaagaatcagtaatgctggg

SEQ ID NO: 292876 - DNA, 321 bp, Artificial Sequence
  derived and/or modified sequence
atgcacagcagaccctgggcctggggcgccagcgagatgtgcttctgcttcttcgagatgggcagcttctgctgccccagcagaagcaccgtggccagaagccagctgaccgccgccagcaccagctgggcccaggtgatcctgcccccccagccccccgagtgcctgctgctggtgttcatgatgacctggggccccggcatcctgcacctgtgctgcagcggcgccagccccgcccccggcgcccaccagccccagctgagaagagaggccctgatctgcagagccaagcagctgtgcttccacgtggaccccgcctag

SEQ ID NO: 292877 - DNA, 321 bp, Artificial Sequence
  derived and/or modified sequence
atgcatagtcgaccctgggcatggggggcatccgagatgtgtttttgcttctttgagatggggagcttctgctgtcccagcagaagtaccgtagccagatcccagttaactgcagcatcgacgtcctgggctcaggtaatcttacctcctcagcctccggagtgcctcctgttagtgttcatgatgacctggggaccaggcattctacatctatgctgctcaggagccagtccggccccaggcgcccatcaaccacagctcaggagggaggctcttatctgtcgagccaagcagctatgctttcatgtcgaccccgcttag

SEQ ID NO: 292878 - DNA, 321 bp, Artificial Sequence
  derived and/or modified sequence
atgcacagccggccctgggcctggggcgccagcgagatgtgcttctgcttctttgagatgggcagcttctgctgccccagccgcagcacagtggcccggagccagctgacagctgccagcacctcctgggcccaggtgatcctgcccccccagcccccagagtgcctgctgctggtgttcatgatgacctggggccctggcatcctgcacctgtgctgcagcggggccagccctgcccctggggcccaccagccccagctgcggcgggaggccctgatctgccgggccaagcagctgtgcttccacgtggaccctgcctag

SEQ ID NO: 292879 - DNA, 321 bp, Artificial Sequence
  derived and/or modified sequence
atgcacagccggccctgggcctggggcgccagcgagatgtgcttctgtttcttcgagatgggctctttctgctgtccctcacgcagtacggtcgccaggagccagctgacagctgcctctaccagctgggcccaagtaattctgcccccacagcctccagaatgtttactcctcgtgttcatgatgacctggggaccgggcatacttcacctgtgttgttccggcgcatcgcctgcacccggggcacatcagcctcaactccgacgggaggcgctcatttgcagagctaagcagttgtgttttcacgtcgacccagcatag

SEQ ID NO: 292880 - DNA, 321 bp, Artificial Sequence
  derived and/or modified sequence
atgcatagcaggccctgggcctggggggcttccgaaatgtgtttctgctttttcgagatgggctccttttgctgcccttccagaagtacagtcgcgcgatcccagcttaccgccgcatcaacatcctgggcccaggtgatactcccgccacaacctcccgagtgcttactcctcgtgtttatgatgacctggggtccgggaatccttcatctctgctgttcgggcgcatcacctgcgccaggagcacaccagccgcagttgcgtagagaggcacttatatgtcgggcaaagcagctgtgctttcacgtcgacccagcatag

SEQ ID NO: 292881 - protein, 146 aa, Artificial Sequence
  derived and/or modified sequence
MDSQKLAGEDKDSEPAADGPAASEDPSATESDLPNPHVGEVSVLSSGSPRLQETPQDCSGGPVRRCALCNCGEPSLHGQRELRRFELPFDWPRCPVVSPGGSPGPNEAVLPSEDLSQIGFPEGLTPAHLGEPGGSCWAHHWCAAWS

SEQ ID NO: 292882 - DNA, 291 bp, Artificial Sequence
  derived and/or modified sequence
atgacaccctgtctggagtccttttgtcagagagctaaggattgcaaacagaacattcctctcccgttcctgattcaagactggcctttgtccgaaagcaagcctcaaggccaagacttctggacaccacagcccctccaagccgccgctcctagtcacgagtttcagcaggtagccctccaccctgcaagaacacggctcgcttcaaggccgcagggtgggcgcctgatgagcagtagggaggtcggactgagagccccaagatgttcatgtggaaaacggaagcggtag

SEQ ID NO: 292883 - protein, 111 aa, Artificial Sequence
  derived and/or modified sequence
MLAMDTCKHVGQLQLAQDHSSLNPQKWHCVDCNTTESIWACLSCSHVACGRYIEEHALKHFQESSHPVALEVNEMYVFCYLCDDYVLNDNTTGDLKLLRRTLSAIKSQNYH

SEQ ID NO: 292884 - protein, 164 aa, Artificial Sequence
  derived and/or modified sequence
MLAMDTCKHVGQLQLAQDHSSLNPQKWHCVDCNTTESIWACLSCSHVACGRYIEEHALKHFQESSHPVALEVNEMYVFCYLCDDYVLNDNTTGDLKLLRRTLSAIKSQNYHCTTRSGRFLRSMGTGDDSYFLHDGAQSLLQSEDQLYTALWHRRRILMGKIFRT

SEQ ID NO: 292885 - DNA, 336 bp, Artificial Sequence
  derived and/or modified sequence
atgctggccatggacacctgcaagcacgtgggccagctgcagctggcccaggaccacagcagcctgaacccccagaagtggcactgcgtggactgcaacaccaccgagagcatctgggcctgcctgagctgcagccacgtggcctgcggcagatacatcgaggagcacgccctgaagcacttccaggagagcagccaccccgtggccctggaggtgaacgagatgtacgtgttctgctacctgtgcgacgactacgtgctgaacgacaacaccaccggcgacctgaagctgctgagaagaaccctgagcgccatcaagagccagaactaccactag

SEQ ID NO: 292886 - DNA, 495 bp, Artificial Sequence
  derived and/or modified sequence
atgctggccatggacacctgcaagcacgtgggccagctgcagctggcccaggaccacagcagcctgaacccccagaagtggcactgcgtggactgcaacaccaccgagagcatctgggcctgcctgagctgcagccacgtggcctgcggcagatacatcgaggagcacgccctgaagcacttccaggagagcagccaccccgtggccctggaggtgaacgagatgtacgtgttctgctacctgtgcgacgactacgtgctgaacgacaacaccaccggcgacctgaagctgctgagaagaaccctgagcgccatcaagagccagaactaccactgcaccaccagaagcggcagattcctgagaagcatgggcaccggcgacgacagctacttcctgcacgacggcgcccagagcctgctgcagagcgaggaccagctgtacaccgccctgtggcacagaagaagaatcctgatgggcaagatcttcagaacctag

SEQ ID NO: 292887 - DNA, 336 bp, Artificial Sequence
  derived and/or modified sequence
atgctggcaatggacacgtgcaaacatgtggggcagttgcagctggcccaggatcattcttccctcaacccccaaaagtggcactgcgttgattgcaacactactgagagtatttgggcctgcctgtcctgcagtcacgtcgcttgtgggaggtacattgaagagcacgctctgaaacattttcaggaaagtagtcatccagtcgccctggaagtgaatgaaatgtacgtattttgttacttatgtgatgactacgtgctgaatgacaacaccaccggagatcttaaactgctccggcggactctgtctgcaataaagagtcagaattaccactag

SEQ ID NO: 292888 - DNA, 495 bp, Artificial Sequence
  derived and/or modified sequence
atgttggcaatggacacatgcaagcatgttgggcagcttcagctcgcacaggatcacagcagcttgaatccacagaagtggcactgtgtggactgtaacacaacggagtcaatctgggcctgcctcagctgcagccatgttgcttgcgggaggtacattgaggaacacgcgctgaagcacttccaggagagtagccaccctgtggcactggaagtgaacgaaatgtatgtcttttgctacctttgcgatgattacgtgttgaatgacaatacaaccggtgatctcaagttgctacgacgcacgctcagtgccatcaaaagtcagaactaccactgcaccaccagaagcggtcgatttttgagatctatgggtacaggcgacgattcatacttcttacatgatggcgcacagtccctcttgcagtccgaggatcaactgtataccgcactctggcacagaaggcgcattttgatgggcaagattttcaggacttag

SEQ ID NO: 292889 - DNA, 336 bp, Artificial Sequence
  derived and/or modified sequence
atgctggccatggacacctgcaagcacgtgggccagctgcagctggcccaggaccacagcagcctgaacccccagaagtggcactgtgtggactgcaacaccacagagagcatctgggcctgcctgagctgcagccacgtggcctgtggccgctacatcgaggagcacgccctgaagcacttccaggagagcagccaccctgtggccctggaggtgaatgagatgtatgtgttctgctacctgtgtgatgattatgtgctgaatgacaacaccaccggggacctgaagctgctgcggaggaccctgagcgccatcaagagccagaactaccactag

SEQ ID NO: 292890 - DNA, 495 bp, Artificial Sequence
  derived and/or modified sequence
atgctggccatggacacctgcaagcacgtgggccagctgcagctggcccaggaccacagcagcctgaacccccagaagtggcactgtgtggactgcaacaccacagagagcatctgggcctgcctgagctgcagccacgtggcctgtggccgctacatcgaggagcacgccctgaagcacttccaggagagcagccaccctgtggccctggaggtgaatgagatgtatgtgttctgctacctgtgtgatgattatgtgctgaatgacaacaccaccggggacctgaagctgctgcggaggaccctgagcgccatcaagagccagaactaccactgcaccaccaggagcggccgcttcctgcgctccatgggcactggagatgacagctacttcctgcatgatggagcccagagcctgctgcagagcgaggaccagctgtacacagccctgtggcacagaagacgcatcctgatgggcaagatcttccgcacctag

SEQ ID NO: 292891 - DNA, 336 bp, Artificial Sequence
  derived and/or modified sequence
atgctggccatggacacctgcaagcacgtgggccagctgcagctggcccaggatcatagttccctaaatccccagaagtggcactgcgtagattgtaacaccactgagagcatctgggcttgtctcagctgttctcacgttgcctgcggtagatatattgaggaacatgctcttaaacatttccaagaatctagtcaccccgtcgcactcgaggtgaacgagatgtacgttttctgctacctctgtgatgactatgtgttaaacgacaacactacgggcgacctgaaactcctacgccgtaccctgagcgcaattaagtcccaaaattaccactag

SEQ ID NO: 292892 - DNA, 495 bp, Artificial Sequence
  derived and/or modified sequence
atgctggccatggacacctgcaagcacgtgggccagctgcagctggcgcaggaccacagtagcctgaaccctcagaagtggcattgcgtggactgtaatacaacagagtccatttgggcctgccttagctgtagccatgtggcgtgtggccgctacatcgaggagcacgcgttaaagcactttcaagagtcctcccacccagtcgcactggaggtgaatgagatgtacgtgttttgctatctgtgtgacgactacgtgttaaacgataatacaaccggcgacctcaaactgctaaggcgaacgctgagtgccattaaaagccagaactatcactgtacaacccgtagcgggcggttccttagatccatgggcacaggggatgactcatatttcctccacgatggagcccaatcactgctgcagagcgaggaccagctgtataccgcactgtggcaccgaagacggatcctgatggggaagatcttcaggacctag

SEQ ID NO: 292893 - DNA, 336 bp, Artificial Sequence
  derived and/or modified sequence
atgctcgcaatggacacgtgcaaacacgtcggtcaactacaacttgctcaggatcactccagcttgaaccctcagaagtggcactgtgtggattgtaacacaaccgagtccatctgggcctgtctgtcttgttcccacgttgcttgtgggcgatatatcgaggagcatgcacttaaacacttccaggagtcttctcacccagtagccttagaggtgaacgaaatgtatgttttctgctatctctgcgacgactacgttcttaacgataataccacaggtgacttaaaactcctccggagaacactgtccgctatcaagagccagaactatcattag

SEQ ID NO: 292894 - DNA, 495 bp, Artificial Sequence
  derived and/or modified sequence
atgctcgccatggacacgtgcaaacacgtgggccagttgcagttggcccaggatcacagttccctgaatccccaaaaatggcactgtgtggactgcaatactactgagtcaatctgggcctgtctgagttgctcccatgtggcttgcgggagatatatcgaagagcacgccctgaagcattttcaggaatcctcccacccagtggccctcgaggttaatgaaatgtacgtcttctgttacctctgcgatgattatgttctgaatgataatacaaccggcgatttaaaactgctaaggaggactttgagtgcgattaagtcacaaaattatcactgtaccactcgaagcggaaggtttctgagatctatgggaacaggcgatgatagctactttctgcatgatggcgcacagtcattgcttcaaagcgaagaccagctatacactgcactctggcaccggagacgcattctgatgggcaagatcttccgaacttag

SEQ ID NO: 292895 - DNA, 677 bp, Artificial Sequence
  derived and/or modified sequence
gctaagatggccgccccggctcgggctggtgagtgtgcgcgagggcgcgcggccgcggcgattggcggagtgaggacccctgcgggagcggacgtgcgacggcagcccccggggccgggaggcacctgggggcctattctcgccgcgcagggcgctggggggtcctgagagagggagagcctggggctgcgggcgcgcggaagggaatgagccgaggggcgcgcggcggcgacgcgtccggcgaattttgaattgcccccctgggaagtttcgttttcagatgcttcaagtgttgtgaacagagacttgtttggattatgcatttctcagctagactaaataaatgctagcaatggatacgtgcaaacatgttgggcagctgcagcttgctcaagaccattccagcctcaaccctcagaaatggcactgtgtggactgcaacacgaccgagtccatttgggcttgccttagctgctcccatgttgcctgtggaagatatattgaagagcatgcactcaagcactttcaagaaagcagtcatcctgttgcattggaggtgaatgagatgtacgttttttgttacctttgtgatgattatgttctgaatgataacacaactggagacctgaagttactacgacgtacattaagtgccatcaaaagtcaaaattatcact

SEQ ID NO: 292896 - DNA, 666 bp, Artificial Sequence
  derived and/or modified sequence
gggcggggggccggggtgagcgctaagatggccgccccggctcgggctgccaactgtcaagtctgttcggcctcagagtatgttatagagccatgaattaaagttttcagatgcttcaagtgttgtgaacagagacttgtttggattatgcatttctcagctagactaaataaatgctagcaatggatacgtgcaaacatgttgggcagctgcagcttgctcaagaccattccagcctcaaccctcagaaatggcactgtgtggactgcaacacgaccgagtccatttgggcttgccttagctgctcccatgttgcctgtggaagatatattgaagagcatgcactcaagcactttcaagaaagcagtcatcctgttgcattggaggtgaatgagatgtacgttttttgttacctttgtgatgattatgttctgaatgataacacaactggagacctgaagttactacgacgtacattaagtgccatcaaaagtcaaaattatcactgcacaactcgtagtgggaggtttttacggtccatgggtacaggtgatgattcttatttcttacatgacggtgcccaatctctgcttcaaagtgaagatcaactgtatactgctctttggcacaggagaaggatactaatgggtaaaatctttcgaacat

SEQ ID NO: 292897 - protein, 682 aa, Artificial Sequence
  derived and/or modified sequence
MNPPAAFLAGRQNIGSEVEISTIEKQRKELQLLIGELKDRDKELNDMVAVHQQQLLSWEEDRQKVLTLEERCSKLEGELHKRTEIIRSLTKKVKALESNQMECQTALQKTQLQLQEMAQKATHSSLLSEDLEARNETLSNTLVELSAQVGQLQAREQALTTMIKLKDKDIIEAVNHIADCSGKFKMLEHALRDAKMAETCIVKEKQDYKQKLKALKIEVNKLKEDLNEKTTENNEQREEIIRLKQEKSCLHDELLFTVEREKRKDELLNIAKSKQERTNSELHNLRQIYVKQQSDLQFLNFNVENSQELIQMYDSKMEESKALDSSRDMCLSDLENNHPKVDIKREKNQKSLFKDQKFEAMLVQQNRSDKSSCDECKEKKQQIDTVFGEKSVITLSSIFTKDLVEKHNLPWSLGGKTQIEPENKITLCKIHTKSPKCHGTGVQNEGKQPSETPTLSDEKQWHDVSVYLGLTNCPSSKHPEKLDVECQDQMERSEISCCQKNEACLGESGMCDSKCCHPSNFIIEAPGHMSDVEWMSIFKPSKMQRIVRLKSGCTCSESICGTQHDSPASELIAIQDSHSLGSSKSALREDETESSSNKKNSPTSLLIYKDAPAFNEKASIVLPSQDDFSPTSKLQRLLAESRQMVTDLELSTLLPISHENLTGSATNISHLCGRQKADTNTE

SEQ ID NO: 292898 - DNA, 2049 bp, Artificial Sequence
  derived and/or modified sequence
atgaacccaccagctgcgtttctggctggccgccagaacattggctctgaagtggagatctccaccattgagaagcagcgaaaagagctgcaactgttgattggcgagctcaaagacagagacaaagaattaaacgacatggtcgccgtccaccagcaacaactcttgtcgtgggaagaggacaggcaaaaagtacttacgctggaagaaagatgtagcaaactggaaggggaattacacaaacgtaccgagattatcaggagcctcactaaaaaagtcaaggcacttgaaagtaatcaaatggagtgccaaactgctcttcagaagactcagttgcaactccaggaaatggcccagaaagctacgcacagcagtcttctgagtgaggatctggaggctaggaatgagacacttagtaatacgttggtggagctaagtgctcaggtagggcaactgcaggccagagaacaagctctaaccaccatgattaagttgaaagacaaggatatcatcgaagccgtgaatcatatcgccgactgctccggcaaatttaagatgttggagcatgctctccgcgacgccaaaatggcagaaacttgcatcgtcaaagaaaagcaggattacaagcagaagctcaaagccctgaagattgaggtaaacaaacttaaagaagatctcaacgagaagactaccgagaacaacgaacaacgggaggaaatcataagactcaaacaagaaaaatcctgcctccacgacgagctgctatttaccgtggaaagagagaagagaaaagatgagttactaaacattgccaaatctaagcaggagcgcacaaactcggaactgcacaacctcaggcaaatctacgtcaagcaacagagcgacctgcaattcctcaactttaatgtggagaattcacaagaactgatccagatgtacgattctaaaatggaggaatctaaagctctggactccagccgggacatgtgcctctctgacttagaaaacaatcatcccaaagttgatatcaagcgtgaaaagaaccagaaaagtctattcaaggaccagaaattcgaggcaatgctggtccaacagaatagatccgacaagtccagttgcgacgagtgtaaagaaaagaaacagcagatcgacacagtctttggagaaaaaagtgtcatcacgctgtcgtcaatctttaccaaagacctggttgaaaagcacaacctgccgtggtcactaggtggcaagacacagatcgagccagagaataagataactctttgtaaaattcacacaaagagtccaaagtgtcatggcactggggtgcagaatgagggaaaacagcctagcgagacccccaccctatcggacgaaaagcaatggcatgacgttagcgtgtacctgggccttacaaactgccctagctctaagcatcctgaaaaactagacgtggagtgccaggatcagatggaaaggtcagaaatttcatgctgccaaaaaaatgaggcctgccttggggagtctggaatgtgtgattctaaatgttgccacccctctaattttatcattgaggctcccggacatatgtcagatgtcgagtggatgagcatcttcaagccttcaaagatgcaacggatcgttcgcttgaagtctggatgcacctgctccgaaagcatctgcggcacccagcacgatagtcctgccagtgagttaattgccatacaggacagtcatagcctgggaagtagcaaatcagctctaagggaggacgagacagaatcctcatcaaacaagaaaaacagccctacctcgctgctcatttacaaagacgcccctgctttcaatgaaaaggcatccatcgtcctcccatcacaagacgatttctccccgacatccaagcttcagagacttctggcggaatctagacagatggtgacagatctcgaactgagtactctgctcccaatttcacatgaaaacctgaccgggagcgctactaatatcagccatctgtgcgggagacagaaagctgacaccaacaccgaatag

SEQ ID NO: 292899 - DNA, 2049 bp, Artificial Sequence
  derived and/or modified sequence
atgaaccccccagctgccttcctggccggccggcagaacatcggcagcgaggtggagatcagcaccatcgagaagcagaggaaggagctgcagctgctgattggagagctgaaggaccgggacaaggagctgaatgacatggtggccgtgcaccagcagcagctgctgtcctgggaggaggaccggcagaaggtgctgaccctggaggagcgctgcagcaagctggagggggagctgcacaagaggacagagatcatccgcagcctgaccaagaaggtgaaggccctggagagcaaccagatggagtgccagacagccctgcagaagacccagctgcagctgcaggagatggcccagaaggccacccacagcagcctgctgtctgaggacctggaggccagaaatgagaccctgagcaacaccctggtggagctgagcgcccaggtgggccagctgcaggcccgggagcaggccctgaccaccatgatcaagctgaaggacaaggacatcattgaagctgtgaaccacatcgctgactgcagcggcaagttcaagatgctggagcacgccctgagagatgccaagatggccgagacctgcatcgtgaaggagaagcaggactacaagcagaagctgaaggccctgaagattgaggtgaacaagctgaaggaggacctgaatgagaagaccacagagaacaatgagcagcgggaggagatcatccggctgaagcaggagaagagctgcctgcatgatgagctgctcttcaccgtggagcgggagaagaggaaggatgagctgctgaacatcgccaagagcaagcaggagaggaccaacagcgagctgcacaacctgcggcagatctacgtgaagcagcagagcgacctgcagttcctgaacttcaacgtggagaacagccaggagctgatccagatgtatgacagcaagatggaggagagcaaggccctggacagcagccgggacatgtgcctgagtgacctggagaacaaccaccccaaggtggacatcaagcgggagaagaaccagaagagcctcttcaaggaccagaagtttgaggccatgctggtgcagcagaacagaagtgacaagagcagctgtgatgagtgcaaggagaagaagcagcagattgacacagtgtttggagagaagagcgtcatcaccctgagcagcatcttcaccaaggacctggtggagaagcacaacctgccctggagcctgggcggcaagacccagatcgagcctgagaacaagatcaccctgtgcaagatccacaccaagagccccaagtgccacggcaccggggtgcagaatgaaggcaagcagcccagcgagacccccaccctgagtgatgagaagcagtggcatgatgtgtctgtgtacctgggcctgaccaactgccccagcagcaagcaccctgagaagctggatgtggagtgccaggaccagatggagaggtctgagatcagctgctgccagaagaatgaggcctgcctgggggagagcggcatgtgtgacagcaagtgctgccaccccagcaacttcatcatcgaggcccctggccacatgtctgatgtggagtggatgagcatcttcaagcccagcaagatgcagagaattgtgcggctgaagagcggctgcacctgcagcgagagcatctgtggcacccagcacgacagccctgccagcgagctgattgccatccaggacagccacagcctgggcagcagcaagagcgccctgagagaagatgaaacagagagcagcagcaacaagaagaacagccccaccagcctgctgatctacaaggatgccccagccttcaatgagaaggccagcatcgtgctgcccagccaggatgacttcagccccaccagcaagctgcagaggctgctggccgagagccggcagatggtgacagacctggagctgagcaccctgctgcccatcagccatgagaacctgaccggcagcgccaccaacatcagccacctgtgtggccggcagaaggctgacaccaacacagaatag

SEQ ID NO: 292900 - DNA, 2049 bp, Artificial Sequence
  derived and/or modified sequence
atgaacccccccgccgccttcctggccggccggcagaacatcggctctgaggtggagatctcgactatcgaaaagcagagaaaagagttgcagctcctcatcggagagctcaaggatagggacaaggagctaaacgacatggttgccgttcaccagcagcagttactctcttgggaggaagaccgccagaaggtgctgacattagaggagagatgttcaaagctggagggagaacttcataagcggaccgagattattcgctcattgactaagaaggtgaaggcactggagtccaatcaaatggagtgtcaaacagccctgcaaaagactcagcttcagctccaagagatggcgcagaaggccacccacagcagcctgctatccgaagacttggaggctcggaacgagacattgtcgaatactttagttgaactttctgcgcaggtcggtcagctccaggctagagagcaggcgttgactactatgatcaagttgaaagataaggatatcatagaagctgtgaatcatatcgccgactgctccggaaagttcaagatgttagagcacgctctgagggatgcgaaaatggctgaaacatgtatcgtgaaggagaagcaggattataaacagaagctgaaggccctgaagatcgaggtgaataagcttaaggaagatcttaatgaaaagaccacagaaaataacgaacaacgcgaggaaatcatcagactgaaacaggaaaagagttgtctgcacgatgaacttctgttcacagtggaaagagagaagcggaaggatgagttactgaatatcgccaaatccaaacaggagagaactaatagtgaactgcacaatctgaggcaaatctacgtgaagcagcagtccgacctgcagttcctaaactttaacgtggagaattcacaggagctcattcagatgtacgattccaagatggaagaatcgaaagcactggactcctcccgcgacatgtgccttagtgatctcgagaacaatcaccctaaagtggacatcaaaagagagaagaaccagaagtcactcttcaaggaccagaagttcgaggcgatgcttgtccagcagaatagaagcgacaagagttcctgcgacgagtgtaaggaaaaaaagcagcagattgacacagttttcggcgagaagagcgtcataactttgtcgtcaatctttaccaaagatctcgttgaaaaacataacttgccctggtccctgggaggtaagacacagatcgaacctgagaataaaattacactgtgcaaaatacacaccaagagccctaaatgtcacggcacaggagtacagaatgaaggaaaacagccgagtgaaacaccaaccctgtccgatgagaagcagtggcatgacgtgagcgtctatctgggcctcactaattgtccgtcaagcaagcaccccgagaaacttgacgtggagtgccaggatcaaatggagcggagcgaaatctcctgctgccagaaaaatgaggcgtgcctgggagagtccggtatgtgtgattcgaagtgctgccaccccagtaactttattatagaagccccaggccacatgagtgatgtggaatggatgtcaattttcaagcccagtaagatgcagcggattgtgagactgaagtcagggtgcacatgctctgaaagtatctgcggaactcaacatgactcccctgcctcggagcttatcgccatccaggactctcactctctgggctcgtcaaagagcgcactccgagaggatgagacagagtcgtcctctaataaaaaaaactctcccaccagtttgttgatatacaaggatgcgccagcctttaatgagaaggcttctatcgtcttgccctctcaggacgacttttcccctacaagtaagcttcagcgtttgctagctgagagcagacagatggttaccgatttggaattgtcaactctcctgccaatatctcacgaaaatctcacgggctctgctaccaacatttctcatctttgcgggcgccagaaggccgatactaacactgagtag

SEQ ID NO: 292901 - DNA, 2049 bp, Artificial Sequence
  derived and/or modified sequence
atgaaccctccagctgcatttcttgccggaaggcagaatataggcagtgaagtagaaatatctaccatagagaagcagcgcaaagaactgcagttattgataggagagctgaaagatagggacaaggagctcaacgatatggtcgctgtccatcaacagcagctgctgagttgggaagaggacaggcagaaggtactcacattggaagagaggtgcagtaaattagagggggaacttcacaaaaggacggaaattatcagaagcttaacgaaaaaggtgaaggctctggagagcaatcagatggaatgtcaaactgctctgcagaaaacccagcttcagctccaggaaatggcacaaaaggcaacccatagcagcctgttgtccgaggacctggaagcaaggaacgaaactctctctaatacactggtggagctgagtgcacaggtgggccagctacaagctcgcgaacaagcactgacgacgatgataaagctgaaggataaggatattattgaagctgtgaaccatattgccgactgttccggcaaattcaagatgttggagcatgccctcagagacgcgaagatggcggaaacatgcattgtcaaagagaaacaggattacaaacagaagctgaaagccttgaaaatcgaagtgaataaactgaaggaagacctcaatgagaagactacggagaacaacgaacagcgcgaggaaattatccggctgaagcaggagaaatcttgccttcatgatgaactgctgttcaccgtggaacgggagaaacgaaaggacgagctgctcaatatcgcaaagtctaaacaggagcgaacaaattccgaactgcacaatctgcggcagatttatgttaaacagcagtccgatctgcagttccttaattttaatgtagaaaactctcaagagttgatccagatgtacgatagcaaaatggaggaaagtaaggctttggacagctctcgggacatgtgcctgagcgatcttgaaaacaatcaccctaaagtggatataaagagagagaaaaatcagaaatccctgttcaaggaccaaaaatttgaagctatgctggtccagcaaaacaggtctgataagagctcatgcgacgagtgtaaagagaagaaacagcaaattgataccgttttcggggaaaaatccgtgatcaccttgtctagtatttttacaaaagatctggttgaaaagcacaatctaccgtggtccctcggcggaaaaactcaaattgaacctgaaaataagatcaccctgtgcaagatacacactaagtcgcccaagtgccacggcacaggtgtccaaaacgaaggcaagcagcccagcgagacgcccacgctcagcgatgaaaagcagtggcacgacgtttctgtgtatctgggcctgacaaattgtccgtcctcaaagcaccctgagaagctggacgtggaatgccaggaccagatggagcgctctgagattagttgctgtcagaagaacgaggcctgtcttggggaaagcgggatgtgtgactccaagtgttgccatccaagcaactttataatcgaagctccaggtcacatgtccgacgtagaatggatgtcgatcttcaagcccagcaagatgcagagaattgttcggctgaaaagcgggtgcacttgttccgagagtatttgtgggacccaacatgattctcccgcatctgaactcatcgccattcaggattcgcacagtctgggctcctcgaaatcggctcttagggaggacgagaccgaaagcagctccaataaaaagaattccccaacctcccttctcatctataaggacgcgcctgctttcaatgaaaaggcctcaatcgtgctgccctcgcaggacgacttttcacccacatccaagctccagcgcctcctggctgagtctagacagatggtaacagatctcgagttaagcactctgctaccaatctcccatgagaatctgactggctccgccaccaatataagtcacctttgcggtagacagaaagccgacactaacactgaatag

SEQ ID NO: 292902 - DNA, 2936 bp, Artificial Sequence
  derived and/or modified sequence
ggttggagtacggggcgggggtcggccgagggcgcggggccccggggctccgggctcgcccccgccgctcggggcaggcgcgccgatggcgtttctgaggtgacgccgcccacaccgggcttctccgggggcggaggaaacacctatgaaccctccggcagccttccttgccgggcgccagaacatcgggtcagaagttgagatttccactatcgagaaacaacggaaggagctgcagttgctcattggagaattaaaagatcgagataaagagctcaatgacatggttgcagtgcaccagcaacagcttctttcatgggaagaggatcggcagaaagtgttgacactggaagaacgttgcagcaaattagaaggtgaactacataaaagaactgaaataatcaggtcactcacgaagaaggtaaaagctcttgaatccaatcaaatggaatgccaaacagctctccaaaagacccaactacagcttcaggaaatggctcaaaaggcaacgcattcttctcttctctctgaagaccttgaggctagaaacgaaactctcagcaacacgttagtggaactttctgcccaggtaggacagctacaagctcgagaacaagctcttacgacaatgataaagctaaaggacaaagatattattgaggcagttaatcacattgcagattgttcgggtaaatttaaaatgctagagcatgccctacgtgatgccaagatggcggagacttgtattgtgaaagaaaagcaagattataagcagaaattgaaggcacttaagattgaagtcaacaaactaaaagaggacctcaatgaaaagacgacagaaaataatgagcaacgagaagagatcattcgcctcaagcaagagaaaagttgcctgcacgatgaattgctttttactgtagagagagaaaagaggaaagatgaattgcttaatattgcgaagtcaaagcaagaacgcacaaattcagaactgcacaatctgagacagatttatgtaaaacaacagagtgatctgcagtttcttaatttcaatgtggaaaattctcaggaattaatacagatgtatgactcaaagatggaggaatcaaaggctctggactccagcagagacatgtgtttatcagaccttgaaaataaccacccaaaagtcgatattaagagggaaaaaaatcagaagtcactgtttaaggaccagaaatttgaagccatgttggttcagcaaaataggtcagacaagagctcttgcgatgaatgcaaagagaagaaacaacagatcgatactgtgtttggggagaaaagtgtaattacgctgtcatccatattcaccaaagacttagtagagaaacacaacctcccttggtctctgggaggaaaaacccagattgaacccgaaaacaaaattacattgtgcaagatccacacaaaatcaccaaaatgtcatggcactggggttcagaacgaaggaaaacaaccctcagaaacacccactttatctgatgagaagcagtggcatgatgtcagtgtttacctgggcctgaccaactgtccaagttcaaaacatccagaaaagctggatgtagaatgtcaagatcagatggaaaggtccgaaatctcatgctgccagaaaaatgaagcctgtctgggcgaaagtggcatgtgtgactccaagtgctgccacccgagtaacttcataattgaagccccaggccacatgtctgacgtggagtggatgagtattttcaagccttccaaaatgcagagaattgtccgcctcaaatctgggtgcacctgttcagaaagcatctgtggcacacaacatgactccccggcaagtgagctaattgccatccaagattcccactctttgggttcttcaaaatctgccttgagagaagatgagacggagtcctcttccaataaaaagaactcacctacgagtttgttaatctacaaagatgcaccagcattcaatgaaaaggcttcaattgtgttaccctcccaggatgatttctcgcccacgagcaagctccagcgtttgctggcggaatctcgtcagatggtgacggacctggagctgagcacactgctgcccatcagccatgagaatctcactggcagtgccacaaatatttctcatctatgtggaaggcagaaagcagacaccaatactgaatgaatacttaaccgtaaaactgaaagaggattctagttcttcataaacggcacttaattccagctgggagcagaactagaaagttaatttttaaacatctacacttcattttcaagttaaccatttttgtgctgaagaaatattttcatgtgtaagaaagtagaccttattgtacatatagaaagttggaattatgctaagaatgaaaaagacttctctgtaaagatacggactacagttaaatgctagagaagctctttaaaaatgtgaatgtcaaatagagaaagaaccctgcatagaaagtgctgttttaactatctgatttttaaaaaatctgtgcatacatttaaattctaaacaatagcttatcagagtcagctcaaaatatatgagaaacagtattctctcatggttttagcttttgactttgctgtgtaaatagacataaggtgctttgatataaaatataaaatgtaactggaaaatagctcgaggtccttctgtcccaagctgagcagagccccatctttctgggtctatattagtcccacctactgacacaaacaaaagcttgctggaagatcgagttttagacgcatttttaaaaatcttaaagactaaaacacttccattttaacttgtaaagtaatttaattttttaaagattatactatatgcctctgtgtcttctctaaaagaatagatcaacttcagtccataaaagatatttttaatattaaagaaa

SEQ ID NO: 292903 - DNA, 2049 bp, Artificial Sequence
  derived and/or modified sequence
atgaacccccccgccgccttcctggccggcagacagaacatcggcagcgaggtggagatcagcaccatcgagaagcagagaaaggagctgcagctgctgatcggcgagctgaaggacagagacaaggagctgaacgacatggtggccgtgcaccagcagcagctgctgagctgggaggaggacagacagaaggtgctgaccctggaggagagatgcagcaagctggagggcgagctgcacaagagaaccgagatcatcagaagcctgaccaagaaggtgaaggccctggagagcaaccagatggagtgccagaccgccctgcagaagacccagctgcagctgcaggagatggcccagaaggccacccacagcagcctgctgagcgaggacctggaggccagaaacgagaccctgagcaacaccctggtggagctgagcgcccaggtgggccagctgcaggccagagagcaggccctgaccaccatgatcaagctgaaggacaaggacatcatcgaggccgtgaaccacatcgccgactgcagcggcaagttcaagatgctggagcacgccctgagagacgccaagatggccgagacctgcatcgtgaaggagaagcaggactacaagcagaagctgaaggccctgaagatcgaggtgaacaagctgaaggaggacctgaacgagaagaccaccgagaacaacgagcagagagaggagatcatcagactgaagcaggagaagagctgcctgcacgacgagctgctgttcaccgtggagagagagaagagaaaggacgagctgctgaacatcgccaagagcaagcaggagagaaccaacagcgagctgcacaacctgagacagatctacgtgaagcagcagagcgacctgcagttcctgaacttcaacgtggagaacagccaggagctgatccagatgtacgacagcaagatggaggagagcaaggccctggacagcagcagagacatgtgcctgagcgacctggagaacaaccaccccaaggtggacatcaagagagagaagaaccagaagagcctgttcaaggaccagaagttcgaggccatgctggtgcagcagaacagaagcgacaagagcagctgcgacgagtgcaaggagaagaagcagcagatcgacaccgtgttcggcgagaagagcgtgatcaccctgagcagcatcttcaccaaggacctggtggagaagcacaacctgccctggagcctgggcggcaagacccagatcgagcccgagaacaagatcaccctgtgcaagatccacaccaagagccccaagtgccacggcaccggcgtgcagaacgagggcaagcagcccagcgagacccccaccctgagcgacgagaagcagtggcacgacgtgagcgtgtacctgggcctgaccaactgccccagcagcaagcaccccgagaagctggacgtggagtgccaggaccagatggagagaagcgagatcagctgctgccagaagaacgaggcctgcctgggcgagagcggcatgtgcgacagcaagtgctgccaccccagcaacttcatcatcgaggcccccggccacatgagcgacgtggagtggatgagcatcttcaagcccagcaagatgcagagaatcgtgagactgaagagcggctgcacctgcagcgagagcatctgcggcacccagcacgacagccccgccagcgagctgatcgccatccaggacagccacagcctgggcagcagcaagagcgccctgagagaggacgagaccgagagcagcagcaacaagaagaacagccccaccagcctgctgatctacaaggacgcccccgccttcaacgagaaggccagcatcgtgctgcccagccaggacgacttcagccccaccagcaagctgcagagactgctggccgagagcagacagatggtgaccgacctggagctgagcaccctgctgcccatcagccacgagaacctgaccggcagcgccaccaacatcagccacctgtgcggcagacagaaggccgacaccaacaccgagtag

SEQ ID NO: 292904 - DNA, 1674 bp, Artificial Sequence
  derived and/or modified sequence
atgggtaatagtttttgctatactgcagtctactgtatgattaacactggcacccagatggaccttgaggttaagggtgtggccgcaacatcccggtcccagattcagcccttttttggtcgcaaaaagcctcttcaacagaggtggactagcgaatcctggactaatcagaacagttgtcctccagtggtgccaagactcgatctgggcagcctcgttgactccgatgatgaagataacttcagttacatcccgctgagcaccgccaacctgcctaacagctccagcacgctgggttgggtcactccgtgccagactccatatactcaatatcacctgaacaagctggaccagaacatcatccccgagaatctgccagccccaaccgacaaatgtaaactgaaatatcagcagtgtaagactgaaatcaaggaagggtacaaacaatactcccagagaaacgcagaaaacactaagtctaatgtgacccacaaacagagcccaagaaacaagatcgatgaaaagtgcgtgcaggatgaggaagccaatacagacgacttaaccacccttgataggaaggctatcctacaacagggttacgcagataactcatgtgacaagcagcagagagcccgcaagcttgacgcagagatcgtggcagcagagaaaaaaaagcagattgtcgctgagcaggtaatgattgatcacctctcccgagctgttatctccgaccctgaacagaacctggccatagaacaaaaagagtccgatcatatcttgcctgacagtaaaatgacccccttgcggtttaggaagagaactctacatgaaaccaaaatccggacccattctacactgactgagaacgtgctgtctcataaacttcagttcgatggtaggatagtatctcgcaatggcagagacgcctgtagagagttgatcgggttctttttcactcacgatcagtctctgacgatctacgagtaccgccagttcggtaagaacagaaccaatgtgttacccttcattcagaagtcgatttactctcatcagtgcgggaggcgcaaaggcaaacagtaccggctcggagatttctatgtcggggccacactgacatttctgtcaagcgatcacctgtcattgccagaatccataaaggagaatacactccttaagctgagaatcaccaatatcgaccagattgcattggatagtctcaagaccgccagtatggaacaggaggacgacatcattatccaggagactaatgatagactggtgttcaaagccattcaggacgtgctgaaggaaaagctccacaagcggggtgtccggattctcacagggctaggcaagtactttcagcagctggataaagagggcaatggactgctggacaaggctgatttcaagcaggcactgaaggtgtttcacctcgaggtgagtgagaaggacttcgagtccgcctggctcatattgaacgataatgggaatggaaaggttgactatggggaatttaagcgtggtattattggcgaaatgaacgagtatagaaagtcttatgtaaggaaggcctttatgaaactcgactttaataagtccggatccgtcccgataatcaatatccgcaaatgttactgtgccaagaaacatagccaagtcatctccggatag

SEQ ID NO: 292905 - DNA, 1674 bp, Artificial Sequence
  derived and/or modified sequence
atgggcaacagcttctgctacacagctgtgtactgcatgatcaacacaggcacccagatggacctggaggtgaagggcgtggccgccaccagccgcagccagatccagcccttctttggaaggaagaagcccctgcagcagcgctggaccagcgagagctggaccaaccagaacagctgcccccctgtggtgccccggctggacctgggcagcctggtggacagtgatgatgaggacaacttctcctacatccccctgagcacagccaacctgcccaacagcagcagcaccctgggctgggtgaccccctgccagaccccctacacccagtaccacctgaacaagctggaccagaacatcatccctgagaacctgcctgcccccacagacaagtgcaagctgaagtaccagcagtgcaagacagagatcaaggagggctacaagcagtacagccagagaaatgctgagaacaccaagagcaatgtgacccacaagcagagccccaggaacaagattgatgagaagtgtgtgcaggatgaggaggccaacacagatgacctgaccaccctggacaggaaggccatcctgcagcagggctatgctgacaacagctgtgacaagcagcagagggccaggaagctggatgctgagatcgtggccgctgagaagaagaagcagatcgtggccgagcaggtgatgattgaccacctgagccgggccgtcatcagtgaccctgagcagaacctggccatcgagcagaaggagagtgaccacatcctgcctgacagcaagatgacccccctgcgcttcaggaagaggaccctgcacgagaccaagatccgcacccacagcaccctgacagaaaatgtgctgagccacaagctgcagtttgatggaagaattgtgtccagaaatggaagagatgcctgccgggagctgattggcttcttcttcacccatgaccagagcctgaccatctatgagtaccggcagtttgggaagaacagaaccaacgtgctgcccttcatccagaagagcatctacagccaccagtgtggccgcaggaagggcaagcagtaccgcctgggggacttctacgtgggcgccaccctgaccttcctgagcagtgaccacctgagcctgcctgagagcatcaaggagaacaccctgctgaagctgcgcatcaccaacatcgaccagatcgccctggacagcctgaagacagcctccatggagcaggaggatgacatcatcatccaggagaccaatgaccggctggtgttcaaggccatccaggatgtgctgaaggagaagctgcacaagaggggcgtgcgcatcctgaccggcctgggcaagtacttccagcagctggacaaggagggcaatggcctgctggacaaggctgacttcaagcaggccctgaaggtgttccacctggaggtgtctgagaaggactttgagagcgcctggctgatcctgaatgacaatggaaatggcaaggtggactatggagagttcaagaggggcatcattggagagatgaatgagtacaggaagagctatgtgaggaaggccttcatgaagctggacttcaacaagagcggctctgtgcccatcatcaacatcaggaagtgctactgtgccaagaagcacagccaggtgatcagcggctag

SEQ ID NO: 292906 - DNA, 1674 bp, Artificial Sequence
  derived and/or modified sequence
atgggcaacagcttctgctacaccgccgtgtactgcatgatcaacaccggaacccagatggatctggaggttaagggggtcgcggccaccagtcggtctcagatacagcctttctttggtcgcaaaaagcctctccaacaaagatggacctccgagtcctggacgaatcagaatagttgtcctcccgtggtgccgaggctagacctcggatctttagtggattccgacgacgaagacaatttttcctacattcctctgtctacagccaatctgccgaactctagttctaccctgggttgggttaccccctgccaaactccttacacgcagtaccacctaaacaagctggatcagaacatcatcccagagaatttacccgcccccaccgataagtgcaagctgaagtaccagcagtgtaagactgaaatcaaggaagggtataaacagtatagccaaagaaacgccgagaatacaaaatccaatgttacccataaacagtctcctcgcaataagatcgatgagaagtgcgtgcaggatgaggaagccaatactgacgacctcacgacgttagatcggaaggccatcctgcagcaggggtatgccgacaactcatgcgacaagcagcagcgtgcacggaaattggatgccgaaatcgtcgccgcagagaagaagaaacagatcgtggccgaacaggtcatgattgaccatctgagtcgggcagtgatatctgacccggagcaaaacctcgccatcgagcagaaagaatccgatcatatccttccagacagtaagatgacaccgctgcgatttcgtaagcgaactctgcatgagaccaagatcagaacacatagcacactcaccgagaacgttctgtcacataagttacagtttgacggtcgcatagtgagccggaacggtcgcgatgcatgtagggaactgatagggtttttcttcacccacgaccaaagcctgaccatttatgagtacaggcagtttggaaagaatcgaaccaacgtgcttccttttatccagaaatctatctattcccaccagtgtggccgccgcaagggaaagcagtacaggctgggcgatttctacgttggggcaaccttaacctttttatcttcagatcacctaagccttcccgaatctattaaagaaaacacgttgctgaagctccgcatcacaaacatcgaccaaattgccctggattcactaaagactgcctccatggagcaggaagatgatattatcattcaggagactaacgatcgactggttttcaaagcaattcaggatgtgctgaaggaaaagctacataagcgtggcgtccgaatccttacaggactgggtaagtactttcagcagctagacaaggagggcaacgggcttctggataaggcagactttaagcaggcattgaaggtgttccacctggaagtgtccgagaaagatttcgagtctgcgtggcttattctcaatgataatggcaatggaaaggtggattatggcgaattcaagaggggcatcattggggagatgaacgagtacagaaagtcttatgtgcgaaaagccttcatgaaattagacttcaacaagagtgggtcggtccccatcattaatatccgcaaatgctattgcgcgaagaagcattctcaggtaatcagtgggtag

SEQ ID NO: 292907 - DNA, 1674 bp, Artificial Sequence
  derived and/or modified sequence
atggggaatagcttttgctacaccgccgtgtactgtatgatcaacactgggacccagatggatttggaagtgaaaggggtggccgcaacgtctaggtcccagattcagccattctttggcagaaaaaaacctttgcagcagaggtggacttccgagtcgtggacaaatcagaacagctgtcctccagtcgttccacgcttggatctgggttcgctggttgactccgacgacgaagataacttcagttacataccactgagtaccgcgaatttgccaaattcgtcaagtactctaggatgggtcacaccctgtcaaactccctacacgcaatatcatctgaacaagctcgaccaaaacatcatccccgagaacctcccagccccaaccgacaagtgcaaactcaagtaccagcagtgtaaaacagagattaaagagggctacaagcagtattcccagcgtaacgcagagaacacgaaatctaacgtcacgcataaacaatcacccagaaacaaaatcgatgagaagtgcgtccaagacgaagaggccaataccgatgacctgacaactctagatcgcaaagcaatcctgcaacagggctatgcggacaactcatgtgacaagcagcaaagggccagaaagctggacgctgagatcgtcgctgctgaaaagaagaagcagatagttgctgagcaggtgatgatcgaccatctatccagggctgtcatttctgaccctgaacagaatctggccatagagcagaaagaaagtgatcacattttgccagacagtaaaatgaccccacttaggttcagaaaacgcactctgcatgagactaaaatcagaacgcactctacactaaccgagaacgtgctttcacacaagctgcagttcgatggcaggattgtgtccaggaacgggagggatgcttgcagggagctaataggctttttctttactcacgaccagtctctcacaatctatgaataccggcaatttggaaagaataggactaatgtcctaccgttcatccagaaatctatctattcccatcagtgcgggcgtagaaagggcaagcagtacagactgggcgatttctacgtgggcgcaacccttacatttctgagctccgatcatttatctctccccgaaagtattaaggaaaacaccctcctcaagctgagaattactaatatcgaccagattgcactggattcattgaaaacagcatcgatggaacaagaagatgatataatcatacaggagactaatgaccggctggtctttaaggccatccaggatgtactcaaggaaaagctgcacaagcggggagtgcggatcttgaccggactgggaaaatattttcaacaacttgataaggagggcaacgggctcttggacaaagctgacttcaagcaagcactgaaggtattccatctggaggtgtcagagaaggactttgagtccgcttggctcatcctgaatgacaacgggaatgggaaagtggactacggtgaattcaaacggggaatcatcggtgaaatgaatgagtatagaaagtcttatgtccggaaagcgttcatgaaattagatttcaacaaatctggatccgtgcctattatcaacatccgcaaatgttattgcgctaaaaagcattctcaggtcatctctggctag

SEQ ID NO: 292908 - DNA, 2135 bp, Artificial Sequence
  derived and/or modified sequence
agacgcgggcctggactgtctagactgtcctgtctaaagctttctgaatgcggtttttggaggaatcgcgctagtttataccttttccaactcttctaactctggacctcttcttaccgagcttgttaggtgaaatcaggctgactgtctcttgtgcccctcgcctgtcctgtccaggaatcccagttaggtaggggatggggaattccttctgctacactgcagtatactgcatgataaacacaggaactcaaatggatttagaggttaaaggagttgctgccacttctaggagccaaattcagccattctttggaagaaagaagcctctacaacaaaggtggacttctgagtcatggacaaaccagaattcttgcccaccagtggtcccacgacttgatttgggaagccttgttgactctgatgatgaggacaatttttcatatattccacttagtacagcaaacctgccaaattcatcttctactcttggctgggtcacaccatgtcaaactccatatactcagtatcatctaaataaattggatcagaacataatacctgaaaatttgccagcaccaacagacaaatgtaaactaaaatatcagcaatgtaaaactgaaattaaagagggctataagcagtatagtcagagaaatgcagaaaatacaaaatcaaatgttacacataaacagtctccaagaaacaagatagatgaaaagtgtgtgcaagatgaagaagccaacacagatgaccttacgactctggataggaaagccatcttacagcaaggttatgcagacaactcttgcgataaacaacagagggcaagaaaattggatgcagaaattgtggctgcagagaagaagaaacagattgttgcagagcaagtgatgatagaccacttatctagggctgtcatcagtgatccagagcaaaatttagccattgagcaaaaagaaagtgatcatatccttccagattcaaagatgacacctcttcgatttagaaaaagaacactacatgaaacaaagataagaactcattctacattaactgaaaatgtgctttctcataaattacagtttgatggtaggatcgtatcacgtaatggacgtgatgcttgcagagagctcattgggttctttttcactcatgaccaatcccttacaatttatgaatatcgacaatttgggaaaaatagaacaaatgtgcttccttttattcaaaaaagcatttatagtcatcagtgtggacgaagaaaaggaaaacaataccgacttggtgatttttatgttggtgcaaccttgacatttttgagttctgatcatctcagccttccagaaagcatcaaagaaaacacattacttaaactccgaatcacaaatattgatcaaatagctttggattctctcaaaactgcttctatggaacaggaggatgatataatcattcaagaaaccaatgataggctggtcttcaaagcaattcaagatgtgctaaaagaaaaactacataaaagaggtgttcgtattttgactggattgggaaaatattttcaacagttggacaaggaaggaaatggacttttagataaggcagattttaagcaagctctaaaagtgtttcacttagaagtgtctgaaaaggattttgagtctgcatggctaattctgaatgacaatggcaatggcaaggttgattatggagaattcaaacgtggtattattggtgaaatgaatgaatacaggaaatcatatgttcgaaaggcctttatgaaactggatttcaacaaaagtggcagtgtgcctattataaacataagaaaatgttactgtgcaaagaagcattctcaagtaatttcaggttgaccagcaaggacaaacatgaaaatgcttaaaaaaaagaaagcgcttaaaacaaagaaatagaaggtaatgggcatatataaaataagccaagcaagagaagagcaaagacaatctgcagggtggacatggatgtattcgtttctgatcatgagaagaggctcttgtcatacatatcgttccatttttattttaaagttctataaacttctgaggtaaactgatttcttggatgtacttaataaagaataaatgtttcatattgga

SEQ ID NO: 292909 - DNA, 1674 bp, Artificial Sequence
  derived and/or modified sequence
atgggcaacagcttctgctacaccgccgtgtactgcatgatcaacaccggcacccagatggacctggaggtgaagggcgtggccgccaccagcagaagccagatccagcccttcttcggcagaaagaagcccctgcagcagagatggaccagcgagagctggaccaaccagaacagctgcccccccgtggtgcccagactggacctgggcagcctggtggacagcgacgacgaggacaacttcagctacatccccctgagcaccgccaacctgcccaacagcagcagcaccctgggctgggtgaccccctgccagaccccctacacccagtaccacctgaacaagctggaccagaacatcatccccgagaacctgcccgcccccaccgacaagtgcaagctgaagtaccagcagtgcaagaccgagatcaaggagggctacaagcagtacagccagagaaacgccgagaacaccaagagcaacgtgacccacaagcagagccccagaaacaagatcgacgagaagtgcgtgcaggacgaggaggccaacaccgacgacctgaccaccctggacagaaaggccatcctgcagcagggctacgccgacaacagctgcgacaagcagcagagagccagaaagctggacgccgagatcgtggccgccgagaagaagaagcagatcgtggccgagcaggtgatgatcgaccacctgagcagagccgtgatcagcgaccccgagcagaacctggccatcgagcagaaggagagcgaccacatcctgcccgacagcaagatgacccccctgagattcagaaagagaaccctgcacgagaccaagatcagaacccacagcaccctgaccgagaacgtgctgagccacaagctgcagttcgacggcagaatcgtgagcagaaacggcagagacgcctgcagagagctgatcggcttcttcttcacccacgaccagagcctgaccatctacgagtacagacagttcggcaagaacagaaccaacgtgctgcccttcatccagaagagcatctacagccaccagtgcggcagaagaaagggcaagcagtacagactgggcgacttctacgtgggcgccaccctgaccttcctgagcagcgaccacctgagcctgcccgagagcatcaaggagaacaccctgctgaagctgagaatcaccaacatcgaccagatcgccctggacagcctgaagaccgccagcatggagcaggaggacgacatcatcatccaggagaccaacgacagactggtgttcaaggccatccaggacgtgctgaaggagaagctgcacaagagaggcgtgagaatcctgaccggcctgggcaagtacttccagcagctggacaaggagggcaacggcctgctggacaaggccgacttcaagcaggccctgaaggtgttccacctggaggtgagcgagaaggacttcgagagcgcctggctgatcctgaacgacaacggcaacggcaaggtggactacggcgagttcaagagaggcatcatcggcgagatgaacgagtacagaaagagctacgtgagaaaggccttcatgaagctggacttcaacaagagcggcagcgtgcccatcatcaacatcagaaagtgctactgcgccaagaagcacagccaggtgatcagcggctag

SEQ ID NO: 292910 - protein, 204 aa, Artificial Sequence
  derived and/or modified sequence
MEQEDDIIIQETNDRLVFKAIQDVLKEKLHKRGVRILTGLGKYFQQLDKEGNGLLDKADFKQALKVFHLEVSEKDFESAWLILNDNGNGKVDYGEFKRGIIGEMNEYRKSYVRKAFMKLDFNKSGSVPIINIRKCYCAKKHSQVISGHSTEEEIKSSFLETLKVACSKSDEVSYGEFEDYYEGLSIGIVDDEDFVNILRTPWGI

SEQ ID NO: 292911 - DNA, 2569 bp, Artificial Sequence
  derived and/or modified sequence
ggggagaggaggggaaagctagacctgcagagtgaagaaagctggtaatagatgtctgacaaactaaagaaagacttgtgttacgatcagaacataatacctgaaaatttgccagcaccaacagacaaatgtaaactaaaatatcagcaatgtaaaactgaaattaaagagggctataagcagtatagtcagagaaatgcagaaaatacaaaatcaaatgttacacataaacagtctccaagaaacaagatagatgaaaagtgtgtgcaagatgaagaagccaacacagatgaccttacgactctggataggaaagccatcttacagcaaggttatgcagacaactcttgcgataaacaacagagggcaagaaaattggatgcagtaagttgtcagcatttttacttatttggaaattgtggctgcagagaagaagaaacagattgttgcagagcaagtgatgatagaccacttatctagggctgtcatcagtgatccagagcaaaatttagccattgagcaaaaagaaagtgatcatatccttccagattcaaagatgacacctcttcgatttagaaaaagaacactacatgaaacaaaggtgcaaccttgacatttttgagttctgatcatctcagccttccagaaagcatcaaagaaaacacattacttaaactccgaatcacaaatattgatcaaatagctttggattctctcaaaactgcttctatggaacaggaggatgatataatcattcaagaaaccaatgataggctggtcttcaaagcaattcaagatgtgctaaaagaaaaactacataaaagaggtgttcgtattttgactggattgggaaaatattttcaacagttggacaaggaaggaaatggacttttagataaggcagattttaagcaagctctaaaagtgtttcacttagaagtgtctgaaaaggattttgagtctgcatggctaattctgaatgacaatggcaatggcaaggttgattatggagaattcaaacgtggtattattggtgaaatgaatgaatacaggaaatcatatgttcgaaaggcctttatgaaactggatttcaacaaaagtggcagtgtgcctattataaacataagaaaatgttactgtgcaaagaagcattctcaagtaatttcaggccattcaacagaggaagaaatcaaatcatcctttctagaaacattaaaagttgcctgcagcaagtctgatgaagtgtcatatggtgaatttgaagattactatgaaggtttaagtataggaatagtagatgatgaagactttgttaacatcttacgtactccatgggggatttagtctttaataatacatatgtcatcaacactaagcattttattggagagatgatatcaatgtaaaggatgatcaaacactggaatatattttcctaggacttcctttattctggtttcttgtttgtttgttttgttttgttttgttttctcaaaaatgttgaatttggaaagagaactatccagaaagatagatgtaggggtgtgttagtgtttgtgcatgtgtatgcctgttcacatgtccttacatttgtaaagatatctttttggtttattacttatcttgcgtatattttagaggtcattttttattaacttcagtaggaaagttacatctgcatcaaacaatatggcaacatctatttattaaccaagtttcctgtcctttcacattgttttttgctacctcttcctcagaatatatttgccaccatggtcaatttgataaattagaattgggcccaaagccagtgagataattcaatgtgtttttaacacatgaaaatattaaaggatatgcaagagaaatttttcaagcagtgtgattatagatgttttctgtatatagaatatttcaaatgatggaggtttaccccatgatgctcatttaaatactgacttgtcttttaaatctgtcttctaaattatgtactgttgttggttaaatagagcacaatgtagttattctaatgcccagttgtatttgttcttttattctgctttttaactgtaatcctttttaccagcatacgattgttattgagcaatatgaaagggaaatgttctttattaaaatcaatacattatcttattaaacaaagatcctaaaagtatattgttgcatatatgaatccaaggaatagttcagtaattattgcctaaaatgtgaaagcatattttgtatcctaaaatgaatgtatgatattctaaacatctgttttagtataacaaacaattgaaacatttccttctaaatatatgttatttaatagttacatgtattataatcattctttctaaattctttgctagtcatttcttcctgggaatacagagaaaagagacaactttatgagttgttttcaacttcataattttaaattttctatgttaatataacataaattagaaaaaataagtgattcaaaatgaaaatatttactttgtagaatatgactttagacatatcactgtatccatctatacttggcagcaacatgagaagtgtg

SEQ ID NO: 292912 - protein, 443 aa, Artificial Sequence
  derived and/or modified sequence
MTHTLPSSYHNDARSSLSVSLEPESLGLGSANSSQDSLHKAPKKKGIKSSIGRLFGKKEKARLGQLRGFMETEAAAQESLGLGKLGTQAEKDRRLKKKHELLEEARRKGLPFAQWDGPTVVAWLELWLGMPAWYVAACRANVKSGAIMSALSDTEIQREIGISNPLHRLKLRLAIQEMVSLTSPSAPPTSRTCPVFLQTLAYGDMNHEWIGNEWLPSLGLPQYRSYFMECLVDARMLDHLTKKDLRVHLKMVDSFHRTSLQYGIMCLKRLNYDRKELERRREASQHEIKDVLVWSNDRVIRWIQAIGLREYANNILESGVHGSLIALDENFDYSSLALLLQIPTQNTQARQILEREYNNLLALGTERRLDESDDKNFRRGSTWRRQFPPREVHGISMMPGSSETLPAGFRLTTTSGQSRKMTTDVASSRLQRLDNSTVRTYSC

SEQ ID NO: 292913 - DNA, 2834 bp, Artificial Sequence
  derived and/or modified sequence
aatgctgttcagctgcctgtttgaagaaagtttattttttaaaaactatgtttgcagttggctgaagagagacatggaaatattgaagaacgtatgagacatttagagggtcaacttgaagagaagaatcaagaacttcaaagagctaggcaaagagagaaaatgaatgaggagcataacaagagattatcggatacggttgatagacttctgactgaatccaatgaacgcctacaactacacttaaaggaaagaatggctgctctagaagaaaagttggcagctaccagaccagcaagagttatgagagctggttaccaattccagagcataaattaagaatgttttaattcaagaatcagaaactttcagaaagaatcttgaagaatctttacatgataaggaaagattagcagaagaaattgaaaagctgagatctgaacttgaccaattgaaaatgagaactggctctttaattgaacccacaataccaagaactcatctagacacctcagctgagttgcggtactcagtgggatccctagtggacagccagtctgattacagaacaactaaagtaataagaagaccaaggagaggccgcatgggtgtgcgaagagatgagccaaaggtgaaatctcttggggatcacgagtggaatagaactcaacagattggagtactaagcagccacccttttgaaagtgacactgaaatgtctgatattgatgatgatgacagagaaacaatttttagctcaatggatcttctctctccaagtggtcattccgatgcccagacgctagccatgatgcttcaggaacaattggatgccatcaacaaagaaatcaggctaattcaggaagaaaaagaatctacagagttgcgtgctgaagaaattgaaaatagagtggctagtgtgagcctcgaaggcctgaatttggcaagggtccacccagccaagtgatctgaggaaacatcggagaaagattgcagttgtggaagaagatggtcgagaggacaaagcaacaattaaatgtgaaacttctcctcctcctacccctagagccctcagaatgactcacactctcccttcttcctaccacaatgatgctcgaagtagtttatctgtctctcttgagccagaaagcctcgggcttggtagtgccaacagcagccaagactctcttcacaaagcccccaagaagaaaggaatcaagtcttcaataggacgtttgtttggtaaaaaagaaaaagctcgacttgggcagctccgaggctttatggagactgaagctgcagctcaggagtccctggggttaggcaaactcggaactcaagctgagaaggatcgaagactaaagaaaaagcatgaacttcttgaagaagctcggagaaagggattaccttttgcccagtgggatgggccaactgtggtcgcatggctagagctttggttgggaatgcctgcgtggtacgtggcagcctgccgagccaacgtgaagagtggtgccatcatgtctgctttatctgacactgagatccagagagaaattggaatcagcaatccactgcatcgcttaaaacttcgattagcaatccaggagatggtttccctaacaagtccttcagctcctccaacatctcgaacttgtccggtttttctacagaccctggcttatggagatatgaatcatgagtggattggaaatgaatggcttcccagcttggggttacctcagtacagaagttactttatggaatgcttggtagatgcaagaatgttagatcacctaacaaaaaaagatctccgtgtccatttaaaaatggtggatagtttccatcgaacaagtttacaatatggaattatgtgcttaaagaggttgaattatgacagaaaagaactagaaagaagacgggaagcaagccaacatgaaataaaagacgtgttggtgtggagcaatgaccgagttattcgctggatacaagcaattggacttcgagaatatgcaaataatatacttgagagcggtgtgcatggctcacttatagccctggatgaaaactttgactacagcagcttagctttattattacagattccaacacagaacacccaggcaaggcagattcttgaaagagaatacaataacctcttggccctgggaactgaaaggcgactggatgaaagtgatgacaagaacttcagacgtggatcaacctggagaaggcagtttcctcctcgtgaagtacatggaatcagcatgatgcctgggtcctcagaaacattaccagctggatttaggttaaccacaacctctgggcagtcaagaaaaatgacaacagatgttgcttcatcaagactgcagaggttagacaactccactgttcgcacatactcatgttgaccagccactcaaaggaggcagcactgacctgctatggcgtcttttcagtctactctacctaaagtgcactaccatctaagaagacgagcagtgaaaacctttgtgaaaactgaattctaaggaaataatgacgtcatgacttattaaaagctgaaaaatgtgatttttggggggagtcagatattacatttgattagtttactacaaattgtaataaaatgcttaagtcatttgaataataaacatcatctacatcataaactctgtacaacagatgcttttatgaaatgaagccagttgtttttcatgttttattgtaatatactaggcatttatgtattaccgtgcatttctttttaaatgtgtaagtcttatgtaaatggatataaatatgattttttaaaaaataaaatatatggttcatgg

SEQ ID NO: 292914 - DNA, 2976 bp, Artificial Sequence
  derived and/or modified sequence
aaataactccaatgttttgctgatgcttggatgtaacaggcctttgtagctgacacatttcaagcaatgctgttcagctgcctgtttgaagaaagtttattttttaaaaactatgtttgcagttggctgaagagagacatggaaatattgaagaacgtatgagacatttagagggtcaacttgaagagaagaatcaagaacttcaaagagctaggcaaagagagaaaatgaatgaggagcataacaagagattatcggatacggttgatagacttctgactgaatccaatgaacgcctacaactacacttaaaggaaagaatggctgctctagaagaaaagaatgttttaattcaagaatcagaaactttcagaaagaatcttgaagaatctttacatgataaggaaagattagcagaagaaattgaaaagctgagatctgaacttgaccaattgaaaatgagaactggctctttaattgaacccacaataccaagaactcatctagacacctcagctgagttgcggtactcagtgggatccctagtggacagccagtctgattacagaacaactaaagtaataagaagaccaaggagaggccgcatgggtgtgcgaagagatgagccaaaggtgaaatctcttggggatcacgagtggaatagaactcaacagattggagtactaagcagccacccttttgaaagtgacactgaaatgtctgatattgatgatgatgacagagaaacaatttttagctcaatggatcttctctctccaagtggtcattccgatgcccagacgctagccatgatgcttcaggaacaattggatgccatcaacaaagaaatcaggctaattcaggaagaaaaagaatctacagagttgcgtgctgaagaaattgaaaatagagtggctagtgtgagcctcgaaggcctgaatttggcaagggtccacccaggtacctccattactgcctctgttacagcttcatcgctggccagttcatctccccccagtggacactcaactccaaagctcacccctcgaagccctgccagggaaatggatcggatgggagtcatgacactgccaagtgatctgaggaaacatcggagaaagattgcagttgtggaagaagatggtcgagaggacaaagcaacaattaaatgtgaaacttctcctcctcctacccctagagccctcagaatgactcacactctcccttcttcctaccacaatgatgctcgaagtagtttatctgtctctcttgagccagaaagcctcgggcttggtagtgccaacagcagccaagactctcttcacaaagcccccaagaagaaaggaatcaagtcttcaataggacgtttgtttggtaaaaaagaaaaagctcgacttgggcagctccgaggctttatggagactgaagctgcagctcaggagtccctggggttaggcaaactcggaactcaagctgagaaggatcgaagactaaagaaaaagcatgaacttcttgaagaagctcggagaaagggattaccttttgcccagtgggatgggccaactgtggtcgcatggctagagctttggttgggaatgcctgcgtggtacgtggcagcctgccgagccaacgtgaagagtggtgccatcatgtctgctttatctgacactgagatccagagagaaattggaatcagcaatccactgcatcgcttaaaacttcgattagcaatccaggagatggtttccctaacaagtccttcagctcctccaacatctcgaacttgtccggtttttctacagaccctggcttatggagatatgaatcatgagtggattggaaatgaatggcttcccagcttggggttacctcagtacagaagttactttatggaatgcttggtagatgcaagaatgttagatcacctaacaaaaaaagatctccgtgtccatttaaaaatggtggatagtttccatcgaacaagtttacaatatggaattatgtgcttaaagaggttgaattatgacagaaaagaactagaaagaagacgggaagcaagccaacatgaaataaaagacgtgttggtgtggagcaatgaccgagttattcgctggatacaagcaattggacttcgagaatatgcaaataatatacttgagagcggtgtgcatggctcacttatagccctggatgaaaactttgactacagcagcttagctttattattacagattccaacacagaacacccaggcaaggcagattcttgaaagagaatacaataacctcttggccctgggaactgaaaggcgactggatgaaagtgatgacaagaacttcagacgtggatcaacctggagaaggcagtttcctcctcgtgaagtacatggaatcagcatgatgcctgggtcctcagaaacattaccagctggatttaggttaaccacaacctctgggcagtcaagaaaaatgacaacagatgatggcgtcttttcagtctactctacctaaagtgcactaccatctaagaagacgagcagtgaaaacctttgtgaaaactgaattctaaggaaataatgacgtcatgacttattaaaagctgaaaaatgtgatttttggggggagtcagatattacatttgattagtttactacaaattgtaataaaatgcttaagtcatttgaataataaacatcatctacatcataaactctgtacaacagatgcttttatgaaatgaagccagttgtttttcatgttttattgtaatatactaggcatttatgtattaccgtgcatttctttttaaatgtgtaagtcttatgtaaatggatataaatatgattttttaaaaaataaaatatatggttcatggagtctcgagtgcaaacatttgacaattccaagtactgtttgtattttaccattccaccatttttacagtttttggattgttaatagtcaaatcaatatgttt

SEQ ID NO: 292915 - protein, 317 aa, Artificial Sequence
  derived and/or modified sequence
MWLYLAAFVGLYYLLHWYRERQVVSHLQDKYVFITGCDSGFGNLLARQLDARGLRVLAACLTEKGAEQLRGQTSDRLETVTLDVTKMESIAAATQWVKEHVGDRGLWGLVNNAGILTPITLCEWLNTEDSMNMLKVNLIGVIQVTLSMLPLVRRARGRIVNVSSILGRVAFFVGGYCVSKYGVEAFSDILRREIQHFGVKISIVEPGYFRTGMTNMTQSLERMKQSWKEAPKHIKETYGQQYFDALYNIMKEGLLNCSTNLNLVTDCMEHALTSVHPRTRYSAGWDAKFFFIPLSYLPTSLADYILTRSWPKPAQAV

SEQ ID NO: 292916 - protein, 88 aa, Artificial Sequence
  derived and/or modified sequence
MWLYLAAFVGLYYLLHWYRERQVVSHLQDKYVFITGCDSGFGNLLARQLDARGLRVLAACLTEKGAEQLRGQTSDRLETVTLDVTKME

SEQ ID NO: 292917 - protein, 75 aa, Artificial Sequence
  derived and/or modified sequence
MWLYLAAFVGLYYLLHWYRERQVVSHLQDKYVFITGCDSGFGNLLARQLDARGLRVLAACLTEKGAEQLRGQTSD

SEQ ID NO: 292918 - DNA, 954 bp, Artificial Sequence
  derived and/or modified sequence
atgtggctgtacctggccgccttcgtgggcctgtactacctgctgcactggtacagagagagacaggtggtgagccacctgcaggacaagtacgtgttcatcaccggctgcgacagcggcttcggcaacctgctggccagacagctggacgccagaggcctgagagtgctggccgcctgcctgaccgagaagggcgccgagcagctgagaggccagaccagcgacagactggagaccgtgaccctggacgtgaccaagatggagagcatcgccgccgccacccagtgggtgaaggagcacgtgggcgacagaggcctgtggggcctggtgaacaacgccggcatcctgacccccatcaccctgtgcgagtggctgaacaccgaggacagcatgaacatgctgaaggtgaacctgatcggcgtgatccaggtgaccctgagcatgctgcccctggtgagaagagccagaggcagaatcgtgaacgtgagcagcatcctgggcagagtggccttcttcgtgggcggctactgcgtgagcaagtacggcgtggaggccttcagcgacatcctgagaagagagatccagcacttcggcgtgaagatcagcatcgtggagcccggctacttcagaaccggcatgaccaacatgacccagagcctggagagaatgaagcagagctggaaggaggcccccaagcacatcaaggagacctacggccagcagtacttcgacgccctgtacaacatcatgaaggagggcctgctgaactgcagcaccaacctgaacctggtgaccgactgcatggagcacgccctgaccagcgtgcaccccagaaccagatacagcgccggctgggacgccaagttcttcttcatccccctgagctacctgcccaccagcctggccgactacatcctgaccagaagctggcccaagcccgcccaggccgtgtag

SEQ ID NO: 292919 - DNA, 267 bp, Artificial Sequence
  derived and/or modified sequence
atgtggctgtacctggccgccttcgtgggcctgtactacctgctgcactggtacagagagagacaggtggtgagccacctgcaggacaagtacgtgttcatcaccggctgcgacagcggcttcggcaacctgctggccagacagctggacgccagaggcctgagagtgctggccgcctgcctgaccgagaagggcgccgagcagctgagaggccagaccagcgacagactggagaccgtgaccctggacgtgaccaagatggagtag

SEQ ID NO: 292920 - DNA, 228 bp, Artificial Sequence
  derived and/or modified sequence
atgtggctgtacctggccgccttcgtgggcctgtactacctgctgcactggtacagagagagacaggtggtgagccacctgcaggacaagtacgtgttcatcaccggctgcgacagcggcttcggcaacctgctggccagacagctggacgccagaggcctgagagtgctggccgcctgcctgaccgagaagggcgccgagcagctgagaggccagaccagcgactag

SEQ ID NO: 292921 - DNA, 954 bp, Artificial Sequence
  derived and/or modified sequence
atgtggctgtacctcgccgcatttgtcggcctttactacctgctacactggtatagggagcggcaagtggtgtcacacctgcaagacaaatatgtcttcatcacaggatgtgacagcggatttggcaacttactggctcgtcaactcgatgcaagagggctccgcgtgttagccgcttgcctgacagaaaagggcgcagaacagctgagaggccagacaagcgacagactggaaaccgtgactctagatgtgactaagatggagtcaatcgccgcagctacccagtgggtcaaagaacacgtgggtgatagaggcctctggggtttagttaataatgccgggatcttgacccccattacactgtgcgaatggctgaacaccgaagattccatgaacatgctgaaggtgaacctaatcggggtgattcaggtgactctttccatgctgcctttagtgcgccgggcccgcggcaggatagtaaacgtctccagcattcttggacgggtcgcattcttcgtaggcggttattgtgtgagcaagtacggtgtagaggccttctcagatattctgcgcagggaaattcagcacttcggggtcaagatctcaatcgtagaacctggctatttcagaacaggcatgaccaacatgacccagtcattggaacgtatgaaacaatcctggaaggaagcacccaaacatatcaaggaaacgtacggacagcagtattttgacgccctttataacatcatgaaggaaggcttgctgaactgttctactaatctgaatctggtgactgactgtatggaacacgctctgacatccgtacatccaaggacccggtatagcgctggctgggatgcaaagttcttctttattcctttgtcctacctgcctacatccctcgcagactatattttgactcgaagctggccaaagcccgcccaagctgtgtag

SEQ ID NO: 292922 - DNA, 954 bp, Artificial Sequence
  derived and/or modified sequence
atgtggctgtacctggctgcgttcgtgggcctgtattatttgcttcactggtaccgggagcgacaggtggtgtctcatctgcaggataagtatgtttttataaccggctgtgacagtggtttcggcaacctgttggcgagacagctcgacgcacgtggattgagggtgcttgcagcatgcctgactgagaagggggcggagcaacttcggggccagactagtgataggctagaaacagtcacgctagatgtgacaaagatggagagcattgcagccgcaacccagtgggtcaaagagcacgtgggcgaccgtggactatggggtctcgtaaacaatgccgggatattaaccccgatcacactgtgcgaatggctcaacaccgaggactccatgaacatgctgaaggtgaacctaatcggagtgatccaggtcacactgtctatgctgccactggttaggagggcgcgcggaaggatcgtcaacgtcagcagcatcctgggcagggtggcctttttcgtcggtggatactgcgtctctaaatatggagttgaagcgttctcagatatcttgagacgggaaatccaacactttggagtgaaaattagtatcgtggagcccgggtattttaggactggcatgactaacatgacacagagtttggaacggatgaagcagtcttggaaggaagcccctaagcacattaaagagacatacggccagcagtatttcgacgccctttataacatcatgaaagagggactgctgaactgttctactaatttaaacttagttactgactgtatggagcacgcattgacctccgtgcatccccgtacacgctatagtgctggctgggacgccaaatttttttttattccattgagttatttgcccaccagccttgccgattatatccttacccgctcatggcccaaacccgcacaggcggtatag

SEQ ID NO: 292923 - DNA, 267 bp, Artificial Sequence
  derived and/or modified sequence
atgtggctgtatctcgctgcgtttgtgggtctttactacctgctacattggtatagggaaagacaggtggtgagccaccttcaggacaaatacgtattcatcacaggttgcgacagcggattcggtaacttacttgcaaggcaactcgatgctcggggactgcgggtgctggcagcatgtctcacagagaaaggcgctgagcaactgagaggacagacatccgacaggctggaaaccgtgacgcttgacgtcaccaagatggagtag

SEQ ID NO: 292924 - DNA, 954 bp, Artificial Sequence
  derived and/or modified sequence
atgtggctatatttggccgcctttgtgggtctttattacctgctccactggtaccgagagcgtcaggttgttagccacttgcaggataagtatgtcttcataactggatgcgattcagggttcggaaacctcctggctcggcagctcgatgctcggggacttagggtcctggccgcgtgcctcacggagaaaggagccgaacagttaagaggccagacctcagatagactcgaaacagttaccctggacgtgactaaaatggaaagtatcgccgctgctacccaatgggtcaaggaacacgttggagaccgtggcctctggggcctggtgaacaatgcaggcatcttgacccccataaccttatgcgagtggcttaacactgaagatagtatgaacatgttgaaggtgaacttaattggagtgattcaggttaccctgagtatgctaccgctggtgcgcagggcccgtggccgcattgttaatgtgtccagcatactgggaagggtggccttcttcgtgggtggctactgcgtttccaagtacggagtagaggcctttagtgatatacttcgcagggaaatccagcatttcggtgttaagatttctatcgttgaacctggatacttccggacgggcatgactaatatgacgcaatctctcgagcgtatgaaacagagctggaaggaagcccctaaacatatcaaagaaacctatggccagcaatactttgatgctctgtataatataatgaaagagggactgttaaattgctccacaaacctaaatttggtcaccgattgcatggagcacgccctgaccagcgtgcacccacggaccaggtactctgccggctgggatgcgaagttttttttcatcccgctcagttacttaccaactagtttggcggattacattctcaccaggagttggcccaagccggctcaagccgtgtag

SEQ ID NO: 292925 - DNA, 954 bp, Artificial Sequence
  derived and/or modified sequence
atgtggctgtacctggccgctttcgtcggcctgtactacctgctgcactggtaccgcgagaggcaggttgtcagccatctccaggacaaatacgtgtttatcaccgggtgtgactccgggtttggaaacctactggcccgccagctcgatgcccgtggtctcagagtattggctgcgtgcctcacagagaaaggtgcggagcagttaagaggccagacgtccgacaggctggagactgtgaccttggatgtgacaaagatggagtcaattgctgctgccactcaatgggtgaaggagcatgtcggggatcgcgggctctggggattagtgaacaatgctggtatcctcacgcccatcacactctgcgaatggctcaacactgaagactcaatgaatatgctcaaggtaaatttgatcggcgtcattcaggtgacgctctccatgctcccgctagtgaggcgcgccagaggtcgaattgtgaatgtaagcagtatcctggggcgcgtcgctttctttgtgggagggtactgcgtatctaagtacggtgtggaggctttctcagatatactccgccgtgagatccaacattttggtgtgaaaataagtattgtagagccgggctatttccgtaccgggatgacaaacatgacccagtctctagagagaatgaaacagagctggaaagaagcacccaaacacatcaaagagacctatggacagcagtattttgacgctttatataacataatgaaggagggccttctcaactgctcgaccaatctgaacctggtcaccgattgcatggagcacgcactcacatcagtacacccaagaacccggtattcagctggatgggacgcaaagttcttcttcattcccttgagttatctgcccacttcactagcagactatatcctcactcggagttggccaaagcccgcacaagctgtgtag

SEQ ID NO: 292926 - DNA, 954 bp, Artificial Sequence
  derived and/or modified sequence
atgtggctatacttggctgcatttgtggggctctactacctattgcactggtatagggaacggcaggtggtgtcgcacctacaggacaagtacgtctttatcaccggttgtgatagtggtttcggtaacttactggcacgccagctcgacgcacgaggtcttcgagtgctcgccgcttgtctaacagagaagggtgcagaacaattgcggggccagaccagtgataggttggagaccgtaactctggacgtaacaaagatggagtctatcgcagctgcaacccaatgggtaaaagagcacgtaggagatagagggctgtggggattagtgaacaacgccgggattctgacgccaattaccctctgcgagtggcttaatacagaggactccatgaatatgctcaaggtgaacctgattggtgttatccaggtcacactaagcatgctgccccttgtgcgacgagcccgcggcagaattgtgaacgtgtccagtatcctaggaagggtggcattcttcgtgggcggctactgcgtgtcaaagtatggtgtagaggctttttccgatatcttgcgcagggagatccagcacttcggcgtgaagatttccatcgtggaaccaggctatttccgcaccgggatgaccaatatgacccaaagccttgaaaggatgaaacagagctggaaagaagccccgaaacatattaaagagacatatggtcaacagtatttcgatgcactctataacattatgaaggaagggctgctgaactgttccaccaacctgaacctcgtgacggactgcatggaacacgccttgaccagtgtccaccctaggactagatacagcgccgggtgggatgccaaattcttctttatccctctaagttacctccctaccagcctggctgattacatacttactcggtcctggccaaaaccggctcaggccgtatag

SEQ ID NO: 292927 - DNA, 228 bp, Artificial Sequence
  derived and/or modified sequence
atgtggttgtatctggctgcttttgtgggcctgtactatctgttacactggtacagagagagacaggtggtgtctcacctgcaggataaatatgtttttatcacaggttgcgactcggggttcggcaaccttctggcccggcagctcgatgcccggggcctgcgggttctcgctgcttgtttgacggagaaaggagcagagcaacttaggggacagactagcgactag

SEQ ID NO: 292928 - DNA, 1512 bp, Artificial Sequence
  derived and/or modified sequence
agcagttggggcaggaggaagccgactgctgcctggtctgcaaagaagtcctttcaagtctctaggactggactcttcctaagcaagtccgagaaggaagcaccctcactatgtggctctacctggcggccttcgtgggcctgtactaccttctgcactggtaccgggagaggcaggtggtgagccacctccaagacaagtatgtctttatcacgggctgtgactcgggctttgggaacctgctggccagacagctggatgcacgaggcttgagagtgctggctgcgtgtctgacggagaagggggccgagcagctgaggggccagacgtctgacaggctggagacggtgaccctggatgttaccaagatggagagcatcgctgcagctactcagtgggtgaaggagcatgtgggggacagaggactctggggactggtgaacaatgcaggcattcttacaccaattaccttatgtgagtggctgaacactgaggactctatgaatatgctcaaagtgaacctcattggtgtgatccaggtgaccttgagcatgcttcctttggtgaggagagcacggggaagaattgtcaatgtctccagcattctgggaagagttgctttctttgtaggaggctactgtgtctccaagtatggagtggaagccttttcagatattctgaggcgtgagattcaacattttggggtgaaaatcagcatagttgaacctggctacttcagaacgggaatgacaaacatgacacagtccttagagcgaatgaagcaaagttggaaagaagcccccaagcatattaaggagacctatggacagcagtattttgatgccctttacaatatcatgaaggaagggctgttgaattgtagcacaaacctgaacctggtcactgactgcatggaacatgctctgacatcggtgcatccgcgaactcgatattcagctggctgggatgctaaatttttcttcatccctctatcttatttacctacatcactggcagactacattttgactagatcttggcccaaaccagcccaggcagtctaaagaaaactgggttggtgcttcttggaatgaaggcaaaaatctgaaattgttagtgtctcagtaatcctgatttagaacccaggctttttgtaacaatgtgttttcttgcctaaattcatttatctggcatcatcagagtactaacatgtttatatttcagatatccaaagcttaccactttaggtgatgaatctttactattttagcccttttttgatgagactatttgtctaaagtgaatcatttgttcttgccttattaaacagagtagatggaaaacaatttaacctattttgaagtcatttctttatgaatatgaataattgttctatgctttaataatctattgtgaggaaactactaagaaatatgttggtgtgtttgtccttacttgaaatgggtctgtattatggtacttttaataaatatttgatttttctttctcttc

SEQ ID NO: 292929 - DNA, 1547 bp, Artificial Sequence
  derived and/or modified sequence
acttggtgcgcgcgggggctgcgggagacgcagcagtttgcgatctgcccacgcgttcgggcactagggccaccgctcttgtgggcagaaggccgcgtccattccaggaagaggatcttctccggaaatatctgattctgcagctgatcaaggatgacactggtgagaaccctatgagggagtgaagcagcctggactcttaccacaagagggaggtgttataagagcaatgcagaggttggagtgggcagcagttggggcaggaggaagccgactgctgcctggtctgcaaagaagtcctttcaagtctctaggactggactcttcctaagcaagtccgagaaggaagcaccctcactatgtggctctacctggcggccttcgtgggcctgtactaccttctgcactggtaccgggagaggcaggtggtgagccacctccaagacaagtatgtctttatcacgggctgtgactcgggctttgggaacctgctggccagacagctggatgcacgaggcttgagagtgctggctgcgtgtctgacggagaagggggccgagcagctgaggggccagacgtctgacaggctggagacggtgaccctggatgttaccaagatggagagcatcgctgcagctactcagtgggtgaaggagcatgtgggggacagaggactctggggactggtgaacaatgcaggcattcttacaccaattaccttatgtgagtggctgaacactgaggactctatgaatatgctcaaagtgaacctcattggtgtgatccaggtgaccttgagcatgcttcctttggtgaggagagcacggggaagaattgtcaatgtctccagcattctgggaagagttgctttctttgtaggaggctactgtgtctccaagtatggagtggaagccttttcagatattctgaggcgtgagattcaacattttggggtgaaaatcagcatagttgaacctggctacttcagaacgggaatgacaaacatgacacagtccttagagcgaatgaagcaaagttggaaagaagcccccaagcatattaaggagacctatggacagcagtattttgatgccctttacaatatcatgaaggaagggctgttgaattgtagcacaaacctgaacctggtcactgactgcatggaacatgctctgacatcggtgcatccgcgaactcgatattcagctggctgggatgctaaatttttcttcatccctctatcttatttacctacatcactggcagactacattttgactagatcttggcccaaaccagcccaggcagtctaaagaaaactgggttggtgcttcttggaatgaaggcaaaaatctgaaattgttagtgtctcagtaatcctgatttagaacccaggctttttgtaacaatgtgttttcttgcctaaattcatttatctggcatcatcagagtactaacatgtttatatttcagatatccaaagcttaccactttaggtgatgaatctttactattttagcccttttttgatgagactatttgtctaa

SEQ ID NO: 292930 - DNA, 592 bp, Artificial Sequence
  derived and/or modified sequence
agtttgcgatctgcccacgcgttcgggcactagggccaccgctcttgtgggcagaaggccgcgtccattccaggaagaggatcttctccggaaattaacagatctgattctgcagctgatcaaggatgacactggtgagaaccctatgagggagtgaagcagcctggactcttaccacaagagggaggtgttataagagcaatgcagaggttggagtgggcagcagttggggcaggaggaagccgactgctgcctggtctgcaaagaagtcctttcaagtctctaggactggactcttcctaagcaagtccggaagcaccctcactatgtggctctacctggcggccttcgtgggcctgtactaccttctgcactggtaccgggagaggcaggtggtgagccacctccaagacaagtatgtctttatcacgggctgtgactcgggctttgggaacctgctggccagacagctggatgcacgaggcttgagagtgctggctgcgtgtctgacggagaagggggccgagcagctgaggggccagacgtctgacaggctggagacggtgaccctggatgttaccaagatggagag

SEQ ID NO: 292931 - DNA, 1751 bp, Artificial Sequence
  derived and/or modified sequence
tcccacttggtgcgcgcgggggctgcgggagacgcagcagtttgcgatctgcccacgcgttcgggcactagggccaccgctcttgtgggcagaaggccgcgtccattccaggaagaggatcttctccggaaatctgatcaaggatgacactggtgagaaccctatgagggagtgaagcagcctggactcttaccacaagagggaggtgttataagagcaatgcagaggttggagtgggcagcagttggggcaggaggaagccgactgctgcctggtctgcaaagaagtcctttcaagtctctaggactggactcttcctaagcaagtccgagaaggaagcaccctcactatgtggctctacctggcggccttcgtgggcctgtactaccttctgcactggtaccgggagaggcaggtggtgagccacctccaagacaagtatgtctttatcacgggctgtgactcgggctttgggaacctgctggccagacagctggatgcacgaggcttgagagtgctggctgcgtgtctgacggagaagggggccgagcagctgaggggccagacgtctgacaggctggagacggtgaccctggatgttaccaagatggagagcatcgctgcagctactcagtgggtgaaggagcatgtgggggacagaggactctggggactggtgaacaatgcaggcattcttacaccaattaccttatgtgagtggctgaacactgaggactctatgaatatgctcaaagtgaacctcattggtgtgatccaggtgaccttgagcatgcttcctttggtgaggagagcacggggaagaattgtcaatgtctccagcattctgggaagagttgctttctttgtaggaggctactgtgtctccaagtatggagtggaagccttttcagatattctgaggcgtgagattcaacattttggggtgaaaatcagcatagttgaacctggctacttcagaacgggaatgacaaacatgacacagtccttagagcgaatgaagcaaagttggaaagaagcccccaagcatattaaggagacctatggacagcagtattttgatgccctttacaatatcatgaaggaagggctgttgaattgtagcacaaacctgaacctggtcactgactgcatggaacatgctctgacatcggtgcatccgcgaactcgatattcagctggctgggatgctaaatttttcttcatccctctatcttatttacctacatcactggcagactacattttgactagatcttggcccaaaccagcccaggcagtctaaagaaaactgggttggtgcttcttggaatgaaggcaaaaatctgaaattgttagtgtctcagtaatcctgatttagaacccaggctttttgtaacaatgtgttttcttgcctaaattcatttatctggcatcatcagagtactaacatgtttatatttcagatatccaaagcttaccactttaggtgatgaatctttactattttagcccttttttgatgagactatttgtctaaagtgaatcatttgttcttgccttattaaacagagtagatggaaaacaatttaacctattttgaagtcatttctttatgaatatgaataattgttctatgctttaataatctattgtgaggaaactactaagaaatatgttggtgtgtttgtccttacttgaaatgggtctgtattatggtacttttaataaatatttgatttttctttctcttc

SEQ ID NO: 292932 - DNA, 1525 bp, Artificial Sequence
  derived and/or modified sequence
actccgctcccgaacccattcctcgcctccatcacctccaccgtagttgagccagcgatagtactgagagtagggaaagagcctccggtaataaagtttaagcagctcgggcagctcggtggggtcaaacgtctccattgagcgcggaactcgccacgagaaggaagcaccctcactatgtggctctacctggcggccttcgtgggcctgtactaccttctgcactggtaccgggagaggcaggtggtgagccacctccaagacaagtatgtctttatcacgggctgtgactcgggctttgggaacctgctggccagacagctggatgcacgaggcttgagagtgctggctgcgtgtctgacggagaagggggccgagcagctgaggggccagacgtctgacaggctggagacggtgaccctggatgttaccaagatggagagcatcgctgcagctactcagtgggtgaaggagcatgtgggggacagaggactctggggactggtgaacaatgcaggcattcttacaccaattaccttatgtgagtggctgaacactgaggactctatgaatatgctcaaagtgaacctcattggtgtgatccaggtgaccttgagcatgcttcctttggtgaggagagcacggggaagaattgtcaatgtctccagcattctgggaagagttgctttctttgtaggaggctactgtgtctccaagtatggagtggaagccttttcagatattctgaggcgtgagattcaacattttggggtgaaaatcagcatagttgaacctggctacttcagaacgggaatgacaaacatgacacagtccttagagcgaatgaagcaaagttggaaagaagcccccaagcatattaaggagacctatggacagcagtattttgatgccctttacaatatcatgaaggaagggctgttgaattgtagcacaaacctgaacctggtcactgactgcatggaacatgctctgacatcggtgcatccgcgaactcgatattcagctggctgggatgctaaatttttcttcatccctctatcttatttacctacatcactggcagactacattttgactagatcttggcccaaaccagcccaggcagtctaaagaaaactgggttggtgcttcttggaatgaaggcaaaaatctgaaattgttagtgtctcagtaatcctgatttagaacccaggctttttgtaacaatgtgttttcttgcctaaattcatttatctggcatcatcagagtactaacatgtttatatttcagatatccaaagcttaccactttaggtgatgaatctttactattttagcccttttttgatgagactatttgtctaaagtgaatcatttgttcttgccttattaaacagagtagatggaaaacaatttaacctattttgaagtcatttctttatgaatatgaataattgttctatgctttaataatctattgtgaggaaactactaagaaatatgttggtgtgtttgtccttacttg

SEQ ID NO: 292933 - DNA, 1722 bp, Artificial Sequence
  derived and/or modified sequence
actccgctcccgaacccattcctcgcctccatcacctccaccgtagttgagccagcgatagtactgagagtagggaaagagcctccggtaataaagtttaagcagctcgggcagctcggtggggtcaaacgtctccattgagcgcggaactcgccacgctgatcaaggatgacactggtgagaaccctatgagggagtgaagcagcctggactcttaccacaagagggaggtgttataagagcaatgcagaggttggagtgggcagcagttggggcaggaggaagccgactgctgcctggtctgcaaagaagtcctttcaagtctctaggactggactcttcctaagcaagtccgagaaggaagcaccctcactatgtggctctacctggcggccttcgtgggcctgtactaccttctgcactggtaccgggagaggcaggtggtgagccacctccaagacaagtatgtctttatcacgggctgtgactcgggctttgggaacctgctggccagacagctggatgcacgaggcttgagagtgctggctgcgtgtctgacggagaagggggccgagcagctgaggggccagacgtctgacaggctggagacggtgaccctggatgttaccaagatggagagcatcgctgcagctactcagtgggtgaaggagcatgtgggggacagaggactctggggactggtgaacaatgcaggcattcttacaccaattaccttatgtgagtggctgaacactgaggactctatgaatatgctcaaagtgaacctcattggtgtgatccaggtgaccttgagcatgcttcctttggtgaggagagcacggggaagaattgtcaatgtctccagcattctgggaagagttgctttctttgtaggaggctactgtgtctccaagtatggagtggaagccttttcagatattctgaggcgtgagattcaacattttggggtgaaaatcagcatagttgaacctggctacttcagaacgggaatgacaaacatgacacagtccttagagcgaatgaagcaaagttggaaagaagcccccaagcatattaaggagacctatggacagcagtattttgatgccctttacaatatcatgaaggaagggctgttgaattgtagcacaaacctgaacctggtcactgactgcatggaacatgctctgacatcggtgcatccgcgaactcgatattcagctggctgggatgctaaatttttcttcatccctctatcttatttacctacatcactggcagactacattttgactagatcttggcccaaaccagcccaggcagtctaaagaaaactgggttggtgcttcttggaatgaaggcaaaaatctgaaattgttagtgtctcagtaatcctgatttagaacccaggctttttgtaacaatgtgttttcttgcctaaattcatttatctggcatcatcagagtactaacatgtttatatttcagatatccaaagcttaccactttaggtgatgaatctttactattttagcccttttttgatgagactatttgtctaaagtgaatcatttgttcttgccttattaaacagagtagatggaaaacaatttaacctattttgaagtcatttctttatgaatatgaataattgttctatgctttaataatctattgtgaggaaactactaagaaatatgttggtgtgtttgtccttacttg

SEQ ID NO: 292934 - DNA, 591 bp, Artificial Sequence
  derived and/or modified sequence
acttggtgcgcgcgggggctgcgggagacgcagcagtttgcgatctgcccacgcgttcgggcactagggccaccgctcttgtgggcagaaggccgcgtccattccaggaagaggatcttctccggaaattaacagatctgattctgcagctgatcaaggatgacactggtgagaaccctatgagggagtgaagcagcctggactcttaccacaagagggaggtgttataagagcaatgcagaggttggagtgggcagcagttggggcaggaggaagccgactgctgcctggtctgcaaagaagtcctttcaagtctctaggactggactcttcctaagcaagtccgagaaggaagcaccctcactatgtggctctacctggcggccttcgtgggcctgtactaccttctgcactggtaccgggagaggcaggtggtgagccacctccaagacaagtatgtctttatcacgggctgtgactcgggctttgggaacctgctggccagacagctggatgcacgaggcttgagagtgctggctgcgtgtctgacggagaagggggccgagcagctgaggggccagacgtctgaca

SEQ ID NO: 292935 - DNA, 954 bp, Artificial Sequence
  derived and/or modified sequence
atgtggctgtacctggccgcctttgtgggcctgtactacctgctgcactggtaccgggagcggcaggtggtgagccacctgcaggacaagtatgtgttcatcaccggctgtgacagcggctttggaaacctgctggcccggcagctggatgcccggggcctgcgggtgctggccgcctgcctgacagagaagggagctgagcagctgcggggccagaccagtgaccggctggagaccgtgaccctggatgtgaccaagatggagagcattgctgctgccacccagtgggtgaaggagcacgtgggggaccggggcctgtggggcctggtgaacaatgccggcatcctgacccccatcaccctgtgtgagtggctgaacacagaggacagcatgaacatgctgaaggtgaacctgattggagtcatccaggtgaccctgtccatgctgcccctggtgagaagagcccggggcagaattgtgaatgtgagcagcatcctgggccgggtggccttctttgtgggcggctactgtgtgtccaaatatggagtggaggccttcagtgacatcctgcggcgggagatccagcactttggagtgaagatcagcatcgtggagcccggctacttcagaacaggcatgaccaacatgacccagagcctggagaggatgaagcagagctggaaggaggcccccaagcacatcaaggagacctacggccagcagtactttgatgccctgtacaacatcatgaaggagggcctgctgaactgcagcaccaacctgaacctggtgacagactgcatggagcacgccctgacctctgtgcaccccaggacccgctacagcgctggctgggatgccaagttcttcttcatccccctgagctacctgcccaccagcctggccgactacatcctgaccaggtcctggcccaagccagcccaggccgtgtag

SEQ ID NO: 292936 - DNA, 267 bp, Artificial Sequence
  derived and/or modified sequence
atgtggctgtacctggccgcctttgtgggcctgtactacctgctgcactggtaccgggagcggcaggtggtgagccacctgcaggacaagtatgtgttcatcaccggctgtgacagcggctttggaaacctgctggcccggcagctggatgcccggggcctgcgggtgctggccgcctgcctgacagagaagggagctgagcagctgcggggccagaccagtgaccggctggagaccgtgaccctggatgtgaccaagatggagtag

SEQ ID NO: 292937 - DNA, 228 bp, Artificial Sequence
  derived and/or modified sequence
atgtggctgtacctggccgcctttgtgggcctgtactacctgctgcactggtaccgggagcggcaggtggtgagccacctgcaggacaagtatgtgttcatcaccggctgtgacagcggctttggaaacctgctggcccggcagctggatgcccggggcctgcgggtgctggccgcctgcctgacagagaagggagctgagcagctgcggggccagaccagtgactag

SEQ ID NO: 292938 - DNA, 954 bp, Artificial Sequence
  derived and/or modified sequence
atgtggctgtacctggccgccttcgtgggcctgtactacctgctgcattggtaccgagagaggcaagtggtgagccatctgcaggacaagtacgttttcattacaggctgcgactctggctttgggaacctgctcgcgagacaacttgatgcccggggactcagagtgctcgccgcttgcctcacggagaagggggctgaacagttgcgaggacagacctcagataggctggaaaccgttacgctggatgtcacaaagatggagagtatcgcagcagctactcagtgggttaaagagcacgtgggcgatagggggctttggggtctggttaacaacgctggaatcctgaccccaattaccctgtgtgaatggctcaacacagaggattcaatgaatatgctaaaggtcaacttgatcggagtgatacaagtaacgttgtccatgctcccactagttagacgtgcccgggggaggatcgtcaatgtgtccagcattctggggcgcgttgccttctttgtcgggggttactgcgtctctaagtacggagtggaggctttttctgatattttaaggcgagaaattcagcatttcggagttaagatcagtatcgttgagccgggttacttcagaactggcatgacaaatatgacccaatctctggagcggatgaaacaaagctggaaagaagcccctaagcatattaaagaaacatacggacaacagtattttgatgctctgtataacatcatgaaggaaggcttgttgaattgtagtactaacctgaacttggtaacagactgcatggaacacgccctcacctccgtgcatcctagaacaagatactccgcagggtgggacgccaagttcttcttcatacctttgtcttatttgccaacctctttggcagactacatcttgacaagatcatggcccaaaccagcccaagcggtttag

SEQ ID NO: 292939 - DNA, 954 bp, Artificial Sequence
  derived and/or modified sequence
atgtggctgtacctggccgccttcgtgggcctgtactacctgctgcactggtatagagaacgacaggttgtctcccatctacaagataaatacgtgttcattactggctgtgactctggcttcggaaatctattggcccgacagctggacgccaggggacttcgcgtcttggcagcttgcctcaccgagaaaggcgcggaacaactgaggggtcagacatccgaccgcctggagactgttaccctggatgtgaccaaaatggaaagcattgcggctgcaacccagtgggttaaggaacacgtcggtgacaggggcctatggggactcgtaaacaacgccggaatcctgactcctatcacactatgcgagtggctgaacaccgaggattcaatgaatatgctcaaggtgaatcttatcggtgtgatccaagtcaccttgagcatgctgcccttggttagaagggctaggggtaggatcgttaacgtgagcagtatcctgggtcgcgtagccttcttcgtgggcggatattgtgtgagcaagtacggggtggaggccttttctgacatcctgaggagggaaattcagcattttggagttaagatcagtattgtcgaacccggttatttcagaaccggtatgaccaacatgactcagtctcttgaaagaatgaagcagagctggaaggaagctcctaagcacataaaagagacctatggccagcaatactttgatgctctgtacaacatcatgaaagagggactgctgaattgttcgactaatttaaacctggtgaccgactgtatggaacatgctctaacctcggtgcaccctcgaacccgctactctgcaggctgggacgctaagttttttttcatccccctttcatacctcccaacctctctcgcagattatatccttacaaggtcttggcccaagccagctcaggcggtgtag

SEQ ID NO: 292940 - DNA, 267 bp, Artificial Sequence
  derived and/or modified sequence
atgtggctgtacctggccgccttcgtgggcctgtactacctgctgcactggtatcgagaaaggcaagtggtatctcatctgcaggacaagtatgtattcataacaggctgcgactccggttttggcaatctgttggcgaggcagctcgatgctaggggcttacgcgtgctggccgcctgcctgacagagaagggtgcagagcagctccgtggacagacaagcgatagattggaaacagtcacattggatgtgactaaaatggagtag

SEQ ID NO: 292941 - DNA, 954 bp, Artificial Sequence
  derived and/or modified sequence
atgtggctgtacctggccgccttcgtgggcctgtactacctgctgcactggtatcgtgaacgtcaagtcgtgtctcatctgcaagacaagtacgtgttcataaccggctgcgactcggggtttggtaatctcctggccaggcaacttgacgcccggggtctaagggtgctggccgcgtgtcttactgagaagggtgccgaacaactgagaggtcagacgtccgaccgcttggagactgtgaccctcgacgtgactaaaatggaatccattgctgcagctactcaatgggtcaaggagcacgtgggagatagaggcctttggggcttggtgaacaatgctggaatccttacccccattacattgtgtgagtggctcaacaccgaggatagtatgaacatgctcaaggttaacctgataggcgtgatccaagtcaccttaagcatgctgcctttagtcaggcgggccagaggtagaatcgtgaacgtttcttctatactggggagggtggcctttttcgtgggcgggtattgtgtcagtaaatacggagtcgaggctttctcagacattcttaggagagaaattcagcacttcggagtgaagatctccattgtggagcctggatattttagaactggcatgactaatatgactcagagcctggagagaatgaagcaatcctggaaagaggctccaaaacacatcaaagagacctacggtcaacaatactttgatgctctatataacatcatgaaagaagggctcctcaattgttcgacgaacctcaacttggtcaccgattgcatggagcacgctctgacttccgtgcatccacgaaccagatattctgctggttgggacgcaaaattcttcttcattcccctgagttaccttcctacaagtctagctgactacatcctaactcggtcatggccgaagccagctcaggccgtctag

SEQ ID NO: 292942 - DNA, 954 bp, Artificial Sequence
  derived and/or modified sequence
atgtggctgtacctggccgccttcgtgggcctgtactacctgctgcattggtatcgagagagacaggtcgtgtctcatctgcaggacaaatatgtctttatcacaggctgcgattccgggtttggtaatctcttagcacggcagttggatgcaagaggcttacgggttctagccgcctgcctaaccgagaagggggcagagcagcttcgaggtcagaccagcgaccgcctcgaaacggtcacacttgatgtgaccaagatggaatcaatcgctgccgctacacagtgggtaaaggagcatgtgggagaccgcggcttatgggggctcgtaaacaatgccggtattctcacccccatcaccttatgcgagtggctgaatactgaagactcgatgaatatgcttaaggtgaatctaattggggtgatccaagtcactctgtctatgttgccattggtccgccgggcaaggggacgaatcgttaatgtctccagtatcttgggtagagtcgccttctttgtcggagggtactgtgtgtccaagtatggcgtcgaggcattttcggatatcctcaggcgggaaatccagcactttggtgtgaagatttctatcgttgaacccggatatttccgaacaggcatgaccaacatgacccagagcctcgaaagaatgaaacagtcatggaaggaagctcctaagcacattaaggagacatacggtcagcagtattttgacgctctttacaatatcatgaaggagggactgcttaattgctcaaccaacctgaacctagtcaccgattgcatggaacacgcccttacgtccgtccatcccagaacccgctactcggcagggtgggatgcaaaattctttttcattcccctgtcttacctgcctacaagtcttgcagattatatactaacgcgctcgtggccaaagccagcacaggcagtttag

SEQ ID NO: 292943 - DNA, 954 bp, Artificial Sequence
  derived and/or modified sequence
atgtggctgtacctggccgccttcgtgggcctgtactacctgctgcattggtatcgagagcggcaggtggtcagtcacctccaagataagtacgtattcatcacaggctgtgatagtggatttggcaatctgctggcaaggcagttggatgctcgcggactgagggtcctggcggcctgcctgaccgaaaagggggctgagcagctccggggccagacctcagaccgtctcgagactgttacgcttgacgtcaccaaaatggagtccatagcggcggctacccaatgggtgaaggagcacgtaggggaccgagggctgtggggattggtcaacaacgccgggatcctcactcctataacactctgcgaatggcttaataccgaagactcaatgaatatgctgaaggtgaacctcatcggcgtgatccaagtgaccctgtctatgctgcccctggtccggcgggcgagaggcagaatagtgaatgttagtagcattctgggtagggttgcctttttcgtcgggggatactgtgtcagcaagtacggcgttgaggccttcagcgacatcctaagaagagaaatccagcactttggggtgaaaatttccattgtggagcccgggtacttcaggactggcatgaccaatatgacacagtcacttgagcgaatgaaacagtcctggaaggaggctcctaagcacatcaaggagacctacggtcaacagtacttcgacgctctatacaacattatgaaggaaggcctcctcaattgctccacgaatctgaatttggtcaccgattgcatggagcacgctctcacctccgtgcaccctaggactcggtactccgccgggtgggatgccaagtttttctttatcccattatcctacttgcctacaagtctcgcagattatattttgactcgctcctggcccaagcctgctcaggccgtgtag

SEQ ID NO: 292944 - DNA, 228 bp, Artificial Sequence
  derived and/or modified sequence
atgtggctgtacctggccgccttcgtgggcctgtactacctgctgcactggtatcgtgagaggcaggtcgtcagccacctgcaggataagtacgtattcatcacaggctgtgactccggtttcggcaacctgctagcccgccagctcgacgcaagagggttgcgggtactcgcagcctgcctgactgagaagggcgccgagcaacttagaggtcagacttctgactag

SEQ ID NO: 292945 - DNA, 954 bp, Artificial Sequence
  derived and/or modified sequence
atgtggctgtaccttgccgcttttgtgggactgtactacctcctccactggtaccgcgagcgccaggtggtgtctcatctgcaggataagtatgtctttatcactggttgtgacagcggattcggcaatctgttggctcggcagttagacgctaggggcctgagggttctggcagcttgcttaactgagaaaggagccgagcaactgcgcggacaaacctcagaccggctagaaaccgtgacactcgatgtgacgaagatggagtccatcgctgccgctacacaatgggtaaaagagcacgttggggaccggggtctttggggccttgttaacaacgctggaatactgactcccataacactgtgcgagtggctgaatactgaagactcaatgaacatgctcaaagtaaaccttattggtgtcatccaggtcaccttgtccatgctgcctctggtgcgcagagccagggggaggatcgttaatgttagctccattctggggagagtggccttctttgtcggtggctattgcgtaagtaagtatggggtggaggctttcagcgatatcctgcgtcgagaaattcagcactttggggttaagatttccatagttgagccaggatattttaggaccggcatgaccaatatgacacagtccttggagcgcatgaaacagtcgtggaaggaagcaccaaagcacatcaaagaaacatatggtcagcagtacttcgatgccttatacaatatcatgaaagagggcttgctcaattgtagcactaacctgaaccttgtcaccgattgcatggagcacgccctgacttctgttcatcctagaaccagatatagtgctggctgggatgcaaagtttttttttatcccactgtcctacctcccgacctcgctcgccgattatatactgactcgttcttggcctaaacccgcacaggccgtgtag

SEQ ID NO: 292946 - DNA, 954 bp, Artificial Sequence
  derived and/or modified sequence
atgtggctctatcttgctgctttcgtgggcttatactacttgctgcactggtatagagagcggcaagtggtcagccatttgcaagacaagtacgtgtttattactggctgtgattcaggtttcgggaatttactcgctaggcagctcgacgctaggggcctgcgcgtgctggcggcatgcctgacagagaagggggctgaacagctgcggggtcagacgtctgaccggctcgaaactgtcacactggacgtgactaagatggaaagcattgctgctgcaacacaatgggtcaaggagcacgtaggcgacaggggactgtggggtctcgtcaacaacgcaggcattctcacaccgataacactctgcgagtggctaaacactgaggatagcatgaacatgctcaaggtgaatctaatcggggtgatccaggtgaccttgagcatgctgcctctagtaaggcgcgctagagggagaatcgtcaacgtgagttccattcttggacgcgtagctttctttgtcggcggatattgtgtgtctaagtatggggtcgaggctttctccgacattcttcgaagagaaatccagcactttggcgtgaagatctcaatcgtcgaaccaggctactttaggaccggaatgacgaacatgacccagtcgctcgaacgcatgaagcagtcctggaaggaagctccaaaacacattaaggaaacctacgggcaacagtatttcgacgcactgtacaacataatgaaggagggactgcttaactgtagcactaatctcaatctcgtcaccgactgcatggagcatgcactgacgtccgtgcaccctcgcaccaggtactccgccggttgggatgcaaaattcttttttataccattgagctatctccccactagcttagctgactatatcttaacccggagctggccgaagccagcccaagctgtgtag

SEQ ID NO: 292947 - DNA, 267 bp, Artificial Sequence
  derived and/or modified sequence
atgtggctgtatctcgcggcattcgttggactgtattatctcctacactggtatagagagcgccaggtcgtgagtcatctacaggataagtatgtatttatcactggctgtgattccggcttcggaaatctgttggctaggcagctggacgctagaggccttcgcgtgttagcggcatgtttaacagaaaagggggctgagcagcttcggggtcagacgtcagaccgccttgagacggttacactggacgtcactaaaatggagtag

SEQ ID NO: 292948 - DNA, 954 bp, Artificial Sequence
  derived and/or modified sequence
atgtggctttatctggcagccttcgtgggcctctactatcttctccactggtaccgcgaacgccaggtcgttagccatctgcaggacaaatacgttttcataaccggatgtgattccggctttggcaatctgctggctagacagcttgatgccaggggcctccgggtgttggccgcatgtctcactgagaagggcgctgaacagctgcgtggacaaaccagcgaccggctggaaaccgtcaccctggatgtcacgaaaatggagtcaattgccgctgcaacccagtgggtaaaggaacacgtgggggaccggggactctggggactcgtgaacaatgcgggaatactgacccctatcacactatgcgagtggttaaacaccgaagacagtatgaacatgctcaaagttaatcttatcggcgtgatacaagtgacgcttagcatgctgcctctcgtgaggagggccagaggcaggatagtgaacgtgtcatctatccttggcagggtggcatttttcgtgggtggatactgcgtatcaaaatacggggtagaggcgttcagcgacatactgcgcagagagatccagcattttggcgtgaagataagcattgttgagcctgggtacttccgcaccggcatgacaaatatgacccagtctttagagcgaatgaaacagtcttggaaagaagccccaaagcatatcaaagaaacctacgggcaacagtattttgacgcattatacaacattatgaaggagggcctgctgaattgttccactaatctgaacttagtaaccgactgtatggagcatgcgttgacatccgtgcacccacgcacccgatacagtgccggttgggatgctaagtttttttttatacccctgtcatatctgcctacttctctggccgattacattcttacacgatcatggcccaagcccgcacaggctgtgtag

SEQ ID NO: 292949 - DNA, 954 bp, Artificial Sequence
  derived and/or modified sequence
atgtggctgtacttggcggcatttgttggcctctactacttacttcattggtacagggaacggcaggtggttagtcaccttcaggacaagtacgtgttcatcaccggctgcgactctggctttggaaatcttcttgcgcgacagctggatgccagaggactgagggtactggcagcatgccttacagaaaagggggctgaacaattgaggggtcagactagcgacagactggagaccgtgaccttggacgtaacaaagatggagtcaattgctgccgcaacgcagtgggttaaggaacacgtgggggaccgcggactgtggggcctggtaaacaatgcaggcatccttactccaatcacactttgtgaatggctaaacaccgaagactcaatgaacatgctgaaggtcaacctgattggcgttattcaagtcacactttccatgctgccattagtcagacgcgctcggggtaggattgtgaacgtgtcatccatacttggcagagttgccttcttcgttggagggtattgtgtgagcaaatacggggtggaggccttcagtgacatcctgcgcagagaaatacagcattttggtgtgaagatctccattgttgagccagggtacttccgtacaggcatgaccaacatgacccagagcctcgagcggatgaagcagagttggaaggaggcccctaaacacataaaggagacgtacggccagcaatatttcgacgcgctctacaatatcatgaaagagggcctgttgaattgttcaaccaatctgaacttagtcactgattgcatggagcacgccttgacaagcgtgcatcctcgtacacgctactccgctgggtgggacgccaaattcttcttcatacccctgtcctatctgcctactagccttgctgattacatcctcacacgatcatggccgaagcctgcacaggccgtgtag

SEQ ID NO: 292950 - DNA, 954 bp, Artificial Sequence
  derived and/or modified sequence
atgtggctgtacttagctgccttcgtcggactatattaccttctgcattggtatcgtgaacggcaagttgttagccacctgcaggacaaatacgtgttcatcaccggatgcgactctgggttcgggaatctcctggccagacagctggatgctagaggtctgcgggtgttggccgcatgtctgactgaaaaaggcgcagaacagctgcgcggacagacctctgaccggctcgagactgtgacacttgatgtcacaaagatggaaagcatcgctgcagcaacccagtgggtcaaagagcacgttggagaccggggactatgggggttggtgaataacgctggaattctgactcctattaccttatgtgagtggctcaacactgaagatagcatgaatatgcttaaagtgaacctgattggtgtgattcaagttactttgtcgatgctgcctctggtgaggcgggctcgcggaaggattgtgaatgttagctctatcctgggacgcgtagcattcttcgtgggaggatactgtgtgagcaaatacggcgtagaagcctttagcgacatcctccgtcgagaaatccagcacttcggagttaaaatctctatcgttgagccaggctatttcaggaccgggatgaccaatatgacccagtctctggaacgcatgaagcaatcttggaaggaggcgcctaagcacatcaaggagacatatggtcaacagtatttcgatgcactgtataacatcatgaaggaggggctgcttaactgttctaccaaccttaatctcgtgaccgactgcatggaacacgccctaacttctgtccaccccagaactaggtacagcgccggatgggatgccaaattttttttcatacctctaagctatctgcctacgtcacttgccgactacattcttaccaggtcctggcccaaacccgcacaagcagtgtag

SEQ ID NO: 292951 - DNA, 228 bp, Artificial Sequence
  derived and/or modified sequence
atgtggctttacctcgctgccttcgtgggactctattacctcctgcattggtaccgggaacgccaggtcgtttcccatctgcaagacaaatatgtttttattacgggatgcgactctggatttggtaacctgttggccagacagctggatgcaagaggcctccgagtacttgcagcatgcttgacagaaaagggcgctgagcagttgaggggacaaacatccgattag

SEQ ID NO: 292952 - DNA, 648 bp, Artificial Sequence
  derived and/or modified sequence
atgaagagatgggtcctctgcgctaaccatactgagcctgtgaaagggtttctcggtcgctacttgaggcgcaagctcattgagattgagatcgagcgtaatatccgcaacaacgatctggtgaagatcatcgactggatccccaagacttggcaccatttgaacagctttttagagacacacagcagctccgacgtcacgattggacctaggctgttcctgccctgtcctatggatgttgaaggctcacgggtgtggttcatggacctatggaactactcccttgttccttatatcctggaagccgttagagagggactacaaatgtacggaaagcgaactccctgggaagatccgtcgaagtgggtgctggacacatatccctggtcctccgctacgctcccacaggaatccccagccctgctccagctgagacctgaggatgtgggctacgagtcttgcacgtctaccaaagaagccacaacatctaagcatattccacagaccgacacggagggtgacccgctcatgaatatgttgatgaaactgcaggaggctgcaaattacagctccactcaatcatgcgattcagaatctacctcacatcacgaggatatcctggactccagtctcgaatcaacgctctag

SEQ ID NO: 292953 - DNA, 648 bp, Artificial Sequence
  derived and/or modified sequence
atgaagcgctgggtgctgtgtgccaaccacacagagcctgtgaagggcttcctgggccgctacctgcggaggaagctgattgaaattgaaattgaaagaaacatccggaacaatgacctggtgaagatcatcgactggatccccaagacctggcaccacctgaacagcttcctggagacccacagcagcagtgatgtgaccatcggccccaggctcttcctgccctgccccatggatgtggagggcagccgggtgtggttcatggacctgtggaactacagcctggtgccctacatcctggaggccgtgcgggagggcctgcagatgtatggcaagaggaccccctgggaggaccccagcaagtgggtgctggacacctacccctggagcagcgccaccctgccccaggagagccctgccctgctgcagctgcggccagaagatgtgggctatgagagctgcaccagcaccaaggaggccaccaccagcaagcacatcccccagacagacacagaaggagaccccctgatgaacatgctgatgaagctgcaggaggccgccaactacagcagcacccagagctgtgacagcgagagcaccagccaccacgaggacatcctggacagcagcctggagagcaccctgtag

SEQ ID NO: 292954 - DNA, 648 bp, Artificial Sequence
  derived and/or modified sequence
atgaagcggtgggtgctgtgcgccaaccacaccgagcccgtgaaggggttcttgggaaggtacctgcgcaggaaattgattgagatagaaattgagcgcaatatccggaacaacgatctcgtaaagataattgactggattccaaagacatggcaccacttgaactcttttctcgagacccattcctccagtgacgtcaccataggacccaggctgttcctcccctgtcccatggacgtagagggctctagagtgtggtttatggacctatggaattattccctggtgccctatatcctggaagcagtgagagaagggctccagatgtacggaaagcggacaccctgggaggacccgtctaagtgggtcctagacacatatccgtggagctcagcaactctgccacaggaaagtcccgccctgttgcagctgcggcccgaggacgtaggttacgagagctgtaccagcacaaaagaagcgacaacatcaaaacatatcccacaaaccgataccgaaggggacccattgatgaacatgttgatgaagctgcaggaagcagccaattactcgagcacccaaagctgcgattccgagtctacctcacaccatgaggacatcttagattcatctcttgaatctacgctctag

SEQ ID NO: 292955 - DNA, 1226 bp, Artificial Sequence
  derived and/or modified sequence
agcatttagactcccactcacttctgacgcacatgagcttctttttagctcaaaaagtagagttagctacattatagctctcatcctagtagacctcctaacacctttgatcatgaaaaggtgggtattatgtgcaaatcatacagaaccagtgaaaggctttttaggcagatatcttcgaagaaaactcatagagatagaaattgaaaggaacattcgcaataatgacctagtcaaaattatagattggattccgaagacgtggcatcatctcaacagttttttggaaacacacagttcttctgacgttaccattggtccccgactattccttccttgccccatggatgtagaaggttctagagtatggttcatggatctctggaactattctttagtaccttatattctggaggcagtgagagagggtcttcagatgtatgggaaacgcacaccatgggaagatccttcaaagtgggtgcttgacacatatccatggagctcagcaactctgcctcaggagagcccagccttacttcagctgcgaccagaagatgttgggtatgaaagctgcacatccactaaggaagccacaacctcaaagcacattccgcaaactgacacagaaggagatcccctgatgaatatgctaatgaaactccaagaagcagccaattactcgagcacacaaagctgcgacagcgaaagcaccagccaccatgaagacattttggattcatctcttgaatctaccctctagagggtgaaaaaagttaagggaaaagactttgcttttaaaaaaatgtttcaaaagaaaggtattttcactaaaccactgccagtataaaagcaccctgtcaagggccctgacccagagttgtggtctccaaggaggcagcagaactaagtctgaaccgccaagatgctaaattgcaatggaagcttaactttagtttatttctaagcattttttatatctgtggagtaatagaaagctccattactcaactggaaaggaccctaatgacagggcaactgaacagattgcacatgggatagccaaactggactttctttgtttcctctttaaaagtttacaatgcagaccattttttgtcccttccttttgtttcctctgaggggctgttcgccccaggcagggtccatctttctgatctgtccaacctcctttgtgccacacggtgctggtcacagggcttcagtag

SEQ ID NO: 292956 - DNA, 648 bp, Artificial Sequence
  derived and/or modified sequence
atgaaaaggtgggtcctgtgtgctaatcacacagagcccgttaaagggtttttggggagatacctcaggcgaaaactcatcgagatcgaaattgagcggaacatcagaaataacgatctggtgaagatcatcgactggatacccaagacttggcaccaccttaactctttcctggagacccattcgtcttctgacgtgacaatcggaccaaggctgtttctcccctgtccaatggatgtggaaggttctcgcgtctggttcatggacctctggaactactctttagtcccctacatcctggaagccgtccgcgaggggcttcagatgtatggaaagcggacaccttgggaggatccatccaagtgggtgttggatacatatccctggagctctgccacgctgcctcaggagagccccgctttgctccaactccgcccagaagatgttggctacgagagctgcacatctacaaaggaagccacaacttccaaacatattccacagacagacactgagggggacccgctgatgaatatgctgatgaagctgcaggaggcggctaattactcctcaacccagtcatgtgattccgagtccacttctcaccatgaggatatccttgatagcagtctggagtcgacattgtag

SEQ ID NO: 292957 - DNA, 648 bp, Artificial Sequence
  derived and/or modified sequence
atgaagagatgggtgctgtgcgccaaccacaccgagcccgtgaagggcttcctgggcagatacctgagaagaaagctgatcgagatcgagatcgagagaaacatcagaaacaacgacctggtgaagatcatcgactggatccccaagacctggcaccacctgaacagcttcctggagacccacagcagcagcgacgtgaccatcggccccagactgttcctgccctgccccatggacgtggagggcagcagagtgtggttcatggacctgtggaactacagcctggtgccctacatcctggaggccgtgagagagggcctgcagatgtacggcaagagaaccccctgggaggaccccagcaagtgggtgctggacacctacccctggagcagcgccaccctgccccaggagagccccgccctgctgcagctgagacccgaggacgtgggctacgagagctgcaccagcaccaaggaggccaccaccagcaagcacatcccccagaccgacaccgagggcgaccccctgatgaacatgctgatgaagctgcaggaggccgccaactacagcagcacccagagctgcgacagcgagagcaccagccaccacgaggacatcctggacagcagcctggagagcaccctgtag

SEQ ID NO: 292958 - protein, 338 aa, Artificial Sequence
  derived and/or modified sequence
MKGVIRVKFVNDLGVDEAGIDQDGVFKEFLEEIIKRVFDPALNLFKTTSGDERLYPSPTSYIHENYLQLFEFVGKMLGKAVYEGIVVDVPFASFFLSQLLGHHHSVFYSSVDELPSLDSEFYKNLTSIKRYDGDITDLGLTLSYDEDVMGQLVCHELIPGGKTIPVTNENKISYIHLMAHFRMHTQIKNQTAALISGFRSIIKPEWIRMFSTPELQRLISGDNAEIDLEDLKKHTVYYGGFHGSHRVIIWLWDILASDFTPDERAMFLKFVTSCSRPPLLGFAYLKPPFSIRCVEVSDDQAVHVQARCFISSLAKGEGKPSGLRSSVCLKPGPLWVLK

SEQ ID NO: 292959 - DNA, 1017 bp, Artificial Sequence
  derived and/or modified sequence
atgaagggcgtgatcagagtgaagttcgtgaacgacctgggcgtggacgaggccggcatcgaccaggacggcgtgttcaaggagttcctggaggagatcatcaagagagtgttcgaccccgccctgaacctgttcaagaccaccagcggcgacgagagactgtaccccagccccaccagctacatccacgagaactacctgcagctgttcgagttcgtgggcaagatgctgggcaaggccgtgtacgagggcatcgtggtggacgtgcccttcgccagcttcttcctgagccagctgctgggccaccaccacagcgtgttctacagcagcgtggacgagctgcccagcctggacagcgagttctacaagaacctgaccagcatcaagagatacgacggcgacatcaccgacctgggcctgaccctgagctacgacgaggacgtgatgggccagctggtgtgccacgagctgatccccggcggcaagaccatccccgtgaccaacgagaacaagatcagctacatccacctgatggcccacttcagaatgcacacccagatcaagaaccagaccgccgccctgatcagcggcttcagaagcatcatcaagcccgagtggatcagaatgttcagcacccccgagctgcagagactgatcagcggcgacaacgccgagatcgacctggaggacctgaagaagcacaccgtgtactacggcggcttccacggcagccacagagtgatcatctggctgtgggacatcctggccagcgacttcacccccgacgagagagccatgttcctgaagttcgtgaccagctgcagcagaccccccctgctgggcttcgcctacctgaagccccccttcagcatcagatgcgtggaggtgagcgacgaccaggccgtgcacgtgcaggccagatgcttcatcagcagcctggccaagggcgagggcaagcccagcggcctgagaagcagcgtgtgcctgaagcccggccccctgtgggtgctgaagtag

SEQ ID NO: 292960 - DNA, 1017 bp, Artificial Sequence
  derived and/or modified sequence
atgaagggtgtaatcagagtaaagtttgtgaatgatctgggcgtagacgaagcaggcattgaccaagacggagtgtttaaagaatttcttgaagaaattattaaacgcgttttcgacccagccctcaacctgtttaagactacttcgggcgacgaacgactgtacccaagtccgaccagttatattcacgaaaattatctacagctcttcgagtttgtcggcaagatgctgggcaaagccgtgtatgagggtatcgtggtcgacgtgcctttcgccagctttttcctgagccaactgttgggacatcaccattccgtcttttactccagtgtggacgagcttcctagccttgactccgagttctataagaatctgactagtataaaaagatacgacggagacatcacagatctcggattgaccctcagctatgacgaggatgtaatgggccagctggtttgtcatgagcttatccctggtggcaagacaattccggtcactaatgaaaataagatcagctacatccatctaatggcccacttcaggatgcatacccagataaaaaatcagaccgctgctctgatatcaggttttagaagcatcattaaaccggagtggataaggatgttttcgacccctgaactgcagcgtctcatttcaggtgataacgcagaaattgatctggaagacctgaaaaagcatacggtatattatggcgggttccatggctcacaccgagtgattatctggctgtgggatatcctggcctccgacttcacgccggatgagagggccatgtttctcaaattcgtgacctcatgttcgagacccccactattgggttttgcttacttgaaacccccattttccattaggtgcgtggaggtgtccgatgatcaggctgttcacgtgcaggcccgctgtttcatctcttctctcgcaaagggcgaagggaagccaagcggactgagaagttccgtgtgcttaaagccaggtcccctatgggtgctgaaatag

SEQ ID NO: 292961 - DNA, 1017 bp, Artificial Sequence
  derived and/or modified sequence
atgaagggcgtcatccgggtgaagtttgtgaatgacctgggcgtggatgaggccggcatcgaccaggatggagtcttcaaggagttcctggaggagatcatcaagagggtgtttgatcctgccctgaacctcttcaagaccaccagcggagatgagcggctgtaccccagccccaccagctacatccacgagaactacctgcagctgtttgaatttgtgggcaagatgctgggcaaggctgtgtatgagggcatcgtggtggatgtgccctttgccagcttcttcctgagccagctgctgggccaccaccacagcgtcttctacagctctgtggatgagctgcccagcctggacagcgagttctacaagaacctgaccagcatcaagagatatgatggagacatcacagacctgggcctgaccctgtcctatgatgaagatgtgatgggccagctggtgtgccacgagctgatccctgggggcaagaccatccctgtgaccaatgaaaacaagatctcctacatccacctgatggcccacttcaggatgcacacccagatcaagaaccagacagctgccctgatcagcggcttccgcagcatcatcaagccagagtggatccgcatgttcagcaccccagagctgcagaggctcatcagcggggacaatgctgagattgacctggaggacctgaagaagcacacagtgtactacggcggcttccacggcagccacagggtcatcatctggctgtgggacatcctggccagtgacttcaccccagatgagcgggccatgttcctgaagtttgtgaccagctgcagcaggcctcccctgctgggctttgcctacctgaagccacccttcagcatccgctgtgtggaggtgtctgatgaccaggccgtgcacgtgcaggcccgctgcttcatcagcagcctggccaagggggagggcaagcccagcggcctgcggagctctgtgtgcctgaagccaggccccctgtgggtgctgaagtag

SEQ ID NO: 292962 - DNA, 1017 bp, Artificial Sequence
  derived and/or modified sequence
atgaagggcgtgatccgggtgaagttcgtgaacgacctgggcgtggacgaagcaggaatagatcaggatggcgttttcaaagaatttctggaggaaattattaagcgtgtttttgatcccgcactcaatctcttcaaaacgacttctggagatgagagactctatcccagccctaccagttatatacatgagaattatctgcaattattcgagttcgttggtaagatgctgggcaaagcagtttacgagggcattgtcgttgatgtgccctttgcatctttcttcctgtctcaattactggggcatcaccacagtgtcttctatagttccgtcgacgaactcccttccctagattctgagttctacaagaacttaacatcaatcaagaggtacgatggcgacatcaccgacctgggtctgactctttcttacgatgaggatgtgatggggcagttggtttgtcacgaactcattccagggggcaaaactattccggttactaatgagaataagatcagttacattcacctgatggcccactttcgtatgcatactcagattaagaaccagactgccgccttgatttccgggtttcggagtattattaagcccgaatggatccgtatgttttctacacccgagctgcagcgcttaattagcggcgataacgctgagattgacctggaagatctgaagaaacataccgtatactacggcgggttccacggaagtcaccgtgtgatcatttggttgtgggatattctggctagcgattttacccccgacgagcgggctatgtttctaaaatttgtgacttcatgttctcgaccccccctgctggggtttgcctatctcaagccgcctttctctattagatgtgtagaagtgtccgacgaccaggctgtacacgtgcaggctcgctgctttataagctctctggctaagggagagggcaagccgagtgggcttagaagttccgtctgcctgaagccaggacccctttgggtgctaaaatag

SEQ ID NO: 292963 - DNA, 1017 bp, Artificial Sequence
  derived and/or modified sequence
atgaaaggagtcattcgcgtgaagtttgttaacgatctgggggtcgacgaagccggaattgaccaggacggggttttcaaagagtttctggaggagattattaaaagggtgtttgatccagctctcaatctcttcaagaccaccagcggcgacgagaggctttacccaagcccaacgtcttacattcacgagaactatttgcagttattcgagtttgtgggcaagatgttggggaaggccgtgtatgagggaatagttgtggacgtgcctttcgctagtttctttttgtcccaacttctggggcaccaccattccgtattctactccagcgtggacgagctgccttccttggattccgagttttataaaaacctgacatcaattaagcgttacgatggggacatcactgaccttggattgacactgagttacgacgaggacgtaatgggacagctggtctgccatgaactcatccctggcggtaagactatccctgtgactaacgagaacaaaattagctacatccatcttatggcccactttagaatgcacacccagattaagaatcagaccgccgctttaattagcggatttcgctctatcatcaaacccgagtggattagaatgttcagcacgcccgaattgcagagactgattagcggagataatgctgagattgatttggaagatctgaaaaagcacacggtctattatgggggattccacggaagccaccgcgtgatcatctggctctgggacatcctggccagtgatttcacacccgacgagcgggctatgttcctgaagttcgtgacaagctgctccagaccgccattattggggttcgcgtacctaaaaccccctttcagtattcgatgtgtagaggttagtgacgatcaggctgttcatgttcaggctcggtgcttcatctcctcactggccaagggcgaggggaagcctagcggattacggagtagcgtatgcctgaagcctggcccactgtgggtgctgaagtag

SEQ ID NO: 292964 - DNA, 3655 bp, Artificial Sequence
  derived and/or modified sequence
gtgtgaaggctggggaggcataattttaaagcaggttggaggaactcctgcaggcagacaggaacttgatggaattctccatccgttctcatctcagtgccaagataattatcttaaatttaggcagaatggtttaaatgctgttacagctgcctgttgacttcctgtttctcccttttgtcatctaacttaatgattctcaaactttatgtacataaaaagtccttctcaggtttgcctccacaaaactgtgctcctgttcccacatgtgacttaggggtcttgagaggtaattttcccttgcccactaactttgaagcctaacccctgaatcggggcaccataggatagtcctttggggatcactgggtgaacatggcaggaaggcagcaagggttccccaaaacaggtctcgccacactggcatactgctcgtttgctttgtgatgaggggaccagacggcagccgagtggatgctgtggagacagcctgtctaacctgcgaagcatgtgacagtgttacagttgtagctgaaagggagaaatgtggcatggccttcataggacagcagggttgattggtcacttgttccatcacagtgtctgaagacatcagtttcacctggtgattgggcctctcaagtcgggccaacagactcttccctgggccctgtgctgttcagcactgtttttatagtcactgctctgaaataaaaacctcagcaccccaagtactaggaatgcattagatgatggaaccagaagccaggaaggcctcaacagattagaatcaagagacaaactaaacagatgatttagtaggagaactccaaagttgtggttctggggctgtgcatgttgaggtctggatggagtagatgtgctgaatggctgtgtcctaacagagctgaccaccagccagaagtccaggcccagcaccacccccacatctcggtctctgctccctgcgttgatccctgccatccacctgctctgctgccaatagaaagatctgacagaaagtcagccctgttactctttgcctaaaaccttctgcagctcccattaccttcaggatgtcccctaaattcctcagcatgacttgcaggcacttcatgattgggaaggcagcgggagatgaggggtgatgggtaattcttttcattttacagtgttctgtaggtttgattttttttttttttcttttttcttttttttaccatgagctaaagatactcttagcattgagagagagagaaatgtatcttgtcccggtttctttcatcctttgtctgatggccaggagcttgtcatgactcattttgtctaacttccccatctcactgctctgtccccttgaggtcagtctccccttgccaaggagtgatactgtcacatccccaaatgaatctttgcttttaatcagcactcattcaaaagcaggtgagaacggctcctgtcatgcatccacgtttcataatttgcacatttggtaatgatgctgggagagcttcgcacagaggagagggaaccccgaattgtgtgcataaggctttgggcttcctaatgggctgtaattctgctcttggcaggacggctacgagcagcttaggcagctctcccagcacgccatgaagggggtcatccgtgtgaagtttgtcaatgacctcggggtggacgaagcagggattgatcaagacggtgtttttaaggagttcttggaagagatcatcaagagagtttttgacccagcactcaatctgttcaagacaaccagtggggatgagaggctgtacccctcacccacatcctacatccatgagaattacctgcagctcttcgagtttgtggggaagatgctggggaaggctgtgtatgagggaattgtggtggacgtgccatttgcatccttcttcctgagccaactgcttgggcaccaccacagcgtcttctatagctcggtggatgaactgccttctctggactccgagttctataaaaacctcacctccatcaagcgctatgatggggacatcactgacctgggcctgacgctgtcttacgacgaggacgtcatgggtcagcttgtttgccatgaactgattcctggagggaagaccattcctgttacaaatgaaaataaaattagctacatccatctgatggcacattttcgaatgcacactcaaataaaaaaccaaacagctgccctcattagcggattccgttccattatcaaacccgagtggatccgaatgttctcaactcctgaactgcagcgtctcatctctggcgacaatgctgagattgatctggaagatttaaagaagcacacagtctactacggtggtttccatggaagtcacagagtcatcatctggctctgggatattctggcctccgacttcacaccggatgagagagctatgtttctgaagttcgtgaccagctgctccagacccccgctcctgggattcgcctacctcaagcctccattctccatccgctgcgtggaggtgtcggacgatcaggctgtgcacgtccaggctcgctgcttcatttcctcattggccaaaggagaaggaaagccttcagggttacggagctctgtgtgtctcaagcctggcccactgtgggtgctcaaatgagagtcctactccccataaaaacccagtggccgcctctgggtgtagctgcctctcatgatgcagtttgagcccgtgatgccaccttgtacaggaagctacacagtcctcggcctccatgcttaagggaaagttggcccaagtcatggtctgccaccggccacagcaccggtgaggagggaggagtgcattcagaaatgtttgggcacctaacagtttttacagcattctactttttgtcaattggttaaccagtaattcgctgtgaaccggaaggccccatttccaaaagcttacttagtgcaggaattctctgtgcaggccccagggagaaggggttccttctctggaagccagtcgtcttgtgtctggggcttgacctcgggtagtggtgccagggcagcgccctgcactctgcccagcatccagggactggccagatcccctccctgggctccctggccttggcatcagcctgggctcccaaactaggcccttcccaattcaaggccacgatgtgtgccttcaggacaccggggacactctgggcagcgtcctccggggcttcttcaccatccgcaagcgggagccaggcggccgcctgcccacctcctccacctgcttcaacctgctcaagctgcccaactacagcaagaagagcgtcctccgcgagaagctgcgctacgccatcagcatgaacacgggctttgaactctcctagctcctgtcccagccctgcctccagggctcctgggctgccagggaccttcagctcccagaggcagtgtggtcctgggaatgtgaccaacatgccaggtgacattggcccctagaccctctctatagccatgagactccttgtggcctcaagaaatttagacgcccacgacagcactacacagcatctccaggtgatgcccaaggcacagggctgcagaaaataaacctccagattccaccaacacgggtccattcttcctggtgatggcagaggggcttcttttagctag

SEQ ID NO: 292965 - protein, 1148 aa, Artificial Sequence
  derived and/or modified sequence
MTTPTRRSTRNTRAETASQSQRSPISDNSGCDAPGNSNPSLSVPSSAESEKQTRQAPKRKSVRRGRKPPLLKKKLRSSVAAPEKSSSNDSVDEETAESDTSPVLEKEHQPDVDSSNICTVQTHVENQSANCLKSCNEQIEESEKHTANYDTEERVGSSSSESCAQDLPVLVGEEGEVKKLENTGIEANVLCLESEISENILEKGGDPLEKQDQISGLSQSEVKTDVCTVHLPNDFPTCLTSESKVYQPVSCPLSDLSENVESVVNEEKITESSLVEITEHKDFTLKTEELIESPKLESSEGEIIQTVDRQSVKSPEVQLLGHVETEDVEIIATCDTFGNEDFNNIQDSENNLLKNNLLNTKLEKSLEEKNESLTEHPRSTELPKTHIEQIQKHFSEDNNEMIPMECDSFCSDQNESEVEPSVNADLKQMNENSVTHCSENNMPSSDLADEKVETVSQPSESPKDTIDKTKKPRTRRSRFHSPSTTWSPNKDTPQEKKRPQSPSPRRETGKESRKSQSPSPKNESARGRKKSRSQSPKKDIARERRQSQSRSPKRDTTRESRRSESLSPRRETSRENKRSQPRVKDSSPGEKSRSQSRERESDRDGQRRERERRTRKWSRSRSHSRSPSRCRTKSKSSSFGRIDRDSYSPRWKGRWANDGWRCPRGNDRYRKNDPEKQNENTRKEKNDIHLDADDPNSADKHRNDCPNWITEKINSGPDPRTRNPEKLKESHWEENRNENSGNSWNKNFGSGWVSNRGRGRGNRGRGTYRSSFAYKDQNENRWQNRKPLSGNSNSSGSESFKFVEQQSYKRKSEQEFSFDTPADRSGWTSASSWAVRKTLPADVQNYYSRRGRNSSGPQSGWMKQEEETSGQDSSLKDQTNQQVDGSQLPINMMQPQMNVMQQQMNAQHQPMNIFPYPVGVHAPLMNIQRNPFNIHPQLPLHLHTGVPLMQVATPTSVSQGLPPPPPPPPPSQQVNYIASQPDGKQLQGIPSSSHVSNNMSTPVLPAPTAAPGNTGMVQGPSSGNTSSSSHSKASNAAVKLAESKVSVAVEASADSSKTDKKLQIQEKAAQEVKLAIKPFYQNKDITKEEYKEIVRKAVDKVCHSKSGEVNSTKVANLVKAYVDKYKYSRKGSQKKTLEEPVSTEKNIG

SEQ ID NO: 292966 - protein, 709 aa, Artificial Sequence
  derived and/or modified sequence
MSKRLRSSEVCADCSGPDPSWASVNRGTFLCDECCSVHRSLGRHISQVRHLKHTPWPPTLLQMVETLYNNGANSIWEHSLLDPASIMSGRRKANPQDKVHPNKAEFIRAKYQMLAFVHRLPCRDDDSVTAKDLSKQLHSSVRTGNLETCLRLLSLGAQANFFHPEKGNTPLHVASKAGQILQAELLAVYGADPGTQDSSGKTPVDYARQGGHHELAERLVEIQYELTDRLAFYLCGRKPDHKNGQHFIIPQMADSSLDLSELAKAAKKKLQSLSNHLFEELAMDVYDEVDRRETDAVWLATQNHSALVTETTVVPFLPVNPEYSSTRNQGRQKLARFNAHEFATLVIDILSDAKRRQQGSSLSGSKDNVELILKTINNQHSVESQDNDQPDYDSVASDEDTDLETTASKTNRQKLQTLQSENSNLRKQATTNVYQVQTGSEYTDTSNHSSLKRRPSARGSRPMSMYETGSGQKPYLPMGEASRPEESRMRLQPFPAHIGRSALVTSSSSLPSFPSTLSWSRDESARRASRLEKQNSTPESDYDNTPNDMEPDGMGSSRKGRQRSMVWPGDGLVPDTAEPHVAPSPTLPSTEDVIRKTEQITKNIQELLRAAQENKHDSYIPCSERIHVAVTEMAALFPKKPKSDMVRTSLRLLTSSAYRLQSECKKTLPGDPGSPTDVQLVTQQVIQCAYDIAKAAKQLVTITTKENNN

SEQ ID NO: 292967 - DNA, 2130 bp, Artificial Sequence
  derived and/or modified sequence
atgtccaaaaggcttcggagttcggaggtgtgcgccgactgttcaggtcctgacccctcctgggctagtgtgaacaggggaacttttctgtgtgatgaatgctgttccgtccaccgtagtcttggcagacatatatcacaggtaagacacctaaagcacaccccatggccccccaccctgctgcaaatggtagagaccctctacaataatggggcgaacagcatctgggaacactcactcctggatcctgcctcaataatgtccgggcgccggaaggcaaatccccaggacaaggtgcacccaaacaaagccgaattcatcagagctaagtaccagatgctggcatttgtgcaccgactgccatgcagagacgacgactcagtcaccgctaaagacctgtccaagcaattacacagttcagtaagaaccggcaatctggaaacctgcctgcggctgctttctctaggggctcaggcaaacttctttcaccctgagaaagggaacaccccactgcacgtagcttccaaagcaggacaaatcctgcaggccgagctactggcggtgtacggagctgatcccggaactcaagactctagcgggaaaactcccgtcgactacgctaggcagggcggccatcacgagctggcagagcggctggttgaaattcagtatgagctcacagataggctggccttctatctgtgcggccgcaagcctgatcacaaaaacggccaacactttatcattccacagatggccgactccagcctggatctgtcagagttggcgaaggctgccaagaagaaactccaaagtttgtccaaccacctgttcgaagagttagccatggacgtgtacgatgaagtcgaccgaagggaaacagatgcagtctggctcgcgacgcaaaaccattctgccctggtaacagaaactacagtggtgcctttcctgccagtaaatcccgagtactccagcacccggaatcaaggacgacagaaattggcccgcttcaacgcccatgaattcgctactttggtaattgacattctgtccgacgctaagcggaggcaacagggcagcagcctatccggttcaaaggacaacgttgaactaattttaaaaaccatcaacaaccagcattccgtcgaatcacaggacaacgaccagcctgactacgactctgttgcatccgacgaggacacagacctggaaacaacggccagcaaaaccaataggcagaagctacagaccctacaaagtgagaactccaatctaaggaagcaggccaccacaaacgtctaccaagttcagacagggtcagaatatacggacacatctaatcactctagtttgaagcgacggcctagcgccagaggtagcaggcctatgagtatgtacgagacaggcagcggtcagaagccttatctgccgatgggcgaagcttccagacctgaagagtcgcgtatgagacttcagccctttccggctcacataggccggtcagccttggtgacgtcttcctcctccctaccttcctttccatccactctgtcttggtctcgtgacgagtccgctaggagagcctccaggcttgagaagcagaactctacacctgagtctgattacgacaatacccccaatgatatggagccagatggcatgggttcaagccgaaaagggaggcagcgcagtatggtctggccaggcgacgggctagttccagacactgccgagccccacgtagcccccagtcccactttgccttccaccgaggatgtgatccggaagaccgagcagatcactaaaaacatccaggagctgctgagggccgcccaggaaaacaaacacgactcctacattccttgtagtgaacggatccacgtagctgtgacagagatggccgccctattccctaaaaagcccaagtccgatatggtgagaaccagcctgagactcctgaccagctcagcttatcggctccagtcagagtgcaagaagactctgcctggggaccctggcagcccgactgatgttcagctagtgactcagcaggttattcaatgtgcgtatgacatcgctaaagcagctaaacaactggtcaccattactaccaaagagaataataactag

SEQ ID NO: 292968 - DNA, 2130 bp, Artificial Sequence
  derived and/or modified sequence
atgagcaagaggctgcggagcagcgaggtgtgtgccgactgcagcggccctgaccccagctgggcctctgtgaacagaggcaccttcctgtgtgatgagtgctgcagcgtgcacaggagcctgggccgccacatcagccaggtgcgccacctgaagcacaccccctggccacccaccctgctgcagatggtggagaccctgtacaacaacggggccaacagcatctgggagcacagcctgctggaccctgccagcatcatgagcggccgcaggaaggccaacccccaggacaaggtgcaccccaacaaggccgagttcatccgggccaagtaccagatgctggcctttgtgcaccggctgccctgcagagatgatgattctgtgacagccaaggacctgagcaagcagctgcacagctctgtgaggactggaaacctggagacctgcctgcggctgctgagcctgggcgcccaggccaacttcttccaccctgagaagggcaacacccccctgcacgtggccagcaaggccggccagatcctgcaggccgagctgctggccgtgtatggagctgaccccggcacccaggacagcagcggcaagacccctgtggactatgcccggcagggcggccaccacgagctggccgagcggctggtggagatccagtatgagctgacagaccggctggccttctacctgtgtggcaggaagccagaccacaagaatggccagcacttcatcatcccccagatggctgacagcagcctggacctgtctgagctggccaaggccgccaagaagaagctgcagagcctgagcaaccacctgtttgaggagctggccatggatgtgtatgatgaggtggacagaagagaaacagatgctgtgtggctggccacccagaaccacagcgccctggtgacagagaccaccgtggtgcccttcctgcctgtgaaccctgagtacagcagcaccaggaaccagggccggcagaagctggcccgcttcaatgcccacgagtttgccaccctggtgattgacatcctgagtgatgccaagaggcggcagcagggcagcagcctgagcggcagcaaggacaacgtggagctgatcctgaagaccatcaacaaccagcacagcgtggagagccaggacaatgaccagcctgactatgacagcgtggccagtgatgaggacacagacctggagaccacagccagcaagaccaaccggcagaagctgcagaccctgcagagcgagaacagcaacctgaggaagcaggccaccaccaacgtgtaccaggtgcagacaggcagcgagtacacagacaccagcaaccacagcagcctgaagagaagacccagcgcccggggcagccggcccatgtccatgtatgagaccggcagcggccagaagccctacctgcccatgggagaggccagcaggcctgaggagagcaggatgaggctgcagcccttccctgcccacatcggccgcagcgccctggtgaccagcagcagcagcctgcccagcttccccagcaccctgtcctggagcagagatgagagcgcccggcgggccagccggctggagaagcagaacagcaccccagagagtgactatgacaacaccccaaatgacatggagccagatggcatgggcagcagcaggaagggccggcagaggtccatggtgtggccaggagatggcctggtgcctgacacagctgagccccacgtggcccccagccccaccctgcccagcacagaagatgtgatcaggaagacagagcagatcaccaagaacatccaggagctgctgcgggccgcccaggagaacaagcatgacagctacatcccctgcagcgagcgcatccacgtggccgtgacagagatggccgccctcttccccaagaagcccaagagtgacatggtgaggaccagcctgcggctgctgaccagcagcgcctaccgcctgcagagcgagtgcaagaagaccctgcccggggaccccggcagccccacagatgtgcagctggtgacccagcaggtgatccagtgtgcctatgacatcgccaaggccgccaagcagctggtgaccatcaccaccaaggagaacaacaactag

SEQ ID NO: 292969 - DNA, 2130 bp, Artificial Sequence
  derived and/or modified sequence
atgagcaagcggctgcggagcagcgaggtgtgcgccgactgcagcgggccagacccaagctgggccagtgtgaatcgtgggactttcctttgcgacgaatgctgctccgtgcacaggtctctgggaagacatatttcacaggtgcgtcacctgaaacataccccctggccacccactttgctgcagatggtcgagaccctgtacaacaacggcgctaattccatatgggaacattcactgttagacccagccagcattatgtctgggcgtcgcaaagccaatccacaagataaggtgcatccaaacaaggccgaattcataagggctaagtaccagatgttggcctttgtccacagacttccatgccgtgatgacgatagcgtgactgccaaggatctctctaagcagctccactcgagtgtgcgcacagggaacttagagacatgcctaaggctgttaagcctgggagcacaggctaacttctttcaccccgagaaaggcaacactcccctacacgtagcatccaaagccgggcagatcctacaggccgagctgctggcggtctatggggcggatccaggcactcaggactccagcggcaagacgcctgttgactatgcccgccagggcggacatcatgaactcgcagagcgtctggttgaaatccaatatgaacttaccgatcgccttgctttctacctgtgcgggaggaagccagaccacaagaatggccagcatttcatcattcctcagatggccgactcaagtctggacttgagcgagttagctaaggctgctaaaaagaaactgcagagtctatcaaatcacctgtttgaagaattggccatggatgtttatgacgaagtggaccgcagagaaaccgatgctgtgtggttagccacacagaatcacagtgcactcgttaccgaaacgaccgttgtgccttttctacctgtgaatccagaatactccagcacacgcaaccagggaaggcaaaagctggccagattcaacgcacatgaattcgcgaccctggtaatcgacatactcagcgacgccaaaaggcgtcagcaaggaagctcactttccgggtctaaagacaatgtggagttgattctcaagaccatcaataatcagcacagcgtggagagccaggataacgatcagccggactatgacagcgtcgctagtgacgaagatactgatttggagacaaccgcctctaagaccaatagacagaagttacagacccttcaaagcgagaactctaaccttcgcaagcaagccactactaacgtgtaccaggttcagactggcagcgagtacactgacacgtcgaaccactctagcctgaaaagacggccaagcgctagaggatcacgccctatgtccatgtatgaaaccgggagtggccagaagccatacctgcccatgggcgaggcgtccagacctgaggaatcccggatgcgcctgcagcccttcccagcacacattggaaggtcggctctggtgacttctagtagttcactcccatccttcccctccaccctttcctggtccagggacgaaagtgctcgccgggccagccgcctggagaaacagaacagcacccccgaaagcgattatgataacacgcctaacgatatggaacccgatggcatggggtccagtcggaagggtagacaacgatctatggtatggccgggtgacggtctcgttcccgataccgctgaaccacacgttgcaccttctccaactttgcccagcactgaggacgtcatccgcaaaacagagcaaattaccaagaatatccaggaattgcttcgagctgctcaggaaaacaaacatgacagttacattccctgtagcgagcgcattcatgtcgccgttacagagatggcagcactgtttcctaaaaagcctaagtccgatatggtaaggacatccctgcgcctgttgacttcctctgcctacagacttcagtccgaatgcaaaaagacacttcctggcgatccagggtcccccaccgatgttcaacttgtgacccagcaagtcatccagtgcgcttacgacattgccaaagcagccaagcagctggtaacaatcaccacaaaagaaaataataactag

SEQ ID NO: 292970 - DNA, 2130 bp, Artificial Sequence
  derived and/or modified sequence
atgtcgaagagattgaggtcttccgaggtctgtgctgactgctctggacccgacccatcttgggcttcagtcaaccgcggaacatttctttgcgacgagtgttgtagcgtgcaccgcagcctgggcagacatatctcccaggtgcgtcacctcaagcacactccttggcccccaacacttttacagatggtcgaaactctgtacaacaacggagccaacagtatttgggagcacagtttactcgaccccgctagcattatgagtgggcgaagaaaggctaatccccaggacaaagtgcaccctaataaagcggaatttataagagctaaataccagatgctggcatttgtgcacagactgccttgtagggatgacgattccgttactgccaaggacttaagtaaacagctgcactcaagcgtcaggacaggaaacttggagacctgcctgcgcctgctctctttaggagctcaggccaatttcttccaccctgagaaaggtaacacacctctccatgtagcctccaaagccggtcaaatcctgcaggctgaacttctggcagtgtatggcgcagacccaggaacacaggatagctccgggaagacccctgtggactacgcccgtcaaggtggccaccatgaattagctgagagactagtggagatccagtacgagttgacggatagacttgccttttacctgtgtggcagaaaaccagaccacaaaaatggccaacattttatcatccctcagatggctgactcctcactggatctctcagaactagcaaaagccgcaaagaagaagttacagagtctcagcaaccatttattcgaagaactggctatggatgtctacgacgaagtggaccggagggaaactgacgccgtttggcttgccactcaaaaccatagcgccctcgtgactgaaacgactgtagtgcccttcctgcctgtcaatcccgaatatagttccactaggaaccaaggacgccagaagttggccaggtttaatgcccatgagttcgctaccttagtcattgatatactgagcgacgcaaagagacgccagcagggctccagtctctctggttcaaaagacaatgtggagctgatcctcaaaaccatcaataaccagcattccgtggagtcacaggataacgatcagccagactacgatagtgtggcttcagatgaagacaccgacctggagactactgcctcaaagacaaatcgtcagaagctccagaccctgcagtcagagaactctaatttaaggaaacaggctacaacgaacgtttatcaggtgcaaaccggcagcgagtacacggatacaagcaaccattcctctctgaaacgccgtccgtctgccaggggtagccgaccaatgtcaatgtacgagacaggtagtggccagaagccatacttgcctatgggggaagcgagccgcccagaagagtcccggatgagattgcagccctttcctgcacacatcggtagatctgcactggtgacgagtagcagctcactgccatcttttccatccaccctatcatggagcagagatgagtcagctcgtagggctagtcgcctggagaagcaaaacagtacccccgagagtgattacgataacacaccaaacgatatggaacctgatggcatgggaagtagtaggaagggcagacagagatcaatggtttggcccggagacggtctagtgcctgacacggctgaaccccatgtcgcaccaagcccaaccctgccctcaacagaggatgtgattcgaaagacagaacagataactaaaaatatccaggagctgctgcgagcggcacaggagaataaacatgactcatacatcccgtgctcagagaggatccatgtggctgtcactgagatggctgcattattcccgaagaagcctaaaagcgacatggtacgtacctcactgcgccttctcacatcatccgcttacagactccagagtgaatgcaagaagactctgcctggcgatcccggatctcccactgatgtacagttggttacacagcaggtcatccagtgcgcatacgatattgccaaagcagcaaagcagctcgtcactatcacaacaaaggaaaataataattag

SEQ ID NO: 292971 - DNA, 5471 bp, Artificial Sequence
  derived and/or modified sequence
acctccccgcgcgtgcgtgctgtgccaaggctgcaaggcgctgaggggagaggcgccgccgtcagcgccgccgcagctgggacccgttagagcggaagcgccgccgccaccgccgcctttgctgtcccccggcctctagttccccgcaggtgggaggtgggagccatgtcgaaacggctccggagcagcgaggtgtgcgctgactgcagcgggccggatccttcctgggcatcagtaaataggggaacgtttttatgtgatgagtgctgcagtgtccatcggagtctagggcgccatatctcccaagtgaggcatctgaaacacacaccgtggcctccaacactgcttcagatggttgagaccttgtataataacggtgctaactctatatgggagcattctttgctggaccctgcgtctattatgagtggaagacgtaaagctaatccacaggataaagtacatcccaataaagcggaattcatcagagccaagtatcagatgttagcgttcgtccatcgcttgccctgccgggatgacgatagtgtgactgccaaagatcttagcaagcaactccattcgagcgtgagaacagggaatcttgaaacctgtttgagactgttatctttaggagcacaagccaacttctttcatcctgaaaaaggaaacaccccactccatgttgcctccaaagcagggcagattttacaggctgaattattggcagtatatggagcagacccaggcacacaggattctagtgggaaaactcccgttgattatgcaaggcaaggagggcaccatgagctggcagagcgcctcgtggaaatacagtatgagctaacggacagactagccttctatctctgtggcaggaaaccagatcacaaaaatggacagcactttataatacctcaaatggcagacagcagcctggatttgtctgaattggcaaaagctgctaagaagaaacttcaatctctaagtaatcatttgtttgaagaacttgccatggatgtgtacgatgaagttgacaggcgagagacggatgcagtctggcttgccacgcaaaaccacagcgccctggtaaccgagacaacggtcgtcccctttcttccggtcaatcctgagtactcatcaacacgaaatcagggcagacagaagttagctcggttcaacgcccatgagtttgccacgctggtcattgacattctcagtgacgccaagaggagacagcagggcagttctctctcgggttcaaaagacaatgtggagctcatactgaaaaccatcaataaccagcacagcgttgagagtcaagacaacgatcagcccgactatgacagcgtggcatcagacgaagacacagatttggaaaccactgcaagcaaaacaaaccggcagaagcttcaaacactccagagtgaaaattcgaacctcaggaaacaggccacaaccaatgtatatcaggtgcaaactggttctgagtacacagacacttccaaccactcttccttaaagagacgtccgtctgcccggggcagtaggcccatgtccatgtacgagaccggatcaggtcagaaaccatatctcccaatgggagaagcgagccgccccgaagagagcaggatgagactccagcccttccccgcgcacatcgggaggagtgcacttgtgacctcctcttcatctctgccttccttcccctccacactttcctggtcgagggacgaaagcgcccgaagggcatccaggctggagaagcagaacagcacacctgagagtgactacgacaacactcccaacgacatggagccagatggcatggggtcaagccgaaagggacggcaaagaagtatggtgtggccaggggatggcttggtaccagacacagcagaaccccatgtggccccaagccccactctccctagcaccgaagatgtcatcaggaagactgaacagatcaccaaaaacatacaggagctcttaagagcagcccaagaaaataaacatgacagttatattccctgctcagagaggatacacgtagctgttacagaaatggcagcattattccccaaaaaacccaagtctgatatggtgaggacttcccttcgtttactgacgtccagtgcctaccgactgcagtcagagtgcaagaagaccctcccaggggaccccggctcacccacagacgttcagctggtcacgcagcaggtcatccagtgtgcgtacgacatcgccaaggctgccaagcagctggttaccatcaccaccaaagagaacaacaactgacaagggcagggcaccgcctcctctgttttctaggctttataaagtccaatttcaaattcagacgcagaactcttcagatttctacaaaaagaaacatttaatgacggtttaaaactttttaaaagaaaactcagtattatttttgcatgttttctaaccaattttcaactatttaacccacttgccttattttgtgcctatttgctggtttagtttctgatgttcggttgtgttgtcaacaactgttgagttgatcacatacatccaaaagtatagtttcattgtctaaagtttgtgaaaacttttccatcccttaaaactccctgcctatggctgaaactataaatgaaatttttcataaaacattttcttgagagagttcagttaaaaaagaaaaaatcagcgtcatttgttccctgccaagcatcgtgcaataagtgaatttcctggcctacttcataatctctaagtttggggtatctccaagcatgtatgtagagaaaggactttgccgctttttaaaactagtgtcacagtctctcttgggaggaaacaatgaattggttcatttcttctcagtgttttaccctgttacatgttctgttatttaatgttgttatctcaagctcctatctcttgatgttttcttgtcatcttgaaggctccatggaatgagataaagcattgacccaccacaggacatctcatgaagccatgttcagggtaggagctccacgcacatcaccacccattgtcaggtgctctccctcacccctgtaagccagacagtttgttcaaaacctgcagcaaagagaagcatcagtctaacaagccagaactcattttgtgccacccatttaggtatcactaccatgaactatagggaaaagaaatcacctactccctgacactgtgttgtacccttcatccaaaagtcagcttgcttctctgaccacttacagctttctcacatgagttgcttcacatttttcatcatctttaaggacttcttataaggaaagatgtatcgtatcgcagtcatctgagttagtttctcctccatcacctcatgagtacttaaaaattagacatcaactttcaagagttccttagagagtgtgctctagctggctgcctgctaccccaaagctctgaaagagtaaggttgaagtgctggaacatgctcagattgttttttagttactcaaaagccccttcttgttctgaatgtgaaagctcttcccgttcctgcttactgcagccattctgtgtgtgtggttcagaccctggcctagggccggtgatgtggatgagtgaagggagccaggtacacggcagcagggcagaggagactatggggagcccaccgcctacacagtaggggcagtagcccccagctccacgcctgttgccatgtggaaaagtgggcctagggtggccacagctttgatttttcaagagacaagaaacctagatgttttttggtgccatctctccatttataaatgttggcaaccaatttgaacactttcagagaccatgtgcaggtgagctgtgtcctctaggctgccagctcacagcccccaccccagggccctgtaagctgtgcagtgtgagggcctggcttccccggacacacctggagcagcctctgagtcttacccgtaatggagccggccaaccctgtgtgttatgttgctgtcgctcctgtttttaaccatatgttctgtcccatagcagtcattcacacatgtgaagaagacacaagaatcaaagtacaagttgcctcaatacatgctaataactaagcttctattttcacaggactgatcgatgcacacctttatagcttgaccatatgctgtcatgaaagtagcaccccgacggtgcttgctttactaagtcaccgtgtgtggatgcttttgtcgcattttgcttcactgtgagtagcatgggaaaagggtccacgtctccaaaagactcttccacttgtttgtcccacagccctaagtgccacattgctgttggatgctcccgggatgccttctagaagggggcctcccaccttaagttcaggcgccatctgatagccttttctgcaggcttcatgtccttagctgaccctcctttatcttgcaaacccctgcccctgctgtcccagggaggacgggcttctgtagaggcttctgggaaatgagctgtctgcaggaggtgaagcagtgttttccttggaatgtttgaggacctgcaatagaagatgttgcctttatggccctagagaaagtcaaggaacatggggaccaacaaagcatttccagttgtaagaatatgtcagaagagtgctcggttagcccacggtgccaaaactccaaacaagttccccggtggaatgacgtggccattggagggctgcaggtcgtcctctctgtatgtgccccgcgcatttccttggcctcatctgagatctggtgtcagagttctctgctcctgttggcaaatcgcaccttatctgaacatttgttccagccaccttttgcacatggattccgtaccttgcactagcaatgtctaccttcagtaacgtcgttctttttcaccctgtattctcaatgatcccttcctccccatatgccacccttcccccaaagctgatagggcagaggtgcactttatgaaactggcacttgactgaacagaaggaaacagctgtacctctaagctcctttcacagaaatcgtcatctgccttggaatgcaaatagttcttatttgccaaagaacagtgaattgggcccaaagatcaaacacagcatttcatgtaatcagaattctaaacgcacaactcgggagctgtgcacggcttctcaagtgattcagttgcagaaccaagagcaaaactcgcctgtttttgtcctcaatggcacccatgagctttccaatagtatagttttctttctttccttgtcctggttgaaggtaacgtgttcctagaaaagaaaatgctgcataggaaaactgagatgccttttattccaacgtgtttgatccctgtcactcattattctgtactttttattgtacattctattcctgtaattattgtgccctttaagtgttgtaaaatcgttttggaatttgtgcctgctagttatgcaataaacaggctctacaagtgtt

SEQ ID NO: 292972 - DNA, 2130 bp, Artificial Sequence
  derived and/or modified sequence
atgagcaagagactgagaagcagcgaggtgtgcgccgactgcagcggccccgaccccagctgggccagcgtgaacagaggcaccttcctgtgcgacgagtgctgcagcgtgcacagaagcctgggcagacacatcagccaggtgagacacctgaagcacaccccctggccccccaccctgctgcagatggtggagaccctgtacaacaacggcgccaacagcatctgggagcacagcctgctggaccccgccagcatcatgagcggcagaagaaaggccaacccccaggacaaggtgcaccccaacaaggccgagttcatcagagccaagtaccagatgctggccttcgtgcacagactgccctgcagagacgacgacagcgtgaccgccaaggacctgagcaagcagctgcacagcagcgtgagaaccggcaacctggagacctgcctgagactgctgagcctgggcgcccaggccaacttcttccaccccgagaagggcaacacccccctgcacgtggccagcaaggccggccagatcctgcaggccgagctgctggccgtgtacggcgccgaccccggcacccaggacagcagcggcaagacccccgtggactacgccagacagggcggccaccacgagctggccgagagactggtggagatccagtacgagctgaccgacagactggccttctacctgtgcggcagaaagcccgaccacaagaacggccagcacttcatcatcccccagatggccgacagcagcctggacctgagcgagctggccaaggccgccaagaagaagctgcagagcctgagcaaccacctgttcgaggagctggccatggacgtgtacgacgaggtggacagaagagagaccgacgccgtgtggctggccacccagaaccacagcgccctggtgaccgagaccaccgtggtgcccttcctgcccgtgaaccccgagtacagcagcaccagaaaccagggcagacagaagctggccagattcaacgcccacgagttcgccaccctggtgatcgacatcctgagcgacgccaagagaagacagcagggcagcagcctgagcggcagcaaggacaacgtggagctgatcctgaagaccatcaacaaccagcacagcgtggagagccaggacaacgaccagcccgactacgacagcgtggccagcgacgaggacaccgacctggagaccaccgccagcaagaccaacagacagaagctgcagaccctgcagagcgagaacagcaacctgagaaagcaggccaccaccaacgtgtaccaggtgcagaccggcagcgagtacaccgacaccagcaaccacagcagcctgaagagaagacccagcgccagaggcagcagacccatgagcatgtacgagaccggcagcggccagaagccctacctgcccatgggcgaggccagcagacccgaggagagcagaatgagactgcagcccttccccgcccacatcggcagaagcgccctggtgaccagcagcagcagcctgcccagcttccccagcaccctgagctggagcagagacgagagcgccagaagagccagcagactggagaagcagaacagcacccccgagagcgactacgacaacacccccaacgacatggagcccgacggcatgggcagcagcagaaagggcagacagagaagcatggtgtggcccggcgacggcctggtgcccgacaccgccgagccccacgtggcccccagccccaccctgcccagcaccgaggacgtgatcagaaagaccgagcagatcaccaagaacatccaggagctgctgagagccgcccaggagaacaagcacgacagctacatcccctgcagcgagagaatccacgtggccgtgaccgagatggccgccctgttccccaagaagcccaagagcgacatggtgagaaccagcctgagactgctgaccagcagcgcctacagactgcagagcgagtgcaagaagaccctgcccggcgaccccggcagccccaccgacgtgcagctggtgacccagcaggtgatccagtgcgcctacgacatcgccaaggccgccaagcagctggtgaccatcaccaccaaggagaacaacaactag

SEQ ID NO: 292973 - protein, 195 aa, Artificial Sequence
  derived and/or modified sequence
MESLAQLELCQRLYKLHFQLLLLFQSYCKLIGQVHEVSSMPELLNMSRELSDLKKHLKEASAVIAADPLYSDGAWSEPTFTSTEAAIQSMLECLKNNELGKALRQIRECRSLWPNDIFGSSSDDEVQTLLNIYFRHQTLGQTGTYALVGSNQSLTEICTKLMELNMEIRDMIRRAQSYRVLTTFLPDSSVSGTSL

SEQ ID NO: 292974 - protein, 425 aa, Artificial Sequence
  derived and/or modified sequence
MAVTRSTSSTSSGSNSNVLVPVSWKRPQYSQKRTKEKLVHVLSLCGQEVGLSKNPSVIFSSCGDLDLLEHQTSLVSSEDGAREQENMDDTNSEQQFRVFRDFDFLDVELEDGEGLRGESMDNFNWGVRRRSLDSLDKCDMQILEERQLSGSTPSLNKMHHEDSDESSEEEDLTASQILEHSDLIMTLSPSEETNPMELLTTACDSTPAEPHSFNTRMSSFDASLPDMNNLQISEGSKAEAVREEEDTTVHEDDLSSSINELPAAFECSDSFSLDMTEGEEKGNRALDQFTLASFGEGDRGVSPPPSPFFSAILAAFQPAACDDAEEAWRSHINQLMCDSDGSCAVYTFHVFSSLFKNIQKRFCFLTCDAASYLGDNLRGIGSKFVSSSQMLTSCSECRAQVQCVRTARIFGYLQQQERGHTLCKL

SEQ ID NO: 292975 - protein, 1282 aa, Artificial Sequence
  derived and/or modified sequence
MSAVLCCGPVFDNVGLSPDGYLYKWLDNILACQDLRVHQLGCEVVVLLLELNPDQINLFNWAIDRCYTGSYQLASGCFKAIATVCGSRNYPFDIVTLLNLVLFKASDTNREIYEISMQLMQILEAKLFVYSKKVAEQRPGSILYGTHGPLPPLYSVSLALLSCELARMYPELTLPLFSGKPAIPHNTPQRAPDHAYLPAALAAQHRAGGQQAPPPGSPSSPEDEVKDREGDVTASHGLRGNGWGSPEATSLVLNNLMYMTAKYGDEVPGPEMENAWNALANNEKWSNNLRITLQFLISLCGVSSDTVLLPYIKKVAIYLCRNNTIQTMEELLFELQQTEPVNPIVQHCDNPPFYRFTASSKASAAASGTTSSSNTVVAGQENFPDAEENKILKESDERFSNVIRAHTRLESRYSNSSGGSYDEDKNDPISPYTGWLLTITETKQPQPLPMPCTGGCWAPLVDYLPETITPRGPLHRCNIAVIFMTEMVVDHSVREDWALHLPLLLHAVFLGLDHYRPEVFEHSKKLLLHLLIALSCNSNFHSIASVLLQTREMGEAKTLTVQPAYQPEYLYTGGFDFLREDQSSPVPDSGLSSSSTSSSISLGGSSGNLPQMTQEVEDVDTAAETDEKANKLIEFLTTRAFGPLWCHEDITPKNQNSKSAEQLTNFLRHVVSVFKDSKSGFHLEHQLSEVALQTALASSSRHYAGRSFQIFRALKQPLSAHALSDLLSRLVEVIGEHGDEIQGYVMEALLTLEAAVDNLSDCLKNSDLLTVLSRSSSPDLSSSSKLTASRKSTGQLNMNPGTTSGNTATAERSRHQRSFSVPKKFGVIDRSSDPPRSATLDRIQACTQQGLSSKTRSSSSLKDSLTDPSHINHPTNLLATIFWVTVALMESDFEFEYLMALRLLSRLLAHMPLDKAENREKLEKLQAQLKWADFSGLQQLLLKGFTSLTTTDLTLQLFSLLTPVSKISMVDASHAIGFPLNVLCLLPQLIQHFENPNQFCKDIAERIAQVCLEEKNPKLSNLAHVMTLYKTHSYTRDCATWVNVVCRYLHEAYADITLNMVTYLAELLEKGLPSVQQPLLQVIYSLLSYMDLSVVPVKQFNVEVLKTIEKYVQHSDLSKIEIHRVWTSASKELPGKTLDFHFDISETPIIGRRYDELQNSSGRDGKPRAMAVTRSTSSTSSGSNSNVLVPVSWKRPQYSQKRTKEKLVHVLSLCGQEVGLSKNPSVIFSSCGDLDLLEHQTSLVSSEDGAREQENMDDTNSEQQFRVFRDFDFLDVELEDGE

SEQ ID NO: 292976 - protein, 150 aa, Artificial Sequence
  derived and/or modified sequence
MEITTACWRRSCVISFIKGLASPVGNGYIKPPVPPASGTHREKGPPTMLPINVDPDSKPGEYVLKSLFVNFTTQAERKIRIIMAEPLEKPLTKSLQRGEDPQFDQVISSMSSLSEYCLPSILRTLFDWYKRQNGIEDESHEYRPRTSNKS

SEQ ID NO: 292977 - DNA, 588 bp, Artificial Sequence
  derived and/or modified sequence
atggagagcctggcccagctggagctgtgccagagactgtacaagctgcacttccagctgctgctgctgttccagagctactgcaagctgatcggccaggtgcacgaggtgagcagcatgcccgagctgctgaacatgagcagagagctgagcgacctgaagaagcacctgaaggaggccagcgccgtgatcgccgccgaccccctgtacagcgacggcgcctggagcgagcccaccttcaccagcaccgaggccgccatccagagcatgctggagtgcctgaagaacaacgagctgggcaaggccctgagacagatcagagagtgcagaagcctgtggcccaacgacatcttcggcagcagcagcgacgacgaggtgcagaccctgctgaacatctacttcagacaccagaccctgggccagaccggcacctacgccctggtgggcagcaaccagagcctgaccgagatctgcaccaagctgatggagctgaacatggagatcagagacatgatcagaagagcccagagctacagagtgctgaccaccttcctgcccgacagcagcgtgagcggcaccagcctgtag

SEQ ID NO: 292978 - DNA, 1278 bp, Artificial Sequence
  derived and/or modified sequence
atggccgtgaccagaagcaccagcagcaccagcagcggcagcaacagcaacgtgctggtgcccgtgagctggaagagaccccagtacagccagaagagaaccaaggagaagctggtgcacgtgctgagcctgtgcggccaggaggtgggcctgagcaagaaccccagcgtgatcttcagcagctgcggcgacctggacctgctggagcaccagaccagcctggtgagcagcgaggacggcgccagagagcaggagaacatggacgacaccaacagcgagcagcagttcagagtgttcagagacttcgacttcctggacgtggagctggaggacggcgagggcctgagaggcgagagcatggacaacttcaactggggcgtgagaagaagaagcctggacagcctggacaagtgcgacatgcagatcctggaggagagacagctgagcggcagcacccccagcctgaacaagatgcaccacgaggacagcgacgagagcagcgaggaggaggacctgaccgccagccagatcctggagcacagcgacctgatcatgaccctgagccccagcgaggagaccaaccccatggagctgctgaccaccgcctgcgacagcacccccgccgagccccacagcttcaacaccagaatgagcagcttcgacgccagcctgcccgacatgaacaacctgcagatcagcgagggcagcaaggccgaggccgtgagagaggaggaggacaccaccgtgcacgaggacgacctgagcagcagcatcaacgagctgcccgccgccttcgagtgcagcgacagcttcagcctggacatgaccgagggcgaggagaagggcaacagagccctggaccagttcaccctggccagcttcggcgagggcgacagaggcgtgagccccccccccagccccttcttcagcgccatcctggccgccttccagcccgccgcctgcgacgacgccgaggaggcctggagaagccacatcaaccagctgatgtgcgacagcgacggcagctgcgccgtgtacaccttccacgtgttcagcagcctgttcaagaacatccagaagagattctgcttcctgacctgcgacgccgccagctacctgggcgacaacctgagaggcatcggcagcaagttcgtgagcagcagccagatgctgaccagctgcagcgagtgcagagcccaggtgcagtgcgtgagaaccgccagaatcttcggctacctgcagcagcaggagagaggccacaccctgtgcaagctgtag

SEQ ID NO: 292979 - DNA, 453 bp, Artificial Sequence
  derived and/or modified sequence
atggagatcaccaccgcctgctggagaagaagctgcgtgatcagcttcatcaagggcctggccagccccgtgggcaacggctacatcaagccccccgtgccccccgccagcggcacccacagagagaagggcccccccaccatgctgcccatcaacgtggaccccgacagcaagcccggcgagtacgtgctgaagagcctgttcgtgaacttcaccacccaggccgagagaaagatcagaatcatcatggccgagcccctggagaagcccctgaccaagagcctgcagagaggcgaggacccccagttcgaccaggtgatcagcagcatgagcagcctgagcgagtactgcctgcccagcatcctgagaaccctgttcgactggtacaagagacagaacggcatcgaggacgagagccacgagtacagacccagaaccagcaacaagagctag

SEQ ID NO: 292980 - DNA, 650 bp, Artificial Sequence
  derived and/or modified sequence
catgcttgctgtgtagcaaatggaatctcttgcacaattggaactgtgtcagagattatataagctacacttccagctgctattgctttttcagtcctactgtaagctcatcggccaggtgcacgaagttagctccatgccagagctgctgaatatgtccagggaactgagtgacctaaagaaacacctgaaggaagccagtgcagtcattgcagctgaccctctctattcagacggcgcgtggtccgagcccaccttcacgtccactgaagcagccatccagtccatgctggagtgcctgaagaacaacgaactcggcaaagctttgcggcagatcagggagtgcagaagtctgtggcccaatgacatctttggaagcagttctgatgatgaggtccagacactactgaatatttatttccgtcaccaaactctgggacagacgggtacttatgccctggtggggtctaaccagagcctgaccgagatctgcaccaagctgatggagctgaacatggagatccgggacatgatccgcagggcccagagttaccgagtcctcactacttttcttccagactccagtgtttctggcactagtctctgacaggagcctcctgtccccactgggttccaaactggcagtgctg

SEQ ID NO: 292981 - DNA, 691 bp, Artificial Sequence
  derived and/or modified sequence
tggtatgaacagtctgccctggacggaaggcctgttttagtttgtcttctactgtaggtctttagcacctgactaaaaatacacctggggccaaaaatataagggccctgcattgtggctgagacacttatggtggcagtgagcaacaggaccatggagcccatcattatgtgttttggctttggaacatggtctgtgtagctgttccagactgttagtttgggtttcttttcaggctcatggagattacaactgcttgttggagacgatcctgtgtgatcagcttcataaaagggcttgcttctcccgttggcaacggttacatcaagcctccggttccacctgcttctggcacgcacagggagaaagggccgccaaccatgctacccatcaatgtggacccagacagtaaaccaggagaatatgtcctcaaaagtttatttgtcaacttcaccactcaggctgaacgcaagattcgtatcattatggcagagcccctggaaaagccattgacaaaatctctgcaacgtggagaagacccccaatttgatcaggtcatcagctcaatgagctccctttctgagtactgcctgccttccattctacgtacattatttgactggtataaaaggcaaaatggcattgaggatgaatcacatgaatacagaccaagaacaagcaataaatcaaa

SEQ ID NO: 292982 - DNA, 588 bp, Artificial Sequence
  derived and/or modified sequence
atggagtccctggcccaattggagttgtgtcagcgcctgtataagctccacttccagctgcttctactctttcagagttactgcaaattgattggacaggttcacgaagttagcagcatgcccgagctgttaaatatgagtcgagagctgtccgatctcaagaaacacctgaaagaagcatcagctgtgattgccgccgacccattgtactccgatggggcctggtctgagccaacctttacatccaccgaagctgccattcagtccatgctggagtgcctgaagaacaatgagttaggcaaggccttacggcagatccgcgagtgccgatctctctggccgaatgacatttttggcagttcaagcgacgacgaggtccagacgctgctgaatatatactttagacatcagaccttgggccagaccgggacatacgcgttggtggggtcaaatcagtccttgacggagatttgtacaaaactcatggagctgaatatggagatccgagacatgatacgaagagcgcagtcataccgggtcttaacgaccttcttgccagacagctctgtaagtggcacatcgctctag

SEQ ID NO: 292983 - DNA, 1278 bp, Artificial Sequence
  derived and/or modified sequence
atggcagttacccgcagcacttcatctacgagctcaggcagcaatagcaacgtcctggtgcccgtcagctggaaacgtccccagtactcacagaagaggacgaaagagaaattggtgcacgtgttgagtctttgcggacaggaagttgggctgagcaaaaatccgtcagtgatcttctccagctgcggagacctcgatctcttggaacaccaaacttcactggtgtcctcagaagacggggcgcgggaacaggaaaatatggacgacactaacagcgaacagcagtttcgggtgtttagagactttgattttctggacgtcgagctggaggacggggagggactgagaggcgaaagcatggacaacttcaactggggtgtacgccgcagatctttagattctctggacaaatgtgacatgcaaattctagaagaacgtcagctatcgggctccactcctagtttgaataaaatgcaccacgaagactccgatgagtcgagtgaagaggaggatctaaccgcatcacagatcctggaacactctgacctcattatgactctgagtcccagcgaggagaccaatcctatggagctcctgacaactgcatgcgacagtactccagcggagcctcactcctttaatacacgaatgtcctcattcgatgcctcattgcctgacatgaacaacttgcagatttccgaaggttccaaagcagaggccgtaagggaagaagaagacacgacagttcacgaggacgatctgtcctcatccatcaatgagctgcctgctgcttttgaatgcagcgattcctttagcctggacatgaccgagggtgaggaaaagggcaatcgagctctggatcagtttacactggctagttttggcgagggtgatcgaggcgtatccccaccgccatccccttttttcagcgccattctggcggccttccagcccgcagcctgtgacgatgccgaagaggcttggagaagtcacataaatcagctgatgtgtgatagcgacggctcctgtgcagtgtatacctttcacgtgttttcttctctatttaaaaatattcaaaagaggttctgtttccttacttgcgatgccgcttcctacctcggtgacaatcttcgcggcattggctcaaagttcgtgtccagctcacagatgctgacatcttgctctgagtgccgcgcccaggtgcaatgcgtaaggactgccagaatctttgggtatcttcaacagcaggagagaggccatactctctgtaaactctag

SEQ ID NO: 292984 - DNA, 453 bp, Artificial Sequence
  derived and/or modified sequence
atggaaatcacaactgcatgctggcggcggtcttgtgtgatttcttttatcaaagggctagccagccccgttgggaatggatacattaagcctcctgttccacccgcatctggcacgcatcgtgaaaaggggccgcccaccatgctgcctatcaacgtcgatcccgattccaagcccggcgaatacgtgctgaaatcactctttgtcaacttcactacacaggccgaacggaagatcaggatcataatggccgagcccctcgaaaaacccctcacaaagagcctccagcgcggcgaagacccccagttcgaccaagtgataagctccatgagctcactgagcgaatactgcctgccaagcattctgcgcactctgtttgattggtataaacgccagaacgggatcgaggacgagtctcacgaatataggcctaggacctctaataaatcctag

SEQ ID NO: 292985 - DNA, 588 bp, Artificial Sequence
  derived and/or modified sequence
atggagagcctggcccagctggagctgtgccagaggctgtacaagctgcacttccagctgctgctgctcttccagagctactgcaagctgattggccaggtgcatgaggtgtcctccatgcctgagctgctgaacatgagccgggagctgagtgacctgaagaagcacctgaaggaggccagcgctgtgattgctgctgaccccctgtacagtgatggagcctggagcgagcccaccttcaccagcacagaagctgccatccagagcatgctggagtgcctgaagaacaatgagctgggcaaggccctgcggcagatccgggagtgccgcagcctgtggcccaatgacatcttcggcagcagcagtgatgatgaggtgcagaccctgctgaacatctacttccgccaccagaccctgggccagacaggcacctacgccctggtgggcagcaaccagagcctgacagagatctgcaccaagctgatggagctgaacatggagatccgggacatgatcagaagagcccagagctacagagtgctgaccaccttcctgcctgacagctctgtgtctggcaccagcctgtag

SEQ ID NO: 292986 - DNA, 1278 bp, Artificial Sequence
  derived and/or modified sequence
atggctgtgaccaggagcaccagcagcaccagcagcggcagcaacagcaatgtgctggtgcctgtgtcctggaagaggccccagtacagccagaagaggaccaaggagaagctggtgcacgtgctgagcctgtgtggccaggaggtgggcctgagcaagaaccccagcgtcatcttcagcagctgtggggacctggacctgctggagcaccagaccagcctggtgtccagtgaagatggagcccgggagcaggagaacatggatgacaccaacagcgagcagcagttccgggtcttccgggactttgacttcctggatgtggagctggaggatggagagggcctgcggggggagagcatggacaacttcaactggggcgtgagaagaagaagcctggacagcctggacaagtgtgacatgcagatcctggaggagcggcagctgagcggcagcacccccagcctgaacaagatgcaccatgaagattctgatgagagcagcgaggaggaggacctgacagccagccagatcctggagcacagcgacctgatcatgaccctgagccccagcgaggagaccaaccccatggagctgctgaccacagcctgtgacagcaccccagctgagccccacagcttcaacaccaggatgagcagctttgatgccagcctgcctgacatgaacaacctgcagatcagcgagggcagcaaggccgaggccgtgcgggaggaggaggacaccaccgtgcatgaagatgacctgagcagcagcatcaatgagctgcctgctgcctttgagtgcagcgacagcttcagcctggacatgacagaaggagaggagaagggcaacagagccctggaccagttcaccctggccagctttggagagggggaccggggcgtgtccccaccacccagccccttcttcagcgccatcctggccgccttccagcctgctgcctgtgatgatgctgaggaggcctggaggagccacatcaaccagctgatgtgtgacagtgatggcagctgtgctgtgtacaccttccacgtgttcagcagcctcttcaagaacatccagaagcgcttctgcttcctgacctgtgatgctgccagctacctgggggacaacctgcggggcatcggcagcaagtttgtgagcagcagccagatgctgaccagctgcagcgagtgccgggcccaggtgcagtgtgtgaggacagcccgcatcttcggctacctgcagcagcaggagcggggccacaccctgtgcaagctgtag

SEQ ID NO: 292987 - DNA, 453 bp, Artificial Sequence
  derived and/or modified sequence
atggagatcaccacagcctgctggaggaggagctgtgtgatctccttcatcaagggcctggccagccctgtgggcaatggctacatcaagccccctgtgcccccagccagcggcacccaccgggagaagggcccccccaccatgctgcccatcaacgtggaccctgacagcaagccaggagaatatgtgctgaagagcctgtttgtgaacttcaccacccaggccgagaggaagatccgcatcatcatggccgagcccctggagaagcccctgaccaagagcctgcagagaggagaggacccccagtttgaccaggtgatcagctccatgagcagcctgtctgagtactgcctgcccagcatcctgcggaccctgtttgactggtacaagaggcagaatggaattgaagatgagagccatgagtaccggcccaggaccagcaacaagagctag

SEQ ID NO: 292988 - DNA, 588 bp, Artificial Sequence
  derived and/or modified sequence
atggagagcctggcccagctggagctgtgccagcggctgtacaagctccatttccaactcctactgttgttccagtcttattgtaaattaattggccaggtacacgaggtctcttccatgcccgagctgctaaatatgtctcgagaactctcagacctgaagaagcatctgaaggaggctagcgccgtaatcgccgctgaccctttgtatagcgatggagcttggagtgagcctacattcacttctacagaagctgcaatccaatccatgctcgaatgcctgaagaacaacgaactgggcaaggctctccgacaaattagagaatgccgttccctatggccaaacgatattttcggctcgtccagcgacgacgaggtgcaaacactcctcaatatttactttcggcatcagaccttggggcagacaggtacgtatgcactggtgggctctaaccagagcctgactgaaatatgcaccaaattgatggaactgaacatggagatccgtgacatgatcagacgagcccaaagctaccgcgtgcttaccacatttcttcccgatagctctgtgtccggaacaagtctctag

SEQ ID NO: 292989 - DNA, 1278 bp, Artificial Sequence
  derived and/or modified sequence
atggccgtgacccggagcaccagcagcaccagcagcggcagcaacagtaatgtgctggtgccagtgtcatggaagcggccgcagtattcacagaagcgtactaaggagaagctcgtccacgttctcagcctgtgcggccaggaggtgggcctgtctaaaaacccctccgtgatcttctcgtcatgcggtgacctcgacctcctcgagcatcaaacgtctttagtgagtagcgaggatggcgcgcgcgagcaagaaaacatggacgatacaaatagcgagcagcaattcagggtcttcagggactttgattttctggacgtggagctcgaagacggggagggcttgagaggggagagcatggacaatttcaattggggtgttaggcgccggtcgctggactctctggataaatgtgatatgcagattcttgaagagagacagttgtctgggagcacaccgtcactcaataagatgcaccacgaagactctgacgaatcctctgaggaggaagacctgaccgctagccagatcctggagcacagtgacctcatcatgacgttgtcgccttccgaggaaacgaatccgatggagctgcttaccactgcctgcgattctaccccagccgaaccacactcatttaacacgcgaatgagctccttcgatgcctcactgcctgacatgaataatctccaaatttccgagggcagtaaagcagaggctgttcgggaagaggaagacacaacagtgcacgaagacgacctgagcagcagcattaacgagctgcccgctgccttcgagtgctcagactccttcagtctcgacatgactgaaggggaggagaaaggaaatcgggcacttgatcagtttactctcgcctcattcggagagggggaccggggggtttcaccacccccgagccctttcttttccgctatcttggcggccttccaaccagctgcctgcgatgacgctgaagaagcctggcggagccatatcaatcaactgatgtgcgattcagacggttcttgtgccgtctacacttttcacgtgttctcatcactcttcaagaatatccagaaaagattctgcttcctgacatgcgatgctgctagttacctaggggacaatcttcgagggatcggatccaaattcgtttcttcaagccagatgcttaccagttgctcagagtgtcgagcccaggttcagtgtgtcagaactgcacggattttcggatacctgcaacagcaggaaagaggacacactttatgtaagctgtag

SEQ ID NO: 292990 - DNA, 453 bp, Artificial Sequence
  derived and/or modified sequence
atggagatcaccaccgcctgctggcggcggagctgcgtgatcagctttataaaagggctagcctcaccagttgggaatggttacatcaaaccacctgtgcccccagcctcaggcacgcaccgagagaaggggccacccaccatgctaccaataaatgtcgacccagatagcaagcccggagaatatgtgctgaagtccctgtttgtgaatttcaccacacaggcagagagaaagatacgcataataatggccgaaccgttagagaagccactgactaaaagtttacagcgcggggaggatccgcaatttgaccaggtgatttcctcgatgagcagtctgtcagagtattgtctgccatcgatcctacggactttattcgattggtacaagaggcagaatggcattgaagatgagagccacgagtacagaccacgcacttctaacaagagctag

SEQ ID NO: 292991 - DNA, 588 bp, Artificial Sequence
  derived and/or modified sequence
atggaatctctggcacagctggagttatgccagagattgtacaaactacatttccaattactattacttttccagtcttactgcaagctgatcgggcaggtacatgaggttagctctatgccagaattgctgaatatgtcccgagagctcagcgatctgaaaaagcacctaaaagaggcaagcgctgttatagccgctgaccctttgtactctgacggcgcttggtccgaacctacatttacttctacggaagccgcaattcaaagcatgctcgagtgtttgaaaaacaatgaacttggcaaagctttgagacagattagagaatgcagaagcttatggcctaacgacatcttcgggagtagttcggacgacgaggtccagaccctgttgaacatatattttcgtcatcagaccctgggtcaaaccggcacttacgccctggtaggcagcaaccaatcgctgacagagatctgtaccaagctgatggagctcaacatggagattcgcgacatgattaggagggcccagtcatatcgggtgctcactacatttttacctgacagctctgtgtccgggacctccctgtag

SEQ ID NO: 292992 - DNA, 1278 bp, Artificial Sequence
  derived and/or modified sequence
atggccgtgacgcgttctaccagcagcaccagttcgggctctaactctaacgtgctggtgcccgtctcctggaagagaccacagtattcccagaagaggaccaaggagaaactcgtacatgtgcttagtctctgcgggcaggaggttggactgtctaaaaatccctccgtgatcttctccagctgtggcgacctggatctgctggagcaccaaactagtctcgtatcgtccgaggacggcgctagagagcaggaaaacatggacgataccaactctgagcagcaattccgggtctttagagactttgattttctagatgttgagctcgaggacggggaagggttaaggggcgagtctatggacaatttcaactggggagtacgacgccgatcactcgattctctagacaaatgcgatatgcagatcctggaggaacgacaattgagtgggtccactccctccctgaataaaatgcatcacgaagatagtgacgagtcaagcgaagaagaggacctcaccgcctcgcaaatcctcgagcatagcgaccttatcatgaccctttccccttcggaagagacaaatccgatggagttactgacaacagcctgcgactctacaccagcggagccccattctttcaacacacggatgtcctccttcgacgccagtctgcccgacatgaacaaccttcagatctccgaaggatccaaggccgaggcagtgcgagaggaggaggacaccacagtccatgaggatgatctgtccagttcgatcaatgaactgccagcagcattcgaatgctcagactcgttctcacttgatatgacagagggagaggagaaaggcaatcgcgctctcgatcagttcacgcttgcttcatttggagagggtgatagaggagtgtcaccaccgccatcaccgtttttttctgccatactggcagccttccagcctgctgcctgtgatgacgctgaggaagcctggcgctcgcatatcaaccagctaatgtgcgatagtgacggctcttgcgctgtctacaccttccatgttttttcaagcctatttaagaacatccaaaaacgcttctgcttcttgacttgcgatgcggcttcttacctgggggacaatctgcgtgggatcgggtcaaaattcgtctcctcctcccagatgctaactagctgttccgagtgccgcgctcaggtccaatgcgtgagaactgccaggatatttggatacttgcagcagcaagaacgcggacatacattgtgcaaactgtag

SEQ ID NO: 292993 - DNA, 453 bp, Artificial Sequence
  derived and/or modified sequence
atggagatcactactgcatgttggcgcaggtcgtgcgttatttctttcatcaaaggtttggcatctcccgtaggcaacgggtatatcaaaccccctgtgcctcctgcttcaggcacccacagagaaaaggggccacccacaatgctgccaattaacgtcgatccggactctaaacctggggagtacgtgttgaaaagcctcttcgtgaactttacaacacaggccgaacggaaaattaggattataatggctgaaccgctggaaaaacccctcactaagtcactgcaacggggagaggatccacagtttgaccaggtgatctcaagcatgagctcactgagcgagtattgccttccgtccatccttcgcacactttttgactggtacaaacggcaaaatggcattgaagatgaaagccatgaatatcgccctcgcacgagtaacaagagctag

SEQ ID NO: 292994 - protein, 129 aa, Artificial Sequence
  derived and/or modified sequence
MSINGKLQDGSMEIDAGNNLETFKMGSGAEEAIAVNDFQNGITGIRFAGGEKCYIKAQVKARIPEVGAVTKQSISSKLEGKIMPVKYEENSLIWVAVDQPVKDNSFLSSKVLELCGDLPIFWLKPTYPK

SEQ ID NO: 292995 - protein, 135 aa, Artificial Sequence
  derived and/or modified sequence
MNEVIIYNVLLLRTISCISETYGHYLIHCPSKISPELLKKESITNSYAHFQIYNVHYTMSINGKLQDGSMEIDAGNNLETFKMGSGAEEAIAVNDFQNVSIFHAFREFNQASLRDFSNSRRSSVSHTHPNGNCSL

SEQ ID NO: 292996 - DNA, 390 bp, Artificial Sequence
  derived and/or modified sequence
atgagcatcaacggcaagctgcaggacggcagcatggagatcgacgccggcaacaacctggagaccttcaagatgggcagcggcgccgaggaggccatcgccgtgaacgacttccagaacggcatcaccggcatcagattcgccggcggcgagaagtgctacatcaaggcccaggtgaaggccagaatccccgaggtgggcgccgtgaccaagcagagcatcagcagcaagctggagggcaagatcatgcccgtgaagtacgaggagaacagcctgatctgggtggccgtggaccagcccgtgaaggacaacagcttcctgagcagcaaggtgctggagctgtgcggcgacctgcccatcttctggctgaagcccacctaccccaagtag

SEQ ID NO: 292997 - DNA, 408 bp, Artificial Sequence
  derived and/or modified sequence
atgaacgaggtgatcatctacaacgtgctgctgctgagaaccatcagctgcatcagcgagacctacggccactacctgatccactgccccagcaagatcagccccgagctgctgaagaaggagagcatcaccaacagctacgcccacttccagatctacaacgtgcactacaccatgagcatcaacggcaagctgcaggacggcagcatggagatcgacgccggcaacaacctggagaccttcaagatgggcagcggcgccgaggaggccatcgccgtgaacgacttccagaacgtgagcatcttccacgccttcagagagttcaaccaggccagcctgagagacttcagcaacagcagaagaagcagcgtgagccacacccaccccaacggcaactgcagcctgtag

SEQ ID NO: 292998 - DNA, 390 bp, Artificial Sequence
  derived and/or modified sequence
atgagcatcaacggaaagctgcaagatggtagcatggagatcgacgccggcaacaacttggaaacttttaagatgggctccggcgccgaggaggccatcgctgtgaacgattttcaaaacggcattactgggattagattcgcgggcggagagaaatgctatatcaaagcacaggtgaaagccaggattccagaggtgggggcagtaaccaaacaatcaatcagctcgaagttggagggcaagattatgccagtgaaatacgaagaaaacagcctcatatgggtggccgtggaccagcccgtgaaggataattctttcttaagttccaaagtccttgaactttgtggggatctaccgattttctggctcaagcccacgtatccgaagtag

SEQ ID NO: 292999 - DNA, 408 bp, Artificial Sequence
  derived and/or modified sequence
atgaacgaagttataatctacaacgtcttactgctgagaaccataagttgtatctcggagacctacggacattacctgattcattgtccaagtaagataagccccgaactgctaaagaaggaaagtataacaaatagctatgcccattttcagatctacaatgtgcactacacgatgagcattaacggaaaacttcaggatggcagcatggagatcgacgcaggtaacaatctcgagactttcaaaatgggatctggcgcggaagaagctatcgccgtcaatgacttccagaacgtgagcatctttcatgcctttcgggaatttaaccaagcatccctgagggactttagtaactccagaagatcgagtgtttcacacacccatcccaatggcaattgttctctgtag

SEQ ID NO: 293000 - DNA, 390 bp, Artificial Sequence
  derived and/or modified sequence
atgagcatcaacgggaagctgcaggacggctccatggagattgatgctggcaacaacctggagaccttcaagatgggcagcggggctgaggaggccatcgctgtgaatgacttccagaatggcatcaccggcatccgctttgctggaggagagaagtgctacatcaaggcccaggtgaaggcccgcatccctgaggtgggcgctgtgaccaagcagagcatcagcagcaagctggagggcaagatcatgcctgtgaagtatgaggagaacagcctcatctgggtggccgtggaccagcctgtgaaggacaacagcttcctgagcagcaaggtgctggagctgtgtggggacctgcccatcttctggctgaagcccacctaccccaagtag

SEQ ID NO: 293001 - DNA, 408 bp, Artificial Sequence
  derived and/or modified sequence
atgaatgaggtgatcatctacaacgtgctgctgctgcggaccatcagctgcatcagcgagacctacggccactacctgatccactgccccagcaagatcagccctgagctgctgaagaaggagagcatcaccaacagctatgcccacttccagatctacaacgtgcactacaccatgagcatcaacgggaagctgcaggacggctccatggagattgatgctggcaacaacctggagaccttcaagatgggcagcggggctgaggaggccatcgctgtgaatgacttccagaatgtgtccatcttccacgccttccgggagttcaaccaggccagcctgcgggacttcagcaacagccgccgcagctctgtgagccacacccaccccaacggcaactgcagcctgtag

SEQ ID NO: 293002 - DNA, 731 bp, Artificial Sequence
  derived and/or modified sequence
ccgactgcaaaggaccctcgggagggagcgcggcgaaaggggcacccgtaggagcccgggcgagctgtttcccgcccgactccccactccctgggggctaccgcgtggggcccgggtgcgctgggggccgcaggtgctggcggcacaaacgcgacggtccctctcccgccccggcccgcaggcgtacgctacgctgacggtgaagccctccagccccgcgcggctgctcaaggtgggagccgtggtcctcatttcgggagctgtgctgctgctctttggggccatcggggccttctacttctggaaggggagcgacagtcacatttacaatgtccattacaccatgagtatcaatgggaaattacaagatgggtcaatggaaatagacgctgggaacaacttggagacctttaaaatgggaagtggagctgaagaagcaattgcagttaatgatttccagaatggcatcacaggaattcgttttgctggaggagagaagtgctacattaaagcgcaagtgaaggctcgtattcctgaggtgggcgccgtgaccaaacagagcatctcctccaaactggaaggcaagatcatgccagtcaaatatgaagaaaattctcttatctgggtggctgtagatcagcctgtgaaggacaacagcttcttgagttctaaggtgttagaactctgcggtgaccttcctattttctggcttaaaccaacctatccaaaag

SEQ ID NO: 293003 - DNA, 1464 bp, Artificial Sequence
  derived and/or modified sequence
attttgaaaccagtgcagtaatcaggtgtctgagccctttaggtcagctaattagtggcaaactttaaaaaagaaatgttttaagtattgaaatttgtctttctaacaaaatgttactcagaaatgcaacacataagacagaaaaagcagagccactctggttagactatggatggacaggagagaacagagtgccacagtgccatcctcacctctaggccatgcccgggagatcccaacagttctaaggacatagatgaaagccacctatgaggtccaacttcattatacactcgtggcaactcacaagatccagagatgagtggtgtggccacctgttttcctgattactggaccgatgctcttctgcagtgccaggtcccttcccctcttccacactccccacacatctcataacaaaatgccctacagcaccatgggcctgccccatagaatcgttcagggagtactaccattttgagctgaaacaaacatgcacattggccttcctctccacacatgctgctctatatcaagcataccctggtcctgtctgcagtcctttccatatacctaataccatataccatatacctgagacactgcatgcctaatcttgaccaaaggatgaaaacaacttgtgaaactgaggtgccactgcagacgtgttcagctgggagcccaattaaccttctgcctcctcaatttccatttatccatcaatagtgctcaacccagatgcataatagaattgagctttagaaaaagaaagacctatgcccaagcgcccttcccacagcttctgatttgatttgtccagggtgaaacccaggcatggtacccagagagtctacccagatgcttctaaagtacagccagcattgcaaattatggagctattggaataggtgtcagaggcaaccaaagtctttactcttaaggtatttttaaggaaatcattgcattaactgattgttgtatgaatgaagtcatcatatataatgtattattattaaggactatctcatgtatctctgaaacatatggacactacctcatacactgcccttctaagataagccctgaattgctcaaaaaagaaagcatcactaactcttatgctcactttcagatttacaatgtccattacaccatgagtatcaatgggaaattacaagatgggtcaatggaaatagacgctgggaacaacttggagacctttaaaatgggaagtggagctgaagaagcaattgcagttaatgatttccagaatgtaagtatatttcatgcatttagagaatttaaccaggcaagcctgcgggacttttctaattcaaggaggagcagcgtttctcacacacatccaaatggtaactgttctttatagcagttgtagtgccactaatccactacatgtagcatattctctctgagaaaggaccagactttgtccttcatatttgc

SEQ ID NO: 293004 - DNA, 390 bp, Artificial Sequence
  derived and/or modified sequence
atgagcatcaacggcaagctgcaggacggcagcatggagatcgacgctgggaataacctagagacatttaaaatgggatccggcgccgaggaagctattgcggtgaatgacttccagaatgggattactggcattcgtttcgctggaggcgagaagtgttacatcaaagctcaagtgaaagctagaatcccagaagtgggtgctgtgaccaagcaatccattagttctaaactggaaggcaagatcatgcccgtgaagtacgaggaaaattctcttatctgggtagcggtggaccagcctgtgaaggacaacagcttcctgtctagcaaggtattggagctatgtggcgacctgcccattttttggctgaagccgacctaccctaagtag

SEQ ID NO: 293005 - DNA, 408 bp, Artificial Sequence
  derived and/or modified sequence
atgaacgaggtgatcatctacaacgtgctgctgctgcggaccatctcatgtatctctgagacctacggccactacctcattcattgtccttctaaaatatcacccgagctgctgaaaaaggagtcaattacaaattcttatgctcatttccaaatatacaatgtgcattacacaatgtcgattaatgggaagctgcaagatggcagcatggagattgacgcgggcaataacctggagactttcaaaatgggaagcggcgccgaagaagctattgccgttaatgacttccaaaatgttagtattttccatgcattccgggaatttaatcaagccagccttagggattttagcaactcccggagatcctctgtctcgcacacacaccccaacggaaattgctcactgtag

SEQ ID NO: 293006 - DNA, 390 bp, Artificial Sequence
  derived and/or modified sequence
atgtcaatcaatgggaagctacaggacggctcgatggaaatcgatgctggtaataatctggagacgttcaagatgggtagtggggcagaggaagccatcgcagtgaatgacttccagaatggtatcacaggtatccggtttgccggaggcgagaagtgttatataaaagctcaggtgaaggcacgcatcccagaggtcggcgctgtcactaaacagtctatctcttccaaactggaaggcaaaatcatgcctgtcaagtacgaagagaattccctgatttgggtcgctgtggaccagcccgtcaaagataattcgtttctttccagtaaagtgctcgagctctgcggcgacttgcccatcttctggctgaagccgacatatccaaagtag

SEQ ID NO: 293007 - DNA, 408 bp, Artificial Sequence
  derived and/or modified sequence
atgaatgaagtgataatttacaacgtgttgctgctgcggaccatttcatgtatatccgagacctatggccactatctcattcactgtcccagcaaaatcagtcccgaattgcttaaaaaggagtcgattactaactcgtacgcccatttccagatctataacgtgcattacactatgagtatcaacggaaaactgcaggacggatcaatggaaatcgacgcaggcaataacctcgaaacgtttaagatgggctctggcgcagaggaggctatcgccgtgaacgatttccagaatgtcagtatttttcacgccttcagagagttcaatcaggccagcctcagagactttagtaacagccgccgatctagcgtatctcatactcaccctaacggcaattgttctttgtag

SEQ ID NO: 293008 - protein, 430 aa, Artificial Sequence
  derived and/or modified sequence
MAEAVLIDLFGLKLNSQKNCHQTLLKTLNAVQYHHAAKAKFLCIMCCSNISYERDGEQDNCEIETSNGLSALLEEFEIVSCPSMAATLYTIKQKIDEKNLSSIKVIVPRHRKTLMKAFIDQLFTDVYNFEFEDLQVTFRGGLFKQSIEINVITAQELRGIQNEIETFLRSLPALRGKLTIITSSLIPDIFIHGFTTRTGGISYIPTLSSFNLFSSSKRRDPKVVVQENLRRLANAAGFNVEKFYRIKTHHSNDIWIMGRKEPDSYDGITTNQRGVTIAALGADCIPIVFADPVKKACGVAHAGWKGTLLGVAMATVNAMIAEYGCSLEDIVVVLGPSVGPCCFTLPRESAEAFHNLHPACVQLFDSPNPCIDIRKATRILLEQGGILPQNIQDQNQDLNLCTSCHPDKFFSHVRDGLNFGTQIGFISIKE

SEQ ID NO: 293009 - DNA, 1293 bp, Artificial Sequence
  derived and/or modified sequence
atggccgaggccgtgctgatcgacctgttcggcctgaagctgaacagccagaagaactgccaccagaccctgctgaagaccctgaacgccgtgcagtaccaccacgccgccaaggccaagttcctgtgcatcatgtgctgcagcaacatcagctacgagagagacggcgagcaggacaactgcgagatcgagaccagcaacggcctgagcgccctgctggaggagttcgagatcgtgagctgccccagcatggccgccaccctgtacaccatcaagcagaagatcgacgagaagaacctgagcagcatcaaggtgatcgtgcccagacacagaaagaccctgatgaaggccttcatcgaccagctgttcaccgacgtgtacaacttcgagttcgaggacctgcaggtgaccttcagaggcggcctgttcaagcagagcatcgagatcaacgtgatcaccgcccaggagctgagaggcatccagaacgagatcgagaccttcctgagaagcctgcccgccctgagaggcaagctgaccatcatcaccagcagcctgatccccgacatcttcatccacggcttcaccaccagaaccggcggcatcagctacatccccaccctgagcagcttcaacctgttcagcagcagcaagagaagagaccccaaggtggtggtgcaggagaacctgagaagactggccaacgccgccggcttcaacgtggagaagttctacagaatcaagacccaccacagcaacgacatctggatcatgggcagaaaggagcccgacagctacgacggcatcaccaccaaccagagaggcgtgaccatcgccgccctgggcgccgactgcatccccatcgtgttcgccgaccccgtgaagaaggcctgcggcgtggcccacgccggctggaagggcaccctgctgggcgtggccatggccaccgtgaacgccatgatcgccgagtacggctgcagcctggaggacatcgtggtggtgctgggccccagcgtgggcccctgctgcttcaccctgcccagagagagcgccgaggccttccacaacctgcaccccgcctgcgtgcagctgttcgacagccccaacccctgcatcgacatcagaaaggccaccagaatcctgctggagcagggcggcatcctgccccagaacatccaggaccagaaccaggacctgaacctgtgcaccagctgccaccccgacaagttcttcagccacgtgagagacggcctgaacttcggcacccagatcggcttcatcagcatcaaggagtag

SEQ ID NO: 293010 - DNA, 1293 bp, Artificial Sequence
  derived and/or modified sequence
atggccgaagccgtcctcatagatcttttcggcctgaagttaaactcccagaagaattgtcaccagactctcctcaaaaccctgaacgccgtgcagtaccaccacgctgccaaagcaaagtttctctgtatcatgtgctgcagtaacatctcatatgagcgcgacggggaacaggataattgtgaaatcgagaccagcaatggattaagcgcactgttggaggaattcgagattgtgtcatgcccttcaatggctgcgacattgtacaccataaaacagaagattgacgaaaagaatctttctagcattaaggtcattgttccccgacaccgaaagactctcatgaaagccttcatcgaccaactgtttacggacgtgtataactttgaatttgaggatttgcaggttacatttcggggaggactgtttaaacagtctattgagattaacgtgataactgcccaggagctgagggggatccagaacgaaattgaaacctttttgagatcattgcctgccttgcggggcaaactgactataatcacatccagtctcattccagacatcttcattcacggctttaccacaagaaccgggggaatctcctacattccaaccctgtcctcatttaacctattttcttctagcaaaaggcgggacccaaaagtggtagtgcaagagaatcttagaaggctggccaacgccgccggttttaacgttgaaaaattttacaggataaaaacccatcactctaatgacatttggatcatgggccgcaaggaacccgattcctacgacggcataacgaccaaccaaaggggcgtgaccatagcagccctcggggcagactgtatcccgattgtgtttgccgatccagtcaaaaaagcttgcggcgtcgcccacgcgggttggaagggcacccttctcggcgtagctatggcaacagttaatgccatgattgcggagtatggttgcagcctagaggacatcgtagtcgttctaggccccagcgtgggcccatgttgtttcacactgccccgtgaatccgccgaggcatttcacaatcttcatccggcctgtgtgcaactctttgatagtccgaacccctgcatcgatataaggaaggccacacgcattctgcttgagcagggaggtatccttcctcagaatatccaggatcagaaccaggatttgaacctctgcacatcctgccaccctgacaagttcttcagccatgtgcgcgacggcctgaatttcgggactcagattggcttcatcagcatcaaagaatag

SEQ ID NO: 293011 - DNA, 1293 bp, Artificial Sequence
  derived and/or modified sequence
atggctgaagcggtgctgatcgatttatttggattgaagcttaattcccagaagaactgtcaccaaacacttctcaaaacgctgaatgctgtgcagtatcatcatgcggctaaagctaaattcttatgcattatgtgctgctccaacatttcgtatgaaagagacggcgaacaagataactgtgaaattgaaacatccaacggcttgagtgcgttgctggaggaattcgagattgtaagttgcccctccatggccgctaccctgtacaccataaagcaaaagattgatgaaaagaacctcagcagtattaaggtgattgtcccccgacatcgcaaaaccctaatgaaagcattcatagatcaactctttacagatgtgtacaattttgagttcgaggatctccaggtaaccttcaggggcgggttgttcaaacagtctatagagattaacgtcattacagcgcaagaacttcgcggcatacagaatgaaatcgagacctttctccgtagcctcccggcgctgcgcggcaagctgactatcataaccagcagcctgatccctgatattttcatccatggctttacgacccgcacaggaggaatatcctacatccctactttgtcttccttcaatctgtttagtagctccaagcgccgggatcccaaggtggtagtgcaagagaatttgcgtcgtctggctaacgcagccggatttaatgttgagaaattctatcggattaagacacaccattccaatgacatttggatcatgggtagaaaggagcccgatagttatgatgggatcaccacaaaccaacggggcgtcacaatagcagctttgggcgcagattgcatccccatcgttttcgctgatccagtcaaaaaggcctgtggagtagcccatgcgggctggaagggcacgctcctcggcgttgccatggcaaccgtaaacgctatgattgctgagtatggctgttctttggaggacatcgtggtggtgctgggccctagtgttgggccgtgctgcttcacactaccccgtgagtccgccgaggctttccataatctccatcccgcctgcgtacagctctttgattcacccaacccctgcattgatattcgtaaggctactagaatcctgctcgaacagggcggtatcctgccccagaatatccaagaccagaaccaagacctcaatctatgcacttcttgccatcccgataaatttttcagccatgtgcgagacggtttaaattttggcactcaaatcggattcatttccatcaaagagtag

SEQ ID NO: 293012 - DNA, 1293 bp, Artificial Sequence
  derived and/or modified sequence
atggccgaggccgtgctgattgacctgtttggcctgaagctgaacagccagaagaactgccaccagaccctgctgaagaccctgaatgctgtgcagtaccaccacgccgccaaggccaagttcctgtgcatcatgtgctgcagcaacatctcctatgaaagagatggagagcaggacaactgtgaaattgagaccagcaatggcctgagcgccctgctggaggagtttgagatcgtgtcctgccccagcatggccgccaccctgtacaccatcaagcagaagattgatgagaagaacctgagcagcatcaaggtgattgtgcccaggcacaggaagaccctgatgaaggccttcatcgaccagctgttcacagatgtgtacaactttgaatttgaggacctgcaggtgaccttccggggcggcctcttcaagcagagcattgagatcaacgtcatcacagcccaggagctgcggggcatccagaatgaaattgagaccttcctgcggagcctgcctgccctgcggggcaagctgaccatcatcaccagcagcctcatcccagacatcttcatccacggcttcaccaccaggactggaggcatctcctacatccccaccctgagcagcttcaacctcttcagcagcagcaagaggcgggaccccaaggtggtggtgcaggagaacctgcggcggctggccaatgctgctggcttcaacgtggagaagttctaccgcatcaagacccaccacagcaatgacatctggatcatgggcaggaaggagccagacagctatgatggcatcaccaccaaccagaggggcgtgaccatcgccgccctgggcgctgactgcatccccatcgtgtttgctgaccctgtgaagaaggcctgtggggtggcccacgccggctggaagggcaccctgctgggcgtggccatggccaccgtgaatgccatgattgctgaatatggctgcagcctggaggacatcgtggtggtgctgggccccagcgtgggcccctgctgcttcaccctgccccgggagagcgctgaggccttccacaacctgcacccagcctgtgtgcagctgtttgacagccccaacccctgcatcgacatcaggaaggccacccgcatcctgctggagcagggcggcatcctgccccagaacatccaggaccagaaccaggacctgaacctgtgcaccagctgccacccagacaagttcttcagccacgtgagagatggcctgaactttggcacccagatcggcttcatcagcatcaaggagtag

SEQ ID NO: 293013 - DNA, 2469 bp, Artificial Sequence
  derived and/or modified sequence
aggtgaggcggggcgggtgtcgtcgcgctgggccgagcttacgactccagctgacccgctcgcggctgcccaatttcgttgaggctcaggacgagggacggggcggcaaattgtcacagaggtcgccgtagaccggtgtgcaaccgaaggtgaagagcgggaaggcgaggaccgaatcgcctctggtgtgcgttgtccgacaggaagtcccgaatgggctgtgagccgccggtggaggtgcccgggcaggtgcagagccacagcctgcgccccgtgagccgaggcgggtgatttatttggcataaaagtattctttcaaggatggcagaagctgttttgattgatctttttggtttgaaattgaactctcaaaaaaactgccatcagacattactgaagactttgaatgctgtccaataccaccatgctgccaaggccaagtttctctgtataatgtgttgcagtaacatcagctatgaaagggatggagaacaagataattgtgaaatagaaacaagcaatggattatcagctctcttggaagaatttgagattgttagctgtcccagcatggctgccactttgtataccattaaacagaaaattgatgaaaaaaatctgagcagcattaaggtaattgtacccaggcacaggaagacattaatgaaagcttttattgatcaactcttcactgatgtttacaattttgaatttgaagatttgcaagtgacttttaggggagggctttttaaacagtccattgaaataaacgtaatcacagctcaagaactaagaggaattcagaatgaaatagaaacatttttgagaagtctgccagcactgagaggaaaattaactattatcacttcttctttgatcccagatattttcatacatggatttactacaagaacaggtgggatatcttatataccaactcttagctcattcaatctcttcagtagttccaaacggagagatcccaaggtagtggttcaagaaaatctgcgtaggttggcgaatgctgcaggatttaatgtggagaaattttaccgaataaagactcatcattccaatgacatctggattatgggaagaaaggagcctgactcttatgatggaataaccacaaatcagagaggagtcacaatagcagctcttggtgcagactgtataccgatagtttttgcagatccagtcaaaaaagcatgtggggttgctcacgctggttggaaaggtactttgttgggtgttgctatggctacagtgaatgctatgatagcagaatatggctgcagtttggaagacattgttgttgtacttggaccttcagtaggaccttgctgttttactcttccaagggaatcagcagaggcatttcataatcttcatcctgcatgtgtacaactatttgattcaccaaatccctgtatcgacatccgtaaagccacaaggattcttctagaacagggaggaattcttccacagaatattcaggaccagaaccaagatctcaacctctgtacatcttgccatcctgacaagtttttctcccatgtccgagatggccttaattttggtacacagattggcttcatatcaattaaagaatgagatacttgactggatttttgtataactgcttcctgcctccttccaaactgactgcaagagagaaatttagctgtttgatttacttaaaaccaaatggattacaatggataattcatcttttgggtatatttttactattattcaaagccaaatgattttcatttaattgtaataataactgacaaaaatcagtatgttgtagctaatatgttttatgcatgagaattattcttaaagtttgttctccctgtttattacacagatcaggaatagatttgttcagttcagtatttattggataccctctattggtcaggcattgtgttaagcatatgtgaatcaaaatgaacacaactttttcctttgagtctgatacagtgaaggagataaacacttctacaacttaaatttaattttaatagcagtagaagagaacataaggaatagaggttaattttacccagaagcaggatagagaaaatattacagagaaaatcacatatcacatgggctcgaaagatgtagaggtttttgacaaatgaagaacaaccataacaggtagagggaacaccatgaaccagggcatgaaactgaaagtgcataacatattctagagagagaagggtgtgggcatgagttagggctggaaaaacaggttggaaacagataagtaagggtctcaaatgcaatgtcaaagagcttgcagtttattttccaggcaatgagtaggcagccaaaaaaaaaaaagtaaggatgttttttttttttttcccatggcatcatatttaagaggatggatttaaattgtgtgagaccaaagcatagagactagataagaggcgatcaaaatatttc

SEQ ID NO: 293014 - DNA, 4262 bp, Artificial Sequence
  derived and/or modified sequence
agacctgcagctcctgccgccctgcgcccgctcccagggcccgtcgttccgccgccctatccctcctcaaggggcccctagctgcctcctcgcgaccctttccggactcggcctgcccactcctgcccgctaacccgcctggctcccgggcgagagccctcgcgcggctctggttcctgttcctctaacgccgccggggctgcgggatgccgactccgcggaccgcccagacccggaactgctgaggcagcagcgggctcgcggcgcttggctcatcccgggattccccagctctcgcgctgggcccgccgcgttcgcaccaagcacgccaggcggccctggcctacctccctcccgcctcccggcagctggcacgagggaacctggccgtcaggtttcccctgggatcctgggacggtatcaggcggggaatctgtgcggccgcggcgaggtgatttatttggcataaaagtattctttcaaggatggcagaagctgttttgattgatctttttggtttgaaattgaactctcaaaaaaactgccatcagacattactgaagactttgaatgctgtccaataccaccatgctgccaaggccaagtttctctgtataatgtgttgcagtaacatcagctatgaaagggatggagaacaagataattgtgaaatagaaacaagcaatggattatcagctctcttggaagaatttgagattgttagctgtcccagcatggctgccactttgtataccattaaacagaaaattgatgaaaaaaatctgagcagcattaaggtaattgtacccaggcacaggaagacattaatgaaagcttttattgatcaactcttcactgatgtttacaattttgaatttgaagatttgcaagtgacttttaggggagggctttttaaacagtccattgaaataaacgtaatcacagctcaagaactaagaggaattcagaatgaaatagaaacatttttgagaagtctgccagcactgagaggaaaattaactattatcacttcttctttgatcccagatattttcatacatggatttactacaagaacaggtgggatatcttatataccaactcttagctcattcaatctcttcagtagttccaaacggagagatcccaaggtagtggttcaagaaaatctgcgtaggttggcgaatgctgcaggatttaatgtggagaaattttaccgaataaagactcatcattccaatgacatctggattatgggaagaaaggagcctgactcttatgatggaataaccacaaatcagagaggagtcacaatagcagctcttggtgcagactgtataccgatagtttttgcagatccagtcaaaaaagcatgtggggttgctcacgctggttggaaaggtactttgttgggtgttgctatggctacagtgaatgctatgatagcagaatatggctgcagtttggaagacattgttgttgtacttggaccttcagtaggaccttgctgttttactcttccaagggaatcagcagaggcatttcataatcttcatcctgcatgtgtacaactatttgattcaccaaatccctgtatcgacatccgtaaagccacaaggattcttctagaacagggaggaattcttccacagaatattcaggaccagaaccaagatctcaacctctgtacatcttgccatcctgacaagtttttctcccatgtccgagatggccttaattttggtacacagattggcttcatatcaattaaagaatgagatacttgactggatttttgtataactgcttcctgcctccttccaaactgactgcaagagagaaatttagctgtttgatttacttaaaaccaaatggattacaatggataattcatcttttgggtatatttttactattattcaaagccaaatgattttcatttaattgtaataataactgacaaaaatcagtatgttgtagctaatatgttttatgcatgagaattattcttaaagtttgttctccctgtttattacacagatcaggaatagatttgttcagttcagtatttattggataccctctattggtcaggcattgtgttaagcatatgtgaatcaaaatgaacacaactttttcctttgagtctgatacagtgaaggagataaacacttctacaacttaaatttaattttaatagcagtagaagagaacataaggaatagaggttaattttacccagaagcaggatagagaaaatattacagagaaaatcacatatcacatgggctcgaaagatgtagaggtttttgacaaatgaagaacaaccataacaggtagagggaacaccatgaaccagggcatgaaactgaaagtgcataacatattctagagagagaagggtgtgggcatgagttagggctggaaaaacaggttggaaacagataagtaagggtctcaaatgcaatgtcaaagagcttgcagtttattttccaggcaatgagtaggcagccaaaaaaaaaaaagtaaggatgttttttttttttttcccatggcatcatatttaagaggatggatttaaattgtgtgagaccaaagcatagagactagataagaggcgatcaaaatatttcaaaaagaaataatgaagatccaatgaaggaagtggaaattaaaatagggaagagagtagatggattagagagacatttaagagatggaatcaatagatcctgttactagataatggaagtaagaggtgaggaagagtggaaaagtcattaatgactctaagatttctgcttggctgcttaccaagattggcaacaaagggagggagaaggtttggaaaaagagagaaggataatgagtttgactttacatagaatgaagggcatccagatagaaatctttggttaataattagaaatatagacctagaaattaggaggaaacctgagacagagacaaatatttcaaagcttacaatacagagatgatacctgattctattggagcaggtttgatcatctaggcagaaattaggatgagaaaaaaggagatccaataatacaaccttatagtcacagaagtaagaaaaaaagggtagttgttttgaagaagccaggataggtgtggaaagtactcaaaaagaaatcttcagggataaaataaagtgataatttaaaagaaatcaatggattaaacatattgaaactgttctataggcagtggtcattgagtcagctttcagtgcattaggaagaagatgcataggtgtcaactcttttctgacagcatttactagagaagagaaaaagctggggactacatcttcaaggaagggactttttttggatgagcagttttgagtgtgtttgtcagttaaagagaggaattaggttagttttcatttgggaaaaattgtatatatatttaatgtaagttatcacattgcatcttaaaaatattcttatttaatacatatatttcctacatgtatatgtggtagcatgatagcaaataacatttgtttggtatttccaaaggactttcatgtacattgcctcattttacctttacagctactctgaaatacacaggcattatcccttttattcagctgagaaaactgagcttcattgaggtggaggtcaaaaatcacaaaatttgtgatgaattaagatttgaacatatgttttgtgactccagttttcctttcagattttaaaattaattaaagggatcttcattatacttttattgttaactttttgttaacataatttattcatacattcagtgaaaattttgttgaggtactgggacaggttaaaaaatacagttgtagccctcaggatatttaatatccagtgaaaagtgacagtcagtaaaccaacaatctcaatactttgatatatgttgtgaggttgtgataaccgattcttgtttagtttaattctatatctcccttagaccagtgttaaatttaaataaaacacctcattttttccaattcagggaaggcactaaacataaagcataggatagaaatgttgaactcatccaaaatattattttgtttaatgaaaatgatgaagattaaggaatacttccatgtattgagtaaggttgataattttctaattcttcactgtgcattattttgtttgaagttggtaaatttggagtatcctgcagacacattttgctttatgtactacaacattctacaaccaaataaaaattattttgattatctg

SEQ ID NO: 293015 - DNA, 1293 bp, Artificial Sequence
  derived and/or modified sequence
atggccgaggccgtgctgatcgacctgttcggcctgaagctgaactcacagaaaaactgtcaccagaccctgctgaagaccttgaatgccgtgcaataccatcacgcagctaaagccaagttcctgtgcatcatgtgctgttccaacatatcatatgagcgagatggtgaacaggataattgtgaaatcgagacttccaacggactttccgccctgttagaggagttcgagatcgtgtcatgtcccagtatggcggccactctgtataccataaaacagaaaatagacgaaaagaatttaagctctataaaagtgattgttccccgccataggaaaactctgatgaaggcgttcatcgatcagttgtttaccgacgtgtacaactttgagtttgaggatctgcaagtgaccttccgaggaggattgtttaaacagtctatagaaatcaacgtgatcaccgcccaggaactccgaggtattcagaacgaaattgaaacctttctgcgaagtctcccagctcttcgaggcaaactaaccatcataacgagctcactcatccctgatatctttattcatgggtttaccacacgaaccgggggtatatcctatatcccgacgctgagttcctttaacctatttagcagctccaagaggcgcgatccaaaggtagttgtgcaggaaaacctccgtcgcttagcgaatgccgcaggattcaacgtcgaaaaattttaccgcatcaagactcaccactccaatgacatttggattatgggccgtaaggaaccagatagttatgatggcatcaccaccaaccagcgaggagtgaccatcgccgctttgggagccgactgtatccccatcgtctttgccgatcctgttaaaaaggcttgcggcgtagcccacgctggctggaagggcactttgctcggcgtggccatggccacggtgaacgccatgatagcagagtacggctgctcccttgaagacatagtggtagtattgggccccagcgtcgggccatgttgtttcacactgccccgcgaaagcgcagaggcattccacaacttgcatcccgcctgcgtgcaactgttcgactccccaaatccttgtatagatatcagaaaggccacacgcatactgctcgaacagggaggtatcttgccgcaaaacatacaggaccagaatcaggacctcaacctgtgcacatcttgtcaccctgacaagtttttctctcacgtccgggatgggcttaactttgggacgcaaatcgggtttatttcaattaaagagtag

SEQ ID NO: 293016 - DNA, 1293 bp, Artificial Sequence
  derived and/or modified sequence
atggccgaggccgtgctgatcgacctgttcggcctgaagctgaactcccaaaaaaattgccatcagaccttacttaagactctcaatgccgtgcagtaccatcatgctgcaaaagctaagttcctgtgcatcatgtgctgttctaacataagttatgagcgcgacggagagcaggacaactgcgagattgagacatcgaatggcctgtcagcactacttgaagaatttgagattgtctcctgtcctagcatggcagccaccctgtacaccatcaaacagaaaatcgacgaaaagaaccttagctctatcaaggttattgtacccaggcaccgcaagacgttgatgaaggcatttatcgaccagctgtttactgacgtgtataacttcgagtttgaggatctccaggttacctttagagggggcctcttcaaacagagcattgaaatcaatgtgataaccgctcaagagctgcgcggtattcaaaatgagatagaaacttttctcaggagccttccagcactacgcggtaaactgacaatcatcacttccagccttatccccgatatctttatacatggtttcaccacccgaacaggtggcatttcttatattccgacactgtcgtcattcaatctcttctcctccagcaagaggagggaccctaaagtggtggtgcaggagaaccttcgccgactggcgaacgctgcagggtttaacgtggaaaagttttaccggatcaaaacacaccactccaatgatatctggattatgggacgtaaggagccagacagctacgacggtattaccactaatcagaggggagtgaccatcgccgccctaggggcagattgcataccaatcgtgttcgccgacccggtgaaaaaggcatgtggtgtcgctcatgccggctggaagggcactttactgggggtggcaatggcgaccgtcaatgccatgatcgcagaatacggttgcagccttgaggatatagtggttgtgctgggccctagtgttggcccctgttgttttactctgccgagggaaagtgctgaggcttttcataaccttcacccggcgtgcgtccagttattcgactccccaaacccctgcatagacattcgtaaagccactagaattttattggagcaaggcggcatcctaccacagaatatccaggaccagaaccaggacctcaacctgtgtaccagttgtcatcccgacaaattcttttctcatgtccgggatggcctgaatttcggtactcaaatcggcttcatttccattaaggaatag

SEQ ID NO: 293017 - DNA, 1293 bp, Artificial Sequence
  derived and/or modified sequence
atggccgaagcagtgctgattgacctgttcggactgaagcttaactcccaaaagaattgccatcagactcttctgaagaccttgaacgccgtacaataccatcacgctgcaaaggccaaatttctctgtatcatgtgctgtagcaacatcagctacgagagagacggcgagcaagataattgtgaaatcgaaactagcaacggactgtccgccctgctggaagagttcgagatcgtgtcttgcccctcgatggcagcaaccctgtataccatcaagcagaaaatagacgaaaaaaacctttctagcattaaagtgatagtccctcgccacaggaagacgctgatgaaagcctttatcgaccaacttttcacagatgtgtataattttgaatttgaggatctgcaagtgaccttcagagggggacttttcaaacagtcaatcgagatcaacgtgattactgcccaggagttgaggggtatacagaacgagatcgagacttttctcagatcattaccagcattacgagggaagctgacaataatcacatcatcactgatccctgacatttttattcacgggttcacgaccaggacagggggaatctcgtatatccctaccttgtcatcgttcaatctgttcagctcatctaaacggagagaccctaaggtcgtggtgcaggagaatctgcgtagactcgctaatgctgctggctttaacgttgaaaaattctatagaatcaaaacgcaccactcaaacgacatttggatcatgggtcgcaaggagccggatagctacgacgggattacaacaaatcagcgaggagtgacgatcgccgctctgggcgctgactgcatacccatcgtattcgctgatcccgtaaaaaaggcctgtggcgtggcccacgccggatggaaagggactctgctcggcgtcgctatggcaacggtaaacgccatgattgcggagtacggatgcagcctggaggatatcgtcgtggtcttgggaccctctgtgggaccctgctgttttaccctaccacgagagagtgcggaagccttccacaatctccaccctgcctgcgtccagctctttgacagccctaatccttgcatagacatcaggaaagccaccagaatcttattggagcaggggggaattctgcctcagaatatacaggaccaaaaccaggatcttaatctgtgcacatcatgccatcctgacaagtttttttcacatgtcagggacggcctcaactttggcacacagatcgggttcatttccataaaagaatag

SEQ ID NO: 293018 - DNA, 1293 bp, Artificial Sequence
  derived and/or modified sequence
atggcggaggccgtgctgatcgatttgtttggtcttaagctcaactcccagaagaactgtcaccaaaccctgctcaaaactctcaacgctgtccagtaccatcacgccgcaaaagccaagtttctgtgcattatgtgctgttccaatataagttatgagagggatggcgagcaggacaactgtgaaatagagaccagtaacggcctaagtgcgctcttggaggagttcgagattgtgtcctgtcccagtatggccgctacactttacacaatcaagcagaaaatcgacgaaaagaacctatcgtccatcaaggtcatagttccacgacaccggaagaccttgatgaaggccttcatagaccagttgtttacggatgtttacaattttgagttcgaggatctccaggtgacgtttaggggaggcctgttcaagcagagtattgagatcaatgttataacagctcaggaattacgcggtatacagaatgagatcgaaacattcctgcgaagcttgccggctctgcgcggaaaattgactatcatcacatcctccttaatcccagacattttcatccacggcttcacaactagaaccggtggtatttcctacatcccgacgctgtccagttttaacctcttctctagtagtaaaagacgggaccccaaagtggtcgttcaggaaaacctgcgtcgccttgccaatgcagcaggcttcaatgtcgaaaaattctaccgaatcaagacacatcatagtaacgacatctggattatggggaggaaggagcccgattcctacgatggcatcaccacaaatcagcggggagttaccatcgctgctctgggcgcagactgcatcccgatcgttttcgcggacccagtgaaaaaggcatgcggagtagcccatgccggatggaaaggcaccttacttggtgtagccatggccacagtgaacgctatgatcgctgaatacgggtgcagcctggaggatatagtcgttgtgctggggccttccgtcggtccctgttgtttcaccctgcctcgggaatctgctgaagcattccacaatctgcatcccgcatgcgtgcagttgtttgattctcccaacccgtgtatagatatcagaaaggcaacccgcattcttctggagcaaggcggtatcttgccccagaatatccaggaccagaaccaggacctcaatctgtgcacttcttgccatccagataaattcttttcacacgtgagagacggactgaatttcggcacacagattgggtttatttccataaaggaatag

SEQ ID NO: 293019 - protein, 552 aa, Artificial Sequence
  derived and/or modified sequence
METSRSRGGGGAVSERGGAGASVGVCRRKAEAGAGTGTLAADMDLHCDCAAETPAAEPPSGKINKAAFKLFKKRKSGGTMPSIFGVKNKGDGKSSGPTGLVRSRTHDGLAEVLVLESGRKEEPRGGGDSGGGGGGRPNPGPPRAAGPGGGSLASSSVAKSHSFFSLLKKNGRSENGKGEPVDASKAGGKQKRGLRGLFSGMRWHRKDKRAKAEAAEGRAPGGGLILPGSLTASLECVKEETPRAAREPEEPSQDAPRDPAGCGDIIADQEEEAGPSCDKHVPGPGKPALSKKNPGVVAYQGGGEEMASPDEVDDTYLQEFWDMLSQTEEQGPEPQEGAAKVAAALETKVVPETPKDTRCVEAAKDASSVKRRRLNRIPIEPHPKEEPKHPEKEQQEGVPNSDEGYWDSTTPGPEEDSSSSGKKAGIPRDSYSGDALYDLYADPDGSPATLPGGKDNEETSSLSRLKPVSPGTITCPLRTPGSLLKDSKIPISIKHLTNLPSSHPVVHQQPSRSEMPRTKIPVSKVLVRRVSNRGLAGTTIRATACHDSAKKL

SEQ ID NO: 293020 - DNA, 1659 bp, Artificial Sequence
  derived and/or modified sequence
atggagaccagcagaagcagaggcggcggcggcgccgtgagcgagagaggcggcgccggcgccagcgtgggcgtgtgcagaagaaaggccgaggccggcgccggcaccggcaccctggccgccgacatggacctgcactgcgactgcgccgccgagacccccgccgccgagccccccagcggcaagatcaacaaggccgccttcaagctgttcaagaagagaaagagcggcggcaccatgcccagcatcttcggcgtgaagaacaagggcgacggcaagagcagcggccccaccggcctggtgagaagcagaacccacgacggcctggccgaggtgctggtgctggagagcggcagaaaggaggagcccagaggcggcggcgacagcggcggcggcggcggcggcagacccaaccccggcccccccagagccgccggccccggcggcggcagcctggccagcagcagcgtggccaagagccacagcttcttcagcctgctgaagaagaacggcagaagcgagaacggcaagggcgagcccgtggacgccagcaaggccggcggcaagcagaagagaggcctgagaggcctgttcagcggcatgagatggcacagaaaggacaagagagccaaggccgaggccgccgagggcagagcccccggcggcggcctgatcctgcccggcagcctgaccgccagcctggagtgcgtgaaggaggagacccccagagccgccagagagcccgaggagcccagccaggacgcccccagagaccccgccggctgcggcgacatcatcgccgaccaggaggaggaggccggccccagctgcgacaagcacgtgcccggccccggcaagcccgccctgagcaagaagaaccccggcgtggtggcctaccagggcggcggcgaggagatggccagccccgacgaggtggacgacacctacctgcaggagttctgggacatgctgagccagaccgaggagcagggccccgagccccaggagggcgccgccaaggtggccgccgccctggagaccaaggtggtgcccgagacccccaaggacaccagatgcgtggaggccgccaaggacgccagcagcgtgaagagaagaagactgaacagaatccccatcgagccccaccccaaggaggagcccaagcaccccgagaaggagcagcaggagggcgtgcccaacagcgacgagggctactgggacagcaccacccccggccccgaggaggacagcagcagcagcggcaagaaggccggcatccccagagacagctacagcggcgacgccctgtacgacctgtacgccgaccccgacggcagccccgccaccctgcccggcggcaaggacaacgaggagaccagcagcctgagcagactgaagcccgtgagccccggcaccatcacctgccccctgagaacccccggcagcctgctgaaggacagcaagatccccatcagcatcaagcacctgaccaacctgcccagcagccaccccgtggtgcaccagcagcccagcagaagcgagatgcccagaaccaagatccccgtgagcaaggtgctggtgagaagagtgagcaacagaggcctggccggcaccaccatcagagccaccgcctgccacgacagcgccaagaagctgtag

SEQ ID NO: 293021 - DNA, 1659 bp, Artificial Sequence
  derived and/or modified sequence
atggaaacgagccggtcgcgcggaggtggcggcgcagtgtccgagcgaggaggagccggggccagcgtcggcgtgtgtcgtcgcaaggccgaggcaggagctggcacaggaactctggctgcggacatggacttgcactgcgactgtgctgctgagacacctgccgcagagccaccgagtggcaaaattaataaggccgcgttcaaactgttcaagaagcgcaagtccggtggcacaatgccatcaattttcggtgtaaagaacaagggggatggaaagtcttcaggcccaaccggcctggtgcggtcccggacccacgacggcttagccgaggtgctggtgcttgaatccggccggaaggaggagccgcgaggcgggggcgacagtggagggggaggaggaggcagacctaatccagggccaccaagagccgcaggcccaggaggtggctcgcttgcctcctcgagcgtggccaagagccatagtttcttcagtctcctgaagaagaatggccgcagcgaaaacggtaagggagaaccggtggatgcaagtaaggcaggcggtaagcagaagaggggattaagaggattattctctggaatgaggtggcatcggaaagacaaaagagcgaaggccgaggccgccgaagggcgggcgcccggagggggactgattcttcccggcagtcttaccgccagcctcgagtgcgtcaaggaggagactccaagggccgcaagggaaccagaagaaccttcccaggatgcgcccagggatccagctggttgtggggacataattgcagatcaggaagaggaggcaggccctagctgcgacaagcacgttccagggcccggcaagcccgccctctctaagaaaaaccccggggtggtggcctaccagggtggtggcgaggagatggcaagtccggacgaagtggacgacacgtaccttcaggagttctgggatatgctttctcaaacagaggaacaaggcccggaaccgcaggaaggagccgccaaggtggccgctgcactggagaccaaggtcgtgccagagacccccaaagacacacgatgcgtggaggctgctaaagacgcatcaagtgttaagcgtcgcaggttgaataggatccctattgaacctcaccctaaggaggagccgaagcacccagagaaggaacagcaggaaggcgtcccaaatagtgacgagggctactgggactctaccactcccggcccagaagaggactcttcctcttctgggaagaaggccggaatcccacgtgactcatattcaggagacgcactgtacgatctctatgctgatcccgacggctctcccgctacactcccgggaggaaaagataatgaagagacatcatctctgtcccggcttaaaccagtgagtcctggcacgataacctgccccctgcgaaccccagggtctctcctgaaggactccaagatccccatctccatcaagcaccttactaatctgccctcctctcatcccgtagtccatcagcagccctcaaggagtgaaatgcccagaactaaaatcccagtgtccaaggtactcgtcagacgcgtgtcaaaccgaggcctggccggcactaccatcagggccacagcctgtcatgatagtgccaagaagctctag

SEQ ID NO: 293022 - DNA, 1659 bp, Artificial Sequence
  derived and/or modified sequence
atggagacctctagaagccgcggcggaggaggtgcagtgagtgagcgtggcggcgcgggggctagcgtgggcgtatgccggcgcaaggccgaggcaggagccggcacaggcaccctggcagcggatatggacctgcactgcgattgtgcggctgaaacgccggccgccgagccgcctagtggcaaaattaacaaggcagctttcaagttattcaaaaaaaggaaatcggggggcacaatgccgtccatcttcggagttaagaacaagggagatggtaagagtagcggaccaacgggcctcgtgaggtccagaacacacgacggcctggccgaagtcctggtgctggaaagtggccgcaaggaggaacccaggggagggggagattccggaggaggaggcggtggccggccaaacccaggccccccacgagccgccggcccaggcgggggaagcctggcttccagttctgttgctaaaagtcacagcttcttcagtctcctgaaaaagaatggacggtcggagaatggtaagggcgagccggtagacgctagtaaagccgggggaaaacaaaagcgcggacttcgcgggttgttcagcgggatgagatggcatcggaaggacaaaagagccaaggccgaggcggctgagggacgggcacccggcggtgggctgattctgcccggtagtttgaccgcatccctagagtgcgtcaaggaggagactccccgggcggccagggagcctgaggaaccctcccaagacgcccctagagatccagccgggtgtggcgatatcattgcggatcaggaagaggaagctggccccagttgcgataagcacgtccctgggcccggtaagcccgccctgagtaaaaagaatcctggcgtagttgcataccagggtgggggcgaggagatggcctctccagatgaagtagatgatacctatctgcaagaattttgggatatgctgtctcagacagaagaacagggtccagaacctcaggaaggagcggctaaggtcgccgcagctttggagacgaaggtcgtcccagaaactcctaaggatacacggtgtgtggaggcagccaaagacgcttcctccgtcaagagacggaggctgaatcgcatccctatcgaacctcatcccaaagaggaacctaagcacccagagaaagaacagcaggaaggggtccccaattctgatgagggctattgggatagtaccacgcctggccccgaagaagatagctcctcatctggaaaaaaggcgggaatccctcgtgattcctacagcggtgatgctctatatgacctctatgccgacccagatggctcccccgctactctgccaggtggcaaggacaacgaagaaacatcttccctgagccggcttaaacccgtgagcccggggaccatcacatgcccgttgcggactcctggttccctgttgaaggactccaaaataccaatcagtattaagcacctcaccaatctgccctcctcacatcccgtggtccaccagcagccgtcaaggagcgaaatgccccggactaagattcccgtcagcaaggtgttggtccgacgggtcagcaaccggggactagctggcaccacaatccgcgcaaccgcatgccacgatagtgccaagaaattatag

SEQ ID NO: 293023 - DNA, 10055 bp, Artificial Sequence
  derived and/or modified sequence
aggcaaactccaccccggggagctgttgtgcttgcattgctgggctgctgatagactgattgagtggtggcgtgtacttttgtcacaagaaccataaccacaatgacagccacacagcatggacctagcgtgtgctcagctctggacaagacatggatgtaggcagacatgcttcctgcctgctgggcttagtgcaccaatgctaaggacagacatgaagggcttgggaaaggcatgaagatgcagggagtctaggagagaggataagaaaaacaagcattttgtggtgggttgaattgcgttgtcgtttttagaggcatttcgtgatccatggttgcgctcccgtgaagagcgagtctagagaaggaatccgaagcggcggcggcgagcgcggctcaggttgatttagaatacgggtgacagtggcctggcgcgagcccactgctgacgaaagcggcttatcccgcgcggtttccatggagacgagccggagccgcggcggcggcggggctgtcagcgagcgcggcggagctggcgcgtccgtgggggtctgcaggaggaaggcggaggccggggccgggaccgggaccctcgcggcagacatggacttgcattgtgactgtgccgccgaaacgccggccgccgagccgccgtcggggaagattaataaagctgccttcaaattattcaagaagaggaaatcgggtggcaccatgcccagcatttttggggtcaaaaacaaaggggacgggaaaagctcgggtccgacggggctggtgaggagcaggacccacgacggacttgccgaggtgctggtgctggagagcggcaggaaggaggagccgcgcggcgggggcgacagcggcgggggcggcggggggcggccgaacccggggccccccagagccgcagggcccggcgggggctccctcgccagcagctcggtggccaagtcgcacagcttcttctcgctgctgaagaagaacgggcgctcggaaaacggcaagggagagcctgtggacgcgagcaaggccggcggcaaacaaaagcgggggctgcgggggctgttcagcggcatgcgctggcacaggaaagacaagcgggccaaggcggaggccgcggaggggcgcgcgcccgggggcggcttgatcctacccggctcgctcaccgccagcctggagtgcgtcaaggaggagacgcccagagccgcgcgcgagccggaggagcccagccaggacgccccgcgagacccagcaggctgtggagatattattgcagaccaagaggaagaggcaggtcccagctgtgacaagcatgtccccgggccaggcaagccggctctgtctaaaaagaaccccggcgtggtggcctaccaaggaggcggggaagagatggccagcccggacgaggtggacgacacctatctacaggagttctgggacatgctctcccagaccgaggagcagggacccgagccccaggagggcgcggctaaggtggcagctgcgctggaaaccaaggtggtgcccgagacccccaaagacaccaggtgtgtggaagcggccaaggacgcgtcctcggtcaagcgcaggaggctcaaccggattcccatcgagccccatcctaaggaggagcccaagcacccggagaaggagcagcaggaaggcgtccccaacagcgacgagggctactgggactccaccacgccaggcccagaggaagacagctcgagcagcgggaagaaggcgggcatcccccgggatagctacagcggggacgcgctctatgatctctatgctgacccggacggaagtccagcaacccttcctggagggaaggacaacgaggagacgtcctccctgtcccggttaaagcccgtatctccaggcaccatcacctgtccactgcgaacaccaggcagcttgctgaaggactctaagatccctattagcatcaagcacctgaccaaccttccatctagccatcccgtggtgcaccagcaaccctccaggagtgagatgcccagaacaaaaatcccggtttccaaagtgctggtccgcagagtcagcaaccggggcttggctgggaccaccatcagagcaacggcctgccacgacagtgccaaaaagttgtgaggtcttccaggccaaggtggatgggccccatgccaaggaatacaacttttccctggaaaccactaaagtaagttttgcttttcctaaagaaagtcttttaggacaccacccgtcccccgccctgctccagagcgtggaccgaggaggtctttgtgccctgagcagggaccggataacaccagaaagagggatgctacacgggggtttctcctctcaagataagtccctgagaattattttcaagcacttttttcttttttacctttaagtttttcttccttttgctttaatatactgaacacttggaagtcacctttacttgcctttgcagaaaacagaacttagccaaacctaagtaagagtcatgcctggatattgggataagccagtgtctagaggcctgaaggaaccgctgaagaaccagaggagatctcctcttccaagacacgtttccttccttcccttctttcctctttcctttccagttaaaaaaaaacaaaaacaaaaacaaaaccctttgctgtatcactgtgtggaaaatacctccaaagctgaaagagccaggtatttacctgatgagcagaggggaccactgattggcagaaaacttccctacgttcagttgttagatatgcaaattgataaggatctaacactaggaaaataaaggcgagttttggtttggttggtttcagtcatttgtttggggagatataaaaggctcaggagagcaggcttttgcttttgcttttgtttgtttcttcccccacccagtgcagaaatcaggatcagggaaagattttattaaatgccaatagatacagtatttaagcatttataaactgaaaccttttcatgtgaagataatgcatattttaccgtttatccagctgttaacattttgtaatcagtcaattcaatagaattattctggataattctatatctagaatataaaatctggtcttatagctagacatgatgatggtccccaaaccattgatgttctgttatgtactgtaatgggaagcgattctgattttgttttatatgggttctctggttctcaaaaaaaaaaaaaatctattgtgctggtgtcccagaggaatggctctgccttgttttgggtaagagtctgtttctcaccccaaaccctgttttcagatttttttttaccttgattgtaaaatttcagatccaaccattcctcaatataatgagtgcaaaatgaggaacacataaagaaaaacaatagaaagatacagtttttcacatcatttgccttttgctttatagacttatgacaaagacaagtgtgttcagaatatgacactggcaagcttatgtattgtaaacactttatgccaagttttttttgaaaagtggtttgcttctatgtatgttttctaatatttcagatgaaacatttatttcagaaagggttattatatgcctagtttgaatgataaactgaagcagttcctagaatgctattagtgtctaatgatgaaattaatatcctttttgaaatacacttcagtgtatttaatcaaaagaccagagcttctactaggaggtgattcatcataccaggaagattatgcatattcacgtgaaactgcacatatgtaaatgacatgaacacttctgtataagtctcatttccagagagattgcattagtaatgaactgttattacatgctttttaagtttgttttctgtttcataaatgaaagaacaaggcaagttaaatatatgaaaacctattttaataatatgaagaaagtaacaaaataaatggacatcaaaggaaagcaaattgagccagtagcagaaagtaggccattccccattttaaatttgcagtgattcaattaggagaggtttgctgaatttcttcattagtcatatgactggcttttattgcattgtctcagatccataatgttatttcaaagtaatcttttaatatttaatttctttatgtgtgtaaatgaggccctatatgcagtcatagccttaagcattctgaacacactaccaagaattcatataagcatctcacactcacgtgctcatgcactcaactgtgtacagactaacagacaaaagacatctactctagatctggaaattatttttgaaattatttctgtattaaacaagggatttacatttgatttcatgccgctggtactatttaggctcaaaatacattcatcttcccctagtgaatggagaaaatataaattttattcctagctgtaaaacaaaggatcttgatttccttgttgtacattttcctgcaagggttatattctcctttgcatgaatccatggcaaagttatgttggttcatttgttcaattgtacaggaaagttaagaatacctgaaaaacttatgagaatattgtaatagtaaaggcaatctatttcttaagcagtagaagaaaagtttttgctttcataattttaggacttaatcctccatttacaccattatgctgtgtctcctctttataagaaaaggaacacgtgagcaaagtttatcttaatttccactgacctgtcaattaaccagttataaaagatataaaatattttcttttaaaatttatattttccactttttttttaccttattttttaagaattgcacccacaccaatcaaataaaggatttgggcaatgaattaaacagcctcaatcacttgatgggaaatccctggagtggcaggaagagtagattctcaactttttccaaccatagaaaagggatcatagttgctttcttgtgccaagggctactttctctcatttgtgttcatggagattgttttttcaagaattttcctagatttacattccaatttttattaatacattatatctaatgaccttgtgaagattattcaggcccatatttgctgactttttaagggaaggattggatagaggctaattatatctttcccacatgtatgtatattctaagatacttggttgattgacttcctttagttgaaaggctgcccaaattagacaggaaaaagtcaaatcaattgttgggcgaaaatttatcggttggtttaatagctctgcacaaagacagcctgacttgaatgtctatattacacatacactgttatttgaaacactctgctttagtacagatggtggttgatgcgtttatcctgccattagcaccaattgggagaaattttactacagcattttaaataatcacaagagtaaatagatttctattattttatctaataacaacaatagaatatagaatacaaaggacttcctctagatacattttattttatctaataacaacaatggaatatagaatacaaaggacttcctttagatacattttccacaaattatctgcttatttaaatacaaagggtttaatatctatgaaggtaataactcaccgtgtttaaaggatttatttcttcatctcagaggtagtcttcaagtatttgcagttaaacagtatgcaaatagccctttgcttacacaattatccaggtaaaaagactatgtcaggtgttgagatttctttgaattttctaagagttttcattatttacgcctttgtcagattaattttaaaggcaactcttgactgttagcttggtgtgaagagatccactcaggcagctcatgtctcctaagtgccctcagacagcagtgacgggacacttcacatgacgctagcatgttggctctgtccgcatggcggaatgcattccctgctgttagttatctgaatttttctcctgaattacaaatatatggatttggctcccctgatgctgggcttctgctgagacctgttccagtacattcacgtatgctttgctccccttcattgttaagaaattaattcaagaagttttttgctgttaaacataaggaataagcatcacaattgcctcatctcatcactgaggaaagctggtttaaagtatctgagtgaaataagaggaaaaccccaaatacttcacctaacccagtttccctttcccctcctccaggcagagcaaggaaaagaacagttgtaatttgtgtaaactcagccttagaaaatttcaattcattacacacaaaaatatttatgaagcagtttggaaccaaaggggtagtatggtagacgagtgtcttacagagcctgtgtggggaagcaaaaggcaagggtgtagttcacaggcagaagcgagctgtgacattgtcagtgcagcgtgtaagtgtggctcctcacaggcggccattgattgtgagacctcatcttgctctgaagatttcccggtggctgtcatgcattgcttctcaaaagccttgcactgtgataaggtttaaggagacagattgttgcaacaatagccacttctaaggaatgttattatgtcactgcagatgatgtttttaagaggtgattcagaatgatagtttcgtgattacggaaaggagttccttctcaaactgcaaaaggaaagatgaaaatagtcatgaagcctccagaactgaaattgggcaccttttatgatggatatttactttaattcaatgcaacacatatttatggggcatagactgtatcaaatacttaataaaacccattcagtttggagctcacacctaagctgcgctgtaattggattttcttaatattcattaaaaacacaaaacaatattattttacttttttttggtatttgcatttgttgcttatagtttgtggggtgaagcaaagtggtgtgaagttgaagaagggcactatgaattaagccacacaaatgcctctaaaaaatagtaaatgtaacaatggttaacattcattgaatacttactatgtgtcaggcactgctaggagatttagaaataattacttagtcctcttaacagccatgtggggtaggtaatattatctccccagtaagacagctttaattcatcctttttgtttctatccctttccatctctgtctgtctgtctctctctctcttttcccctagtctctaggacagggatataaactctttagtgattttcagtaatagagagctaagcactgcttagtgtcattgtcagctcacttctaatagaaagagctaacccatgtccacgcagctgaaaattagttttgtgtctgagatgatggtgctcacaatcatatacagggaaccctgccactgtgctatgctgagtaggcaaacattggccttcccttggagggatcctcttctcttaggattaatgtgggaagtacagacagaaatctcttctgttgtcatggcgatacttcttccctgacagggtatcattcattcaaagcatatttgtttcatttgtttttattcctaccttaagccatcttggtgggttctgggtggtctatgcatatgtgtgtgtgttttaattgcagtaagaatattgaatatgagatctaccctctttaattttttttttttttttttttgagatggagtcttactctgtcacccaggctggagtgcagtggcttgatctcggctcactataacctccacctcccaggttcaagtgattctcctgcctcagcctcccaagtagctgagactacaggcgtgcaccaccatgcccgttagtttttgtatttttagtagagacagggtttcaccatgttggccaggctggtctcaaactcctgacctcaaatgatctgcccacctctacctccaaagtgttgggattacaggcaatgagccaccacgcccgggttaccttctttaatttttaagtacacaatacagtattgttaactatagccacagtgttgtacagcaaatctctctcacctatgcatcctgcgtaactgaaactctgtgcccattgaacagcagctcctcatttcctcccccatcagcccctggcagccatcattctactctctgcttctgtgagtctggctattttagatcccttatagaagtggaaacgcgcagtatttgtccttctgtgactggcttatttcattgagcataacgacccccaagtttagccatgttgttgcttatggcaggatttccttcttttttcaggctgaataatatttccttatatgtatatgctgcatttttaaaaaccctttcatctactgacagacgtttagattatttccacatcttggctattatgagtaatgctacaacgaacgagggagtgaaaatatctctttaagatcctgatttcagtttttttgaataaatacccagaagtggaatgactgggtcattcatatggtaattctaattaaacatagaattatttttaattttttgagaaacttctgtgctgctttccacagtggttgcatctgtttacatacttaccaatggtgcacaagggttccaatttctccacatctttgccaacttgttatctgtgtttgtttaaatgacagctgtatgagttgtcccttgcctccatgcaattctgaacttcagaaataagcacttggctcctttaatagctgtccgtcctatgttgtgtctacagccactgaatcctgtcctacattttctgattcattaactcattcaactaatagctattgaacaccatcaataagtcagccaccatgaagatgagtattttatattgaattctactaacatatcctgtatgtttactatgttgccagagaggatgctgtgtgctttttttacattgttatctttactcttcacaagaaccatgtaaggtaggtattggtaaaatgggtaattttggaaatgcttcaataatcgagtagaataacttttgctctatgtgagaagatacgttttaaataagatatggcttaggtttctggttacctgagacatactataccttctcagatactctcagacctgaatcatttaacaaactaaggcagaaatactaaaaatatctggttcaataacataggggcatggagtagacatgcagaaaatgcttgttcacttgccttgaaatggctccaggtggcctgaaggaatcaatgaaacttctcaagtatctacattacaaccactggtccccactacacatttatttctaaataaaggaggagaaactctagcaaagtaatatttaacattttcattgcttccaggataaatcttattgaatatggaggatctgatagtggtaggtctatcaggaatatcagggaaaatgcttttgatgttgttggcaaagtcaattcctatcatttgtacttgacaccagctacctagcaggctcattgtgaacttcaggtttcgcccacgttatttatataaagtatctcagtgtaatatagggagttgctggttatttgaaaatagtaacaaaaataacccaaacgagaaactccatttccataattagctttcctgaaagtcaggcatgtctttgaggacaggttttggcagtattatttttgtgcacaggaggaaaattgttagtaggtttatagatgttatttttataatagaatgttaaacccctgaaaaacatcaaaaattgtctcctagaactaattctatgttttaaaaacttgttttaaaaaggattctaaatagcaatagggtctttcctcctttctccactccaatggtttaatgggatagaggaatcaatgtttatatttttaaacctgtaaatattttattttgggtattttgtatatttgttgatataattccattttgtgcatatgtaccattgtgcatgttgctgtttttgatagtcactcttttaatgaatgtaagaagcttgggctaatagcacttttcttgttccattcaaacatctgaaaatgaaattacaacactgccattttactgttgtgtttaattcagtcaataaattttgttgctcctttgcatttaaa

SEQ ID NO: 293024 - DNA, 2827 bp, Artificial Sequence
  derived and/or modified sequence
cggcggcggcgagcgcggctcaggttgatttagaatacgggtgacagtggcctggcgcgagcccactgctgacgaaagcggcttatcccgcgcggtttccatggagacgagccggagccgcggcggcggcggggctgtcagcgagcgcggcggagctggcgcgtccgtgggggtctgcaggaggaaggcggaggccggggccgggaccgggaccctcgcggcagacatggacttgcattgtgactgtgccgccgaaacgccggccgccgagccgccgtcggggaagattaataaagctgccttcaaattattcaagaagaggaaatcgggtggcaccatgcccagcatttttggggtcaaaaacaaaggggacgggaaaagctcgggtccgacggggctggtgaggagcaggacccacgacggacttgccgaggtgctggtgctggagagcggcaggaaggaggagccgcgcggcgggggcgacagcggcgggggcggcggggggcggccgaacccggggccccccagagccgcagggcccggcgggggctccctcgccagcagctcggtggccaagtcgcacagcttcttctcgctgctgaagaagaacgggcgctcggaaaacggcaagggagagcctgtggacgcgagcaaggccggcggcaaacaaaagcgggggctgcgggggctgttcagcggcatgcgctggcacaggaaagacaagcgggccaaggcggaggccgcggaggggcgcgcgcccgggggcggcttgatcctacccggctcgctcaccgccagcctggagtgcgtcaaggaggagacgcccagagccgcgcgcgagccggaggagcccagccaggacgccccgcgagacccagcaggctgtggagatattattgcagaccaagaggaagaggcaggtcccagctgtgacaagcatgtccccgggccaggcaagccggctctgtctaaaaagaaccccggcgtggtggcctaccaaggaggcggggaagagatggccagcccggacgaggtggacgacacctatctacaggagttctgggacatgctctcccagaccgaggagcagggacccgagccccaggagggcgcggctaaggtggcagctgcgctggaaaccaaggtggtgcccgagacccccaaagacaccaggtgtgtggaagcggccaaggacgcgtcctcggtcaagcgcaggaggctcaaccggattcccatcgagccccatcctaaggaggagcccaagcacccggagaaggagcagcaggaaggcgtccccaacagcgacgagggctactgggactccaccacgccaggcccagaggaagacagctcgagcagcgggaagaaggcgggcatcccccgggatagctacagcggggacgcgctctatgatctctatgctgacccggacggaagtccagcaacccttcctggagggaaggacaacgaggagacgtcctccctgtcccggttaaagcccgtatctccaggcaccatcacctgtccactgcgaacaccaggcagcttgctgaaggactctaagatccctattagcatcaagcacctgaccaaccttccatctagccatcccgtggtgcaccagcaaccctccaggagtgagatgcccagaacaaaaatcccggtttccaaagtgctggtccgcagagtcagcaaccggggcttggctgggaccaccatcagagcaacggcctgccacgacagtgccaaaaagttgtgaggtcttccaggccaaggtggatgggccccatgccaaggaatacaacttttccctggaaaccactaaagtaagttttgcttttcctaaagaaagtcttttaggacaccacccgtcccccgccctgctccagagcgtggaccgaggaggtctttgtgccctgagcagggaccggataacaccagaaagagggatgctacacgggggtttctcctctcaagataagtccctgagaattattttcaagcacttttttcttttttacctttaagtttttcttccttttgctttaatatactgaacacttggaagtcacctttacttgcctttgcagaaaacagaacttagccaaacctaagtaagagtcatgcctggatattgggataagccagtgtctagaggcctgaaggaaccgctgaagaaccagaggagatctcctcttccaagacacgtttccttccttcccttctttcctctttcctttccagttaaaaaaaaacaaaaacaaaaacaaaaccctttgctgtatcactgtgtggaaaatacctccaaagctgaaagagccaggtatttacctgatgagcagaggggaccactgattggcagaaaacttccctacgttcagttgttagatatgcaaattgataaggatctaacactaggaaaataaaggcgagttttggtttggttggtttcagtcatttgtttggggagatataaaaggctcaggagagcaggcttttgcttttgcttttgtttgtttcttcccccacccagtgcagaaatcaggatcagggaaagattttattaaatgccaatagatacagtatttaagcatttataaactgaaaccttttcatgtgaagataatgcatattttaccgtttatccagctgttaacattttgtaatcagtcaattcaatagaattattctggataattctatatctagaatataaaatctggtcttatagctagacatgatgatggtccccaaaccattgatgttctgttatgtactgtaatgggaagcgattctgattttgttttatatgggttctctggttctc

SEQ ID NO: 293025 - DNA, 1659 bp, Artificial Sequence
  derived and/or modified sequence
atggagaccagccgcagccggggcggcggcggcgctgtgtctgagcggggcggggccggggcctctgtgggcgtgtgcaggaggaaggccgaggccggggccggcaccggcaccctggccgctgacatggacctgcactgtgactgtgccgctgagaccccagctgctgagccccccagcggcaagatcaacaaggccgccttcaagctgttcaagaagaggaagagcggcggcaccatgcccagcatcttcggcgtgaagaacaagggagatggcaagagcagcggccccaccggcctggtgcgcagcaggacccatgatggcctggccgaggtgctggtgctggagagcggcaggaaggaggagccccggggcggcggggacagcggcggcggcggcggcggccggcccaaccctggcccccccagggctgctggccctgggggcggcagcctggccagcagctctgtggccaagagccacagcttcttcagcctgctgaagaagaatggccgctcagaaaatggaaaaggagagcctgtggatgccagcaaggccggcggcaagcagaagaggggcctgcggggcctcttcagcggcatgcgctggcacaggaaggacaagagggccaaggccgaggccgctgagggccgggcccctgggggcggcctcatcctgcccggcagcctgacagccagcctggagtgtgtgaaggaggagaccccccgggccgcccgggagcctgaggagcccagccaggatgccccccgggaccctgctggctgtggggacatcatcgctgaccaggaggaggaggccggccccagctgtgacaagcacgtgcccggccctgggaagccagccctgagcaagaagaaccctggggtggtggcctaccagggcggcggggaggagatggccagcccagatgaggtggatgacacctacctgcaggagttctgggacatgctgagccagacagaggagcagggccctgagccccaggagggcgccgccaaggtggccgccgccctggagaccaaggtggtgcctgagacccccaaggacacccgctgtgtggaggccgccaaggatgccagctctgtgaagagaagaaggctgaaccgcatccccatcgagccccaccccaaggaggagcccaagcaccctgagaaggagcagcaggagggcgtgcccaacagtgatgagggctactgggacagcaccaccccaggccctgaggaggacagcagcagcagcggcaagaaggccggcatcccccgggacagctacagcggagatgccctgtatgacctgtatgctgaccctgatggcagccctgccaccctgcccggcggcaaggacaatgaggagaccagcagcctgagccggctgaagcctgtgtccccaggcaccatcacctgccccctgcggaccccaggcagcctgctgaaggacagcaagatccccatcagcatcaagcacctgaccaacctgcccagcagccaccctgtggtgcaccagcagcccagccgctctgagatgcccaggaccaagatccctgtgtccaaggtgctggtgcggcgggtgagcaacagaggcctggccggcaccaccatccgggccacagcctgccacgacagcgccaagaagctgtag

SEQ ID NO: 293026 - DNA, 1659 bp, Artificial Sequence
  derived and/or modified sequence
atggagaccagccggagccggggcggcggcggcgccgtgagcgagcgtggtggcgcaggtgcctctgtgggagtttgtagacgtaaagccgaagccggcgccggaacgggcaccctagctgccgacatggatctgcactgtgattgtgctgctgagactccagcagctgaacccccctcaggcaaaattaacaaggcggcgttcaaactcttcaagaagagaaaaagcggcggcaccatgccaagcattttcggtgtgaaaaacaagggcgatggtaagtcttctgggcctactggcctggtgcgcagccgcacccatgatggactggccgaggttctggtgttagagtctggtcggaaagaagagcctcgcggaggaggcgattctgggggtggcggtggtggcagaccgaacccaggacctcctcgcgccgcaggaccgggtggaggaagcctggcctcatcttccgtggcaaaatcacactctttcttttcactcctgaaaaaaaatggtcgatctgagaatggcaaaggggagcccgttgatgcatctaaagccggcgggaagcagaagagaggcttgagaggcctctttagcggcatgaggtggcacagaaaggataaacgtgctaaggcggaggcggcagaggggcgagcacccggcggcggactgatcctgcctggtagcctgaccgcctctctcgagtgtgtcaaggaagaaactccccgagccgccagagagcctgaggaaccaagccaggatgctccccgcgatcctgcggggtgcggcgatatcatcgcagatcaagaggaggaggcagggccctcctgtgataaacacgtccccggccctggaaagccagccctgtccaaaaagaatccaggggtcgttgcataccaggggggcggggaagagatggccagtcctgatgaggtggacgatacttaccttcaagagttctgggatatgcttagtcaaaccgaggagcaggggcccgagccccaagaaggtgccgccaaggtagcagccgctcttgagacgaaggtagtccccgagacacccaaagatacaagatgtgtggaggccgcgaaggacgcatcatctgtgaaaaggcgcaggctgaaccgaatccccatcgagccccaccccaaagaggagccgaagcatccagagaaagagcagcaggaaggcgtgcctaactctgatgaaggctactgggatagtacaacccctgggcctgaggaagacagttcatcgtctggcaagaaggcaggcatccctcgcgattcctacagcggagatgctctttatgacctctacgctgaccccgacgggagccccgctactttaccaggcggaaaagataacgaggagacatcatctctgtcacgtcttaaacctgtttctccaggcacaattacatgtcctctgagaacccccggatccttacttaaggatagcaagattcctattagtattaagcacttgaccaacctccccagttcacaccccgtggtgcaccaacagcccagtagatccgagatgccacgtacaaagatcccggtgtcaaaggtcctggttagacgcgtcagtaatcgcggtttagctggcactacgatccgtgcgaccgcgtgtcatgattctgcaaagaaactatag

SEQ ID NO: 293027 - DNA, 1659 bp, Artificial Sequence
  derived and/or modified sequence
atggagaccagccggagccggggcggcggcggcgccgtgagcgagcgggggggggccggggccagcgtgggagtgtgcagacgtaaggccgaggctggcgccggcactggtactcttgccgccgatatggaccttcattgcgactgtgcggccgagaccccagccgctgaaccaccctcgggtaagataaataaggcagcatttaaactgttcaagaaacgaaaatctggtggcactatgccttcaatcttcggtgttaaaaataagggggatgggaagtctagcggacccacaggcttggtgcggtcacgcacgcacgatgggctggctgaagtccttgtgttggaaagcggtagaaaggaggaaccccgcggaggcggagatagtgggggcggagggggcggtaggcccaaccctgggccaccaagagcagcagggcctggcggaggtagcctcgcctctagtagtgtggccaagtcccatagctttttctcactgctgaagaaaaatggtagaagtgagaatgggaaaggtgagcccgtggatgccagcaaggccggtgggaaacagaaacggggcctgagaggcctgttcagcggcatgagatggcaccgtaaggataaaagggcaaaggccgaggctgcagaaggcagagctcccggcggtggcctgatcctgcccggatcactcactgcatcattggagtgcgtgaaagaggagaccccaagagcagcccgcgaacccgaagagccatcccaggacgcgcctcgggatccagcagggtgcggagatatcatcgccgatcaggaggaggaggcaggcccttcttgcgacaaacatgtccccggtcccggaaagcccgccttgagcaaaaagaatcccggtgtggtcgcctatcagggtggcggcgaggagatggcctcacccgatgaagtggacgatacttacttacaggaattttgggacatgctgagccaaactgaggaacagggaccagagcctcaagagggtgccgcaaaggttgccgccgcactagaaacaaaggttgttcctgagactcccaaggatacaaggtgcgtcgaagcggcaaaagatgcttcctcagttaaaagacgacgcctgaatagaattccaatcgagccccaccccaaggaagaaccgaagcatccagagaaagaacagcaggaaggggtgcccaactcggacgaaggctactgggatagtacaacacccggcccagaggaagattcttcttcaagtggtaaaaaggccggaatcccaagggactcgtacagcggggatgccctttatgatctctatgctgaccccgatggttcgcccgctaccttgccaggcggcaaagacaacgaggagacatcctctctctctcgcctcaaacctgtaagcccaggaaccataacttgcccactcagaaccccaggcagtctgttaaaggactccaaaatacccatttctataaagcacctgacaaacttgccctcttcccaccctgttgtacatcagcagcctagtcggagcgagatgccccgcaccaagataccagtgagtaaggtgctcgtaagacgtgtttctaatagaggactggccggcaccaccattcgggcgacagcttgtcacgattctgccaaaaaactttag

SEQ ID NO: 293028 - DNA, 1659 bp, Artificial Sequence
  derived and/or modified sequence
atggagacttcaaggtcacggggtggagggggagcagtgtccgagagaggaggcgcaggggcttccgtcggcgtgtgccgccgaaaagcagaggccggagctggaacaggcacattggcagcggacatggatctgcattgcgattgcgccgctgagacgccagccgctgagccaccatccggtaaaattaataaggcagccttcaagctgtttaaaaaacggaaatctgggggtactatgcctagtatttttggagtgaagaacaagggagatggcaagtcctcggggcctacgggcttggtgaggtcccgaacccatgatgggctggccgaagtcctcgtgcttgaatctggcaggaaggaggagccacgtgggggtggcgattcgggtgggggaggaggcggtcgcccaaaccctgggcctcctcgtgctgcaggacccggaggcggtagcctggcaagctcctctgttgccaaatctcactcatttttctcactcctgaaaaaaaatggccgatcagaaaatgggaagggagaacctgttgacgcctctaaagcaggcggaaagcagaagcgcggactgaggggtctctttagcggcatgaggtggcatcgcaaagataagagagccaaggcggaggcagctgagggaagagcacccggagggggtttgattctccccggatcactcacagccagtctcgagtgcgtgaaggaggagactccgcgagccgcaagagagccagaggagcccagtcaggatgctcctagagacccagccggatgcggtgatatcatagcagatcaggaggaggaagctggaccgagttgtgataagcatgtccctggccctggaaagcccgcattgtccaagaaaaaccctggcgtggtcgcttaccaaggtggaggggaagagatggcgtcaccagacgaggtggacgatacttacttacaagaattttgggatatgctgagtcagacggaggaacaaggaccagagccccaagagggggcagcaaaggtggctgccgctttagagacaaaggttgtcccagagaccccgaaggatacaagatgtgtcgaagctgcaaaggatgcctctagcgtgaaacggagacgactgaacagaattccaattgagcctcatcctaaagaggagcccaagcatccagaaaaagaacagcaagagggcgtccccaactctgacgaaggatactgggatagtaccacacctgggcctgaggaagattcaagtagctcaggaaaaaaggccggaatcccgagagacagctactcaggcgatgccctatatgacctctacgccgatccagatggaagtcccgctaccttacctggtgggaaagataatgaggaaacctcgagcctgtcgcggttgaagccagtctcccccggaacaatcacttgccctctgcgcactcctggctcacttctcaaggatagcaaaatcccaatttctattaagcatctcactaatcttccttcctcacatcctgttgtccaccagcagccatctagaagtgaaatgcccagaaccaagatccccgtttccaaggtgctggtacggcgtgtgagcaaccgaggtctggcaggcaccaccatcagggctacggcctgccacgactcagcaaagaaactctag

SEQ ID NO: 293029 - DNA, 1659 bp, Artificial Sequence
  derived and/or modified sequence
atggagaccagccgctcccgcggagggggaggcgctgtatccgaacggggaggggcaggcgctagcgtgggcgtgtgtcgtaggaaggccgaagctggggctggcaccggcaccctcgccgctgacatggatctgcactgtgactgcgccgctgagaccccggcagccgagcccccttctggcaagatcaataaggccgctttcaagctatttaaaaagagaaaatcaggaggtaccatgccttcaatttttggagtgaaaaataagggcgacgggaagagtagcggacccacgggattagttcgatctaggacccatgatggcctggcggaggtgctagttctggaatccggacggaaggaggagcctcggggagggggtgacagcggaggaggtggaggcggtagacccaaccccggaccccctagagctgccggtcccggtggcggttccctggccagctccagtgtcgccaagtcccacagcttctttagcttgctaaagaaaaatggaagatccgaaaatggcaagggcgagccagtcgacgcatccaaagccggagggaagcagaaacgtggcctgcggggtttgttttccggcatgaggtggcaccgcaaggacaagcgtgcaaaagcggaagccgctgaggggagagcccctggcggaggcctcatcctccccggatctctgaccgctagcctggagtgtgttaaggaagaaacccccagggccgcaagagaaccggaggaaccgtctcaggacgctccaagggaccccgctggttgcggagacatcatagctgatcaagaagaggaagcaggtcccagctgcgacaaacacgtgcccggtccgggtaaaccggctctaagcaaaaaaaacccgggagttgtggcatatcaaggtggaggtgaagaaatggccagccccgatgaggtagatgacacatatctgcaggagttttgggatatgttatctcagactgaggagcaaggccctgagccgcaggaaggtgcagctaaagtggctgctgccctggaaaccaaggttgttccagagactccgaaggacacccgctgcgtcgaggcggcaaaggatgccagcagcgtcaagcgccgtcggctgaacagaatcccgatcgagccacacccaaaagaagaacctaagcaccctgagaaggagcagcaggagggcgtacccaacagcgatgagggatattgggactccaccacccccggacccgaagaagattctagctccagcggaaaaaaggcaggcattccgagagattcttatagcggagatgccttgtacgacctgtacgctgaccctgacggctcgcctgcaactctccctgggggtaaagacaatgaggagacctcatccctgtcacgacttaagccagtctctcctggtaccatcacctgccccttgaggacccctggttccctcctgaaagacagcaagatcccaattagcatcaagcacttgactaacctcccgtctagccatcccgtcgtacaccaacagccttcaagatctgagatgcccagaacgaagattcccgtcagcaaggtgcttgtgcgcagagtctccaatcgcggactggccggaacaacaattagggccacggcctgtcacgactccgctaagaagctgtag

SEQ ID NO: 293030 - protein, 513 aa, Artificial Sequence
  derived and/or modified sequence
MQEQDMPFLRGGPGMYKVVKTGPSGHNIRSCPNLRGIPIGMLVLGNKVKAVGEVTNSEGTWVQLDQNSMVEFCESDEGEAWSLARDRGGNQYLRHEDEQALLDQNSQTPPPSPFSVQAFNKGASCSAQGFDYGLGNSKVLTVLPTAGDQLSAILNSIQSRPNLPAPSIFDQAAKPPSSLVHSPFVFGQPLSFQQPQLQSDRGNISTSSKPASTSGKSELSSKHSRSLKPDGRMSRTTADQKKPRGTESLSASESLILKSDAAKLRSDSHSRSLSPNHNTLQTLKSDGRMPSSSRAESPGPGSRLSSPKPKTLPANRSSPSGASSPRSSSPHDKNLPQKSTAPVKTKLDPPRERSKSDSYTLDPDTLRKKKMPLTEPLRGRSTSPKPKSVPKDSTDSPGSENRAPSPHVVQENLHSEVVEVCTSSTLKTNSLTDSTCDDSSEFKSVDEGSNKVHFSIGKAPLKDEQEMRASPKISRKCANRHTRPKRKIEFSFQRRWIQAFRASQASHVSFCGR

SEQ ID NO: 293031 - DNA, 1542 bp, Artificial Sequence
  derived and/or modified sequence
atgcaggagcaggacatgcccttcctgagaggcggccccggcatgtacaaggtggtgaagaccggccccagcggccacaacatcagaagctgccccaacctgagaggcatccccatcggcatgctggtgctgggcaacaaggtgaaggccgtgggcgaggtgaccaacagcgagggcacctgggtgcagctggaccagaacagcatggtggagttctgcgagagcgacgagggcgaggcctggagcctggccagagacagaggcggcaaccagtacctgagacacgaggacgagcaggccctgctggaccagaacagccagacccccccccccagccccttcagcgtgcaggccttcaacaagggcgccagctgcagcgcccagggcttcgactacggcctgggcaacagcaaggtgctgaccgtgctgcccaccgccggcgaccagctgagcgccatcctgaacagcatccagagcagacccaacctgcccgcccccagcatcttcgaccaggccgccaagccccccagcagcctggtgcacagccccttcgtgttcggccagcccctgagcttccagcagccccagctgcagagcgacagaggcaacatcagcaccagcagcaagcccgccagcaccagcggcaagagcgagctgagcagcaagcacagcagaagcctgaagcccgacggcagaatgagcagaaccaccgccgaccagaagaagcccagaggcaccgagagcctgagcgccagcgagagcctgatcctgaagagcgacgccgccaagctgagaagcgacagccacagcagaagcctgagccccaaccacaacaccctgcagaccctgaagagcgacggcagaatgcccagcagcagcagagccgagagccccggccccggcagcagactgagcagccccaagcccaagaccctgcccgccaacagaagcagccccagcggcgccagcagccccagaagcagcagcccccacgacaagaacctgccccagaagagcaccgcccccgtgaagaccaagctggacccccccagagagagaagcaagagcgacagctacaccctggaccccgacaccctgagaaagaagaagatgcccctgaccgagcccctgagaggcagaagcaccagccccaagcccaagagcgtgcccaaggacagcaccgacagccccggcagcgagaacagagcccccagcccccacgtggtgcaggagaacctgcacagcgaggtggtggaggtgtgcaccagcagcaccctgaagaccaacagcctgaccgacagcacctgcgacgacagcagcgagttcaagagcgtggacgagggcagcaacaaggtgcacttcagcatcggcaaggcccccctgaaggacgagcaggagatgagagccagccccaagatcagcagaaagtgcgccaacagacacaccagacccaagagaaagatcgagttcagcttccagagaagatggatccaggccttcagagccagccaggccagccacgtgagcttctgcggcagatag

SEQ ID NO: 293032 - DNA, 1542 bp, Artificial Sequence
  derived and/or modified sequence
atgcaggagcaggacatgccttttctgagaggagggcccgggatgtacaaggttgtgaagacaggtccctcaggccataatataaggtcctgcccgaacttgcgtggaatccctatcggcatgctcgtattgggcaacaaggtgaaagctgtgggagaggtgacaaattcagagggcacatgggtgcagctggatcagaacagcatggtcgagttctgcgaatctgatgagggcgaggcatggtcactcgccagagaccgcggcgggaaccagtacttacgtcatgaggacgagcaagctcttcttgatcagaatagtcaaactccccctccatccccatttagtgttcaggccttcaacaagggcgcatcatgctccgcgcagggtttcgactacggactcggtaattctaaagtgctgaccgtgctccccacggccggagaccaactgtcagcgattcttaattccatccagtccagaccaaatctgccagccccctcaatctttgaccaagccgcaaaacccccatcaagtctcgttcactctccgttcgtgtttggtcaacccctgagcttccagcaaccccagcttcagagtgatagaggtaatatttccactagcagcaaacccgcaagtacatctgggaagtcagaactatcctcaaaacacagtaggagtctgaaacctgacgggcgcatgagcagaactacagcagatcagaagaagccccggggaacagagtctctgtcagcaagcgagagcctgatccttaaatccgatgccgctaagttgcgctccgattcacacagtcgaagcctgtcccccaaccacaacactcttcagaccttaaagtctgatggccgcatgcctagctcctcacgagccgagtctcctggtcccggatcgcggctgtcgagccccaagccaaagaccctgcctgccaatcgctcttctccctcaggcgcttcctctcccagaagtagtagccctcatgacaagaaccttccccaaaaaagcacagcaccagtaaaaacgaaacttgatcctccaagagaacgctcaaaatctgattcctatactctggatccagacactctccggaaaaagaaaatgcccttaacagagcctctaagggggagaagcacgtctcccaaaccaaaaagcgtacccaaggattccaccgacagcccgggaagcgagaatcgtgcacccagtccccacgtggttcaggaaaaccttcactccgaggttgtcgaggtgtgtacctcaagcacactgaaaactaattctctgaccgacagcacgtgcgatgacagcagcgaattcaagtctgtcgatgagggtagcaataaggtgcacttcagtataggtaaggcccctctgaaagacgagcaggaaatgagggctagccctaagataagtcgcaaatgcgccaaccgacatacaaggcccaagcgcaaaatcgaattctcatttcagaggagatggatccaggcatttagagcaagtcaggctagccatgtgagcttttgtggtcggtag

SEQ ID NO: 293033 - DNA, 1542 bp, Artificial Sequence
  derived and/or modified sequence
atgcaggagcaggacatgcccttcctgcggggcggccctggcatgtacaaggtggtgaagacaggccccagcggccacaacatccgcagctgccccaacctgcggggcatccccatcggcatgctggtgctgggcaacaaggtgaaggctgtgggggaggtgaccaacagcgagggcacctgggtgcagctggaccagaacagcatggtggagttctgtgagagtgatgaaggagaggcctggagcctggcccgggaccggggcggcaaccagtacctgcggcatgaagatgagcaggccctgctggaccagaacagccagaccccaccacccagccccttctctgtgcaggccttcaacaagggggccagctgcagcgcccagggctttgattatggcctgggcaacagcaaggtgctgactgtgctgcccacagctggggaccagctgagcgccatcctgaacagcatccagagccggcccaacctgcctgcccccagcatctttgaccaggccgccaagccacccagcagcctggtgcacagcccctttgtgtttggccagcccctgtccttccagcagccccagctgcagagcgaccggggcaacatcagcaccagcagcaagccagccagcaccagcggcaagtctgagctgagcagcaagcacagccgcagcctgaagccagatggccgcatgagcaggaccacagctgaccagaagaagccccggggcacagagagcctgagcgccagcgagagcctcatcctgaagagtgatgctgccaagctgcggagtgacagccacagccgcagcctgagccccaaccacaacaccctgcagaccctgaagagtgatggccgcatgcccagcagcagcagagctgagagccctggccctggcagccggctgagcagccccaagcccaagaccctgcctgccaacagaagcagccccagcggggccagcagccccaggagcagcagcccccatgacaagaacctgccccagaagagcacagcccctgtgaagaccaagctggaccccccccgggagaggagcaagagtgacagctacaccctggaccctgacaccctgaggaagaagaagatgcccctgacagagcccctgcggggccgcagcaccagccccaagcccaagtctgtgcccaaggacagcacagacagccctggcagcgagaacagagcccccagcccccacgtggtgcaggagaacctgcacagcgaggtggtggaggtgtgcaccagcagcaccctgaagaccaacagcctgacagacagcacctgtgatgacagcagcgagttcaagtctgtggatgagggcagcaacaaggtgcacttcagcatcggcaaggcccccctgaaggatgagcaggagatgagggccagccccaagatcagcaggaaatgtgccaacagacacacccggcccaagaggaagattgagttctccttccagaggcgctggatccaggccttccgggccagccaggccagccacgtgtccttctgtggccgctag

SEQ ID NO: 293034 - DNA, 1542 bp, Artificial Sequence
  derived and/or modified sequence
atgcaggagcaggacatgcccttcctgcggggcggccccggcatgtataaggttgtgaaaacaggcccgtctggccacaatatcagatcctgtcctaacctcagaggcatccctatcggaatgctggtgctcggcaacaaggtgaaggccgtaggagaggtcactaattcagaggggacttgggtgcagctggatcagaactctatggtggagttttgcgagagtgacgagggagaggcttggagccttgccagagacaggggcggtaaccagtatctgcgccatgaagatgagcaggcactgctggaccaaaacagccagacaccacctccctctcctttttcagtccaggctttcaataagggggctagttgctcagcccagggcttcgactacggtctggggaactctaaggttctgacagttctgcccactgcaggtgaccagctcagcgcaattctgaacagcatccaaagtcgccctaacctgcccgcaccaagcattttcgaccaagccgcaaaaccaccaagttccttggttcactctcctttcgttttcggccagcctctcagtttccagcaaccacagctgcaatctgacagaggtaacatcagcacgagctcaaagcctgcctctacctctggcaaatccgagctgtcaagcaagcacagcagaagtcttaagccagacggcagaatgtcacgaaccactgctgaccagaagaaaccgcgcggcacagagtcactaagcgcgtctgagtctctgatactgaagagcgacgctgcaaaactgcggtcagactcgcactcccgatcgttgagccccaaccacaataccctccaaacgctgaagtctgacgggagaatgccctcctcaagccgggcagaatctccaggcccgggaagcagattgagcagtcctaagccgaagaccctgcctgctaataggtcatctccaagtggcgccagcagccccagatccagcagccctcatgataagaatctccctcagaaaagcaccgcccccgtgaagacaaaactggacccgcctcgcgaaaggtccaagtctgatagctacacactcgaccccgacactctgcgcaaaaagaagatgcccttaaccgagccactgcgggggagatctacatcaccaaagccaaagagcgtgcctaaagacagcaccgattcccccggcagtgagaatagggcaccaagcccgcacgttgtccaggagaatctccattctgaagtggtggaggtttgcacaagcagcacactgaaaaccaacagtctgaccgatagtacgtgtgatgacagctctgaattcaaatcagttgacgagggcagcaacaaagtccatttttccatcggaaaggccccccttaaggacgagcaggaaatgagggcaagccctaaaattagtcggaaatgtgctaacagacatactagaccaaaacgcaagatagagttttccttccagagaaggtggatccaagcctttcgcgccagccaggcctcgcacgtgtccttttgtgggaggtag

SEQ ID NO: 293035 - DNA, 9243 bp, Artificial Sequence
  derived and/or modified sequence
ggcggcggcagtggcggcaccgcctcctcctcacattcccggggtggcggggttagatgagcggccccagtagcggcgccgggggcgctgttcatgccggttcccgacggctccgtggctgctgcggggctggggctggggctacccgccgcggactcccggggtcactaccagctgctgctgtcaggccgggccctggccgaccgctaccggaggatttataccgctgcgctcaatgacagggaccaggggggcggcagcgctggacacccagcctccaggaataagaaaattttaaataagaagaaattgaaaagaaaacagaagagcaaatcaaaagtgaagacaagaagcaagtctgaaaacttagagaatacagtaatcataccagatatcaaactacatagcaatccttctgctttcaatatttactgtaatgtacgccattgcgttctggaatggcagaaaaaggaaatatcattggcagccgcatctaagaactctgtgcagagtggagaatcagatagtgatgaagaagaggaatccaaagagccccctatcaagcttccaaagattattgaggttggcctttgtgaagtttttgaattgatcaaagagacacgattttctcatccatccctgtgtctcaggagtctccaagccctgctcaacgtgctgcagggccagcagccagaaggcctccagtctgagccacctgaggtcctagagtctctcttccagcttcttttggaaatcaccgttcgaagtactgggatgaatgacagcacaggacagtccttaacagcactttcctgtgcttgcctctttagtctggtggcttcttggggagaaacaggaaggacacttcaggccatctctgctatcctcaccaacaatggaagccatgcttgccaaactattcaggtgccaacaattctaaattcgctacagagaagtgtacaagcagttttggtgggaaaaattcaaattcaggactggtttagtaatggcattaagaaagcagctttaatgcacaagtggccattaaaagaaatatctgttgatgaagatgaccaatgtctacttcagaatgatggattttttctttatctattatgcaaggatggattatataaaataggctctggatacagtggaacagttaggggccatatatacaattctacatcccgtattagaaacagaaaagaaaaaaagtcttggttagggtatgctcagggttatttattatatagagatgtgaataaccacagcatgacagccataaggataagccctgaaacactggagcaagatggtactgtgatgttaccagattgccacactgaaggtcaaaatattttattcactgatggagaatatattaatcagatagctgcttcaagagatgatggctttgttgtcagaatatttgccacaagcactgaacctgttctacagcaagaattgcaacttaaactggctagaaaatgcttacatgcctgtggtatctcactattcgatctggaaaaggacttgcatattataagtacaggatttgatgaggagtcagcaattcttggtgcaggacgagagtttgcgctaatgaaaacagcaaatggaaagatatattacactggcaaataccagagtcttggaatcaaacaaggtggtccttcagcaggaaaatgggttgagctaccaattacaaaatctccaaagatagtacacttctcagttggacacgatggctctcacgcccttttagttgcagaagatgggagcatattctttacaggatctgctagtaaaggagaagatggagaatcaactaagagcagacggcaatccaaaccttataaacctaaaaagataattaagatggaaggaaagattgtggtatatacagcctgcaataatggaagtagttctgttatttctaaagatggagaactctacatgtttggaaaagatgccatttactctgatagttcaagtttggtaactgatttgaagggccattttgtaactcaggtagctatgggcaaagctcacacttgtgttttaatgaagaatggagaggtgtggacatttggtgtaaataataaaggacagtgtggacgagatactggtgccatgaaccaaggtgggaaagggtttggagttgaaaatatggcaacagcaatggatgaagacctggaagaagaactagatgaaaaagatgagaagtctatgatgtgccctccaggcatgcacaaatggaagctggagcagtgcatggtttgcactgtctgtggagactgtacaggttatggagccagctgtgtcagtagtggacggccagacagagtccccggagggatctgtggttgtggttccggagaatctggttgtgctgtgtgtggatgttgcaaggcctgtgcaagagagttagatggtcaagaggcaagacaaagaggaattcttgatgcagtgaaagaaatgatacctttagatcttcttttagctgtcccagtgcccggggttaacattgaagaacaccttcagttacgacaagaagaaaaacggcaacgtgtaatcagaaggcacagattagaggaaggaagaggcccccttgtatttgctggtcctatttttatgaaccatcgagaacaggctctagccagactcagatcccatccagcacagctaaagcataaacgggacaagcacaaagatggaagtggagaaagaggcgaaaaggatgcaagcaaaatcacaacataccctccaggctctgtgcgatttgactgtgagctccgggcagtccaagtcagctgtggatttcaccattcagtggttttaatggaaaatggagatgtctatacatttggttatgggcagcatgggcagctaggacatggagatgtcaactccaggggatgtcccactcttgttcaagcattgccaggccctagcacacaagtcactgcaggcagcaaccatacggcagtacttttaatggatggacaggtcttcacatttggaagtttttctaaaggacaactgggcagaccaattttggatgtgccatattggaatgcaaagccagctcccatgcctaacattggatcaaaatatggaagaaaagctacttggataggtgcaagtggggaccaaacttttttacgaattgatgaagcacttattaattctcatgtacttgctacatcagaaatttttgccagtaaacacataataggcttggtacctgcttctatatcagaacctcctccatttaaatgccttctgataaataaagtggatgggagttgtaaaacttttaatgactcagaacaagaggatctgcaaggatttggtgtgtgtcttgatcctgtatatgatgtaatttggaggtttcgaccaaatactagagagctgtggtgttacaatgcggtggttgctgatgccaggcttccctctgcagcagacatgcagtccagatgtagtatcctaagtcctgaacttgccttaccaacaggatcaagggccctcactacccgatctcatgcagctttgcacattttaggttgtcttgataccttggcagctatgcaggacttaaaaatgggtgttgcaagtacagaggaagagactcaagcagtaatgaaggtttattctaaagaagattatagtgtggtaaacaggtttgaaagtcatggaggaggctggggttattctgcccattcagtagaagctatacgtttcagtgccgacactgatattttacttggtggtcttggtctgtttggaggtagaggagaatatactgctaaaattaagctgtttgaattgggtcctgatggaggagatcatgaaactgatggtgaccttcttgcagagactgatgtattggcttatgactgtgctgctagagaaaaatatgcaatgatgtttgatgagcctgttctcctgcaagctgggtggtggtatgtggcatgggcccgagtgtcaggacccagcagtgactgtggatctcatggacaggcatctattaccacagatgatggggttgttttccagttcaagagttcaaagaaatcaaataatggtacagatgttaatgcgggtcagatacctcagttattatacagacttccaaccagtgatggcagtgcttcaaaaggcaaacagcaaaccagtgaacctgtacacattttaaagaggtcttttgcaagaactgtctcagtggaatgttttgagtcattgttgagtattcttcactggagctggaccaccttagtcttaggagttgaagaacttagaggattaaaaggattccagttcacagctacactcctagatttagagagactgcgctttgtgggtacctgttgtctgaggttattgcgtgtctatacctgtgaaatttacccagtgtcagctacaggaaaagcagttgtagaagaaactagcaaattagcagagtgtattggaaaaaccagaactttgttaagaaaaattttatcagaaggagttgatcactgcatggtgaaattggataatgatcctcaaggatatctcagtcaacccttgagtcttctagaagctgtccttcaggaatgtcataatactttcactgcctgctttcattctttctacccaactcctgccttacagtgggcttgcctttgtgatctgctgaattgtttggatcaggatatccaagaagcaaacttcaagacatcaagtagccgactccttgcagctgttatgtcagctctgtgtcacacgtctgttaagctgacttccatcttcccgattgcgtatgatggagaagtattactacgatcaattgttaaacaagttagtacagagaacgactcaacactagttcatcgttttccccttttggtggcacatatggaaaaactcagccagagtgaagagaatatctcagggatgacaagcttccgtgaagttctggagaaaatgctggtcattgttgtgctaccagtcaggaacagcctgaggagagaaaatgaactcttctcctcccacctcgtctctaacacctgtggattactggccagcattgtcagtgaactgacagcgtcagccctgggatctgaggttgatggacttaattctcttcactctgtaaaagctagtgctaaccgatttacaaaaacaagtcagggcagaagttggaacactgggaacgggtcccctgatgcaatctgtttttcagtagacaaacctggaatagttgtggttggtttctctgtctatggaggaggtggaattcatgaatatgaattagaggtgttggttgatgatagtgaacatgcaggagattcaactcattcccacagatggacatctctggaattagtgaaaggaacgtacacaacggatgactcacccagtgatatagctgagatcagacttgacaaagtggttcctttaaaggaaaatgttaaatatgctgtgcgcttgaggaactatggaagccgtacagccaatggagatggaggaatgaccacagttcagtgccctgatggtgtgacattcacattcagcacgtgcagcttgagcagtaacggcacaaaccaaaccagaggacagatcccacagatactctactataggagtgaatttgatggagatttacaatcccaacttctgagtaaagccaatgaagaagataaaaactgtagcagagcattgtctgttgtaagcactgtcgttcgagcctctaaggacctcctgcacagagctcttgctgtggatgctgatgacattccagaactgctgagttcttccagtctgttttccatgctgctcccccttattatagcctacataggaccagtagctgctgctattcccaaggtggctgtagaagtctttggccttgtccaacaattgcttccgtcagttgccattttgaatcagaagtatgcaccgcctgccttcaaccctaatcagtcgacagatagcaccacaggaaaccagcctgaacagggcctctctgcttgtacaacctccagtcactatgctgtcatagagagtgagcacccgtataaacctgcctgtgtgatgcattacaaggtgacattcccagaatgtgtgaggtggatgacaatcgaatttgaccctcagtgtggtactgcacagtcagaagatgtccttcgtttgttgattcctgtcagaactgttcagaattcaggatatggaccaaaattgacatctgttcatgaaaatcttaattcatggatagaattaaagaaattttcaggatcctctgggtggcctactatggttttggtgttgccaggaaatgaggcccttttttcattggagactgcatcagattatgtgaaagatgacaaagcttctttctatggttttaagtgttttgcaattggatatgaatttagccctggacctgatgagggagtcatccaattggaaaaagaattagccaatcttggtggggtttgtgcagcagctctgatgaagaaggacctagcacttcctattggtaatgaattagaagaagaccttgaaattcttgaggaggctgcattgcaggtgtgcaaaacccattctggaattcttggaaagggtctagctctttctcattcaccaactatattagaagcacttgagggaaatttaccactccaaatccaaagcaatgaacagtcttttctggatgattttattgcctgtgtcccaggatcaagtggtggaaggcttgcaaggtggcttcagccagattcatatgcggatcctcagaaaacatctttgatcctgaataaggatgatattcgttgtggttggcctaccaccataactgttcaaacaaaagaccagtatggggatgtggtacatgttcccaatatgaaggtggaagtgaaagctgtccctgtttctcagaaaaaaatgtctttacaacaagatcaagcaaagaaacctcaaaggattcctggcagtcctgcagtaacagctgcatcttctaatactgacatgacttatggagggctggcatcaccaaagctagatgtttcatatgaaccaatgatagtgaaggaagctcgatatattgccataacaatgatgaaggtttatgaaaattattcatttgaagaactacgttttgcatcaccaactcctaagagacccagtgagaatatgctgatccgtgtcaataatgatgggacttattgtgcaaattggactccaggggctattggactctacactcttcatgttaccattgatggcattgaaatcgatgctggtctggaagtaaaagtaaaagacccaccaaaagggatgataccaccaggaactcagttggtcaaaccaaagtctgaacctcagcctaataaggttcgaaaatttgtggccaaggacagtgcggggcttcgcatccgtagccacccttcccttcagagtgagcagataggcatagtgaaagtcaatggaactatcacttttattgatgagatccataatgatgatggtgtgtggctgaggctgaatgatgagacaataaagaagtatgtccctaacatgaatggttacactgaagcctggtgcctctcttttaatcaacatcttggcaagagtcttctggtccctgttgacgaatctaaaactaatactgatgactttttcaaagacataaactcctgctgcccacaggaagcaacaatgcaagaacaagatatgccattcttgcgaggagggccaggcatgtacaaggtagtgaagacgggaccttcaggtcacaacatcagaagctgccctaaccttagaggtatcccaattggaatgttagttctgggaaacaaagtcaaagcagtgggagaggtaaccaattctgaagggacatgggtgcaactggatcagaacagcatggtagagttctgtgagagtgatgaaggagaggcatggtccttagctagagacagaggcggaaaccagtacctccgacatgaagatgaacaagctcttctggatcagaattctcaaactcctcctccaagccctttctcagtgcaagcttttaataaaggggcaagttgcagtgcccaaggatttgattatggactcggaaatagcaaagttttgactgttttacccactgcaggtgaccaactgagtgccatattgaattccattcagtcacgacccaatctcccagctccttccatctttgatcaagctgcaaaacctccctcttccctagtacacagcccatttgtgttcggacagcccctttccttccagcagcctcagcttcagagtgatcgaggaaacatctcaacatcttctaaaccagcctctacatcaggaaaatcagagctgtcctctaaacacagcagatcgcttaaacctgatggacgtatgagccggactactgctgatcagaagaagccaaggggcacagaaagtttatctgctagtgaatccctcatcttaaaatctgatgctgcaaagttgaggtcagattcccacagtaggtcattatcccccaaccataacaccttgcagacattgaaatctgatgggaggatgccttctagctccagagctgaatccccaggaccaggttctcggttgtcatctcctaagccaaagactctcccagccaataggtctagcccatcgggtgctagttctccacgctcctcctcaccacatgataaaaatctacctcaaaaaagtactgctcctgttaagacaaagcttgatcctcctcgggaacgttctaaatcagactcttacacacttgatccagataccctccgcaagaagaaaatgcccctcacagaacctttgagaggacggtcaacgtcaccaaaaccaaaatcagtaccaaaggattctacagattcccctggatctgaaaatagagctccctctccccatgtggtacaggaaaacctccacagtgaggtggtcgaagtctgcacctcaagtactttaaaaacaaatagtctaacagacagcacctgcgatgacagcagtgaatttaagagtgtggatgaaggttcaaataaagttcattttagcattggaaaagcaccactgaaagatgaacaggaaatgagagcatctcccaaaataagtcgaaaatgtgctaatagacacaccaggcccaaaagaaaaatcgagttttcttttcaaaggagatggatccaagcctttagagccagccaagcaagccatgtctccttctgtggccga

SEQ ID NO: 293036 - DNA, 1542 bp, Artificial Sequence
  derived and/or modified sequence
atgcaggagcaggatatgcccttcttgcggggagggccagggatgtacaaggtagtaaagaccggcccttccggccacaatatccgcagttgtcctaatctaagagggatcccaatagggatgctggttctaggtaacaaagtcaaagccgtcggagaggtgaccaactcggaaggcacctgggtccagctggaccagaattccatggtggaattttgcgagtctgacgagggagaggcctggagcctggctagagatagggggggtaaccagtacctgaggcacgaggacgaacaagctttacttgatcagaattcacaaaccccgcctccctctccattcagcgtccaggcatttaataaaggggcatcctgtagcgctcagggctttgattatggcttgggaaactccaaggtactcactgtgctgcctacagccggagaccaactaagcgcaatcctgaatagtattcagtcaaggcctaacctgccagctccctccatcttcgatcaggcagcaaaaccccctagctcgctagtccatagtccatttgtgttcgggcagccacttagcttccagcaacctcagctgcagtcggatcgtgggaacataagtacaagcagtaaacccgcaagtacttctggaaaaagtgagctaagcagtaaacatagtcggtctcttaaacctgacggcagaatgtcacgaacaaccgctgatcagaagaagcctagaggaacagagtccttgagtgcttcagaatccctgattctgaagtcagacgccgctaagttgagatccgacagccattctcgatctctgagcccaaatcacaatacgctgcagacactcaaatccgatggccgaatgccaagcagctctcgcgcagagtcccccggtccaggctctcggctttcgtctccgaagcctaaaactcttccagccaatcgctcttcccccagtggggcttcctctccacgcagtagctcaccccacgacaaaaatctcccgcagaaatcgacagcgccagtgaaaaccaaactcgaccctccgcgtgagaggtctaaatcagatagctacaccctggacccagacacccttagaaagaaaaaaatgccactgacagaaccactcaggggcagaagtaccagcccaaaacccaagtccgtacctaaggactccacggactcccctgggagtgaaaatcgagcccctagtccacatgtcgtgcaggaaaatctgcacagcgaggttgtagaagtgtgtacgtccagtacactcaagactaactcactcacggactccacatgtgatgactcaagcgaatttaagtcagtagatgagggatccaacaaagtccatttctctattggtaaggctccactgaaagacgagcaggaaatgcgcgcaagccccaagatttcacgaaagtgcgccaacagacacactagacccaagcggaagatcgagttttcgttccagcgcaggtggattcaggcattcagagcatcccaggcttctcatgtgagcttctgcggtagatag

SEQ ID NO: 293037 - protein, 2943 aa, Artificial Sequence
  derived and/or modified sequence
MASEKPGPGPGLEPQPVGLIAVGAAGGGGGGSGGGGTGGSGMGELRGASGSGSVMLPAGMINPSVPIRNIRMKFAVLIGLIQVGEVSNRDIVETVLNLLVGGEFDLEMNFIIQDAESITCMTELLEHCDVTCQAEIWSMFTAILRKSVRNLQTSTEVGLIEQVLLKMSAVDDMIADLLVDMLGVLASYSITVKELKLLFSMLRGESGIWPRHAVKLLSVLNQMPQRHGPDTFFNFPGCSAAAIALPPIAKWPYQNGFTLNTWFRMDPLNNINVDKDKPYLYCFRTSKGVGYSAHFVGNCLIVTSLKSKGKGFQHCVKYDFQPRKWYMISIVHIYNRWRNSEIRCYVNGQLVSYGDMAWHVNTNDSYDKCFLGSSETADANRVFCGQLGAVYVFSEALNPAQIFAIHQLGPGYKSTFKFKSESDIHLAEHHKQVLYDGKLASSIAFTYNAKATDAQLCLESSPKENASIFVHSPHALMLQDVKAIVTHSIHSAIHSIGGIQVLFPLFAQLDNRQLNDSQVETTVCATLLAFLVELLKSSVAMQEQMLGGKGFLVIGYLLEKSSRVHITRAVLEQFLSFAKYLDGLSHGAPLLKQLCDHILFNPAIWIHTPAKVQLSLYTYLSAEFIGTATIYTTIRRVGTVLQLMHTLKYYYWVINPADSSGITPKGLDGPRPSQKEIISLRAFMLLFLKQLILKDRGVKEDELQSILNYLLTMHEDENIHDVLQLLVALMSEHPASMIPAFDQRNGIRVIYKLLASKSESIWVQALKVLGYFLKHLGHKRKVEIMHTHSLFTLLGERLMLHTNTVTVTTYNTLYEILTEQVCTQVVHKPHPEPDSTVKIQNPMILKVVATLLKNSTPSAELMEVRRLFLSDMIKLFSNSRENRRCLLQCSVWQDWMFSLGYINPKNSEEQKITEMVYNIFRILLYHAIKYEWGGWRVWVDTLSIAHSKVTYEAHKEYLAKMYEEYQRQEEENIKKGKKGNVSTISGLSSQTTGAKGGMEIREIEDLSQSQSPESETDYPVSTDTRDLLMSTKVSDDILGNSDRPGSGVHVEVHDLLVDIKAEKVEATEVKLDDMDLSPETLVGGENGALVEVESLLDNVYSAAVEKLQNNVHGSVGIIKKNEEKDNGPLITLADEKEDLPNSSTSFLFDKIPKQEEKLLPELSSNHIIPNIQDTQVHLGVSDDLGLLAHMTGSVDLTCTSSIIEEKEFKIHTTSDGMSSISERDLASSTKGLEYAEMTATTLETESSSSKIVPNIDAGSIISDTERSDDGKESGKEIRKIQTTTTTQAVQGRSITQQDRDLRVDLGFRGMPMTEEQRRQFSPGPRTTMFRIPEFKWSPMHQRLLTDLLFALETDVHVWRSHSTKSVMDFVNSNENIIFVHNTIHLISQMVDNIIIACGGILPLLSAATSPTTELENIEVTQGMSAETAVTFLSRLMAMVDVLVFASSLNFSEIEAEKNMSSGGLMRQCLRLVCCVAVRNCLECRQRQRDRGNKSSHGSSKPQEVPQSVTATAASKTPLENVPGNLSPIKDPDRLLQDVDINRLRAVVFRDVDDSKQAQFLALAVVYFISVLMVSKYRDILEPQRETTRTGSQPGRNIRQEINSPTSTVVVIPSIPHPSLNHGFLAKLIPEQSFGHSFYKETPAAFPDTIKEKETPTPGEDIQVESSIPHTDSGIGEEQVASILNGAELETSTGPDAMSELLSTLSSEVKKSQESLTENPSETLKPATSISSISQTKGINVKEILKSLVAAPVEIAECGPEPIPYPDPALKRETQAILPMQFHSFDRSVVVPVKKPPPGSLAVTTVGATTAGSGLPTGSTSNIFAATGATPKSMINTTGAVDSGSSSSSSSSSFVNGATSKNLPAVQTVAPMPEDSAENMSITAKLERALEKVAPLLREIFVDFAPFLSRTLLGSHGQELLIEGLVCMKSSTSVVELVMLLCSQEWQNSIQKNAGLAFIELINEGRLLCHAMKDHIVRVANEAEFILNRQRAEDVHKHAEFESQCAQYAADRREEEKMCDHLISAAKHRDHVTANQLKQKILNILTNKHGAWGAVSHSQLHDFWRLDYWEDDLRRRRRFVRNAFGSTHAEALLKAAIEYGTEEDVVKSKKTFRSQAIVNQNAETELMLEGDDDAVSLLQEKEIDNLAGPVVLSTPAQLIAPVVVAKGTLSITTTEIYFEVDEDDSAFKKIDTKVLAYTEGLHGKWMFSEIRAVFSRRYLLQNTALEVFMANRTSVMFNFPDQATVKKVVYSLPRVGVGTSYGLPQARRISLATPRQLYKSSNMTQRWQRREISNFEYLMFLNTIAGRTYNDLNQYPVFPWVLTNYESEELDLTLPGNFRDLSKPIGALNPKRAVFYAERYETWEDDQSPPYHYNTHYSTATSTLSWLVRIEPFTTFFLNANDGKFDHPDRTFSSVARSWRTSQRDTSDVKELIPEFYYLPEMFVNSNGYNLGVREDEVVVNDVDLPPWAKKPEDFVRINRMALESEFVSCQLHQWIDLIFGYKQRGPEAVRALNVFHYLTYEGSVNLDSITDPVLREAMEAQIQNFGQTPSQLLIEPHPPRSSAMHLCFLPQSPLMFKDQMQQDVIMVLKFPSNSPVTHVAANTLPHLTIPAVVTVTCSRLFAVNRWHNTVGLRGAPGYSLDQAHHLPIEMDPLIANNSGVNKRQITDLVDQSIQINAHCFVVTADNRYILICGFWDKSFRVYSTETGKLTQIVFGHWDVVTCLARSESYIGGDCYIVSGSRDATLLLWYWSGRHHIIGDNPNSSDYPAPRAVLTGHDHEVVCVSVCAELGLVISGAKEGPCLVHTITGDLLRALEGPENCLFPRLISVSSEGHCIIYYERGRFSNFSINGKLLAQMEINDSTRAILLSSDGQNLVTGGDNGVVEVWQACDFKQLYIYPGCDAGIRAMDLSHDQRTLITGMASGSIVAFNIDFNRWHYEHQNRY

SEQ ID NO: 293038 - protein, 1575 aa, Artificial Sequence
  derived and/or modified sequence
MHQRLLTDLLFALETDVHVWRSHSTKSVMDFVNSNENIIFVHNTIHLISQMVDNIIIACGGILPLLSAATSPTTELENIEVTQGMSAETAVTFLSRLMAMVDVLVFASSLNFSEIEAEKNMSSGGLMRQCLRLVCCVAVRNCLECRQRQRDRGNKSSHGSSKPQEVPQSVTATAASKTPLENVPGNLSPIKDPDRLLQDVDINRLRAVVFRDVDDSKQAQFLALAVVYFISVLMVSKYRDILEPQRETTRTGSQPGRNIRQEINSPTSTETPAAFPDTIKEKETPTPGEDIQVESSIPHTDSGIGEEQVASILNGAELETSTGPDAMSELLSTLSSEVKKSQESLTENPSETLKPATSISSISQTKGINVKEILKSLVAAPVEIAECGPEPIPYPDPALKRETQAILPMQFHSFDRSVVVPVKKPPPGSLAVTTVGATTAGSGLPTGSTSNIFAATGATPKSMINTTGAVDSGSSSSSSSSSFVNGATSKNLPAVQTVAPMPEDSAENMSITAKLERALEKVAPLLREIFVDFAPFLSRTLLGSHGQELLIEGLVCMKSSTSVVELVMLLCSQEWQNSIQKNAGLAFIELINEGRLLCHAMKDHIVRVANEAEFILNRQRAEDVHKHAEFESQCAQYAADRREEEKMCDHLISAAKHRDHVTANQLKQKILNILTNKHGAWGAVSHSQLHDFWRLDYWEDDLRRRRRFVRNAFGSTHAEALLKAAIEYGTEEDVVKSKKTFRSQAIVNQNAETELMLEGDDDAVSLLQEKEIDNLAGPVVLSTPAQLIAPVVVAKGTLSITTTEIYFEVDEDDSAFKKIDTKVLAYTEGLHGKWMFSEIRAVFSRRYLLQNTALEVFMANRTSVMFNFPDQATVKKVVYSLPRVGVGTSYGLPQARRISLATPRQLYKSSNMTQRWQRREISNFEYLMFLNTIAGRTYNDLNQYPVFPWVLTNYESEELDLTLPGNFRDLSKPIGALNPKRAVFYAERYETWEDDQSPPYHYNTHYSTATSTLSWLVRIEPFTTFFLNANDGKFDHPDRTFSSVARSWRTSQRDTSDVKELIPEFYYLPEMFVNSNGYNLGVREDEVVVNDVDLPPWAKKPEDFVRINRMALESEFVSCQLHQWIDLIFGYKQRGPEAVRALNVFHYLTYEGSVNLDSITDPVLREAMEAQIQNFGQTPSQLLIEPHPPRSSAMHLCFLPQSPLMFKDQMQQDVIMVLKFPSNSPVTHVAANTLPHLTIPAVVTVTCSRLFAVNRWHNTVGLRGAPGYSLDQAHHLPIEMDPLIANNSGVNKRQITDLVDQSIQINAHCFVVTADNRYILICGFWDKSFRVYSTETGKLTQIVFGHWDVVTCLARSESYIGGDCYIVSGSRDATLLLWYWSGRHHIIGDNPNSSECDYPAPRAVLTGHDHEVVCVSVCAELGLVISGAKEGPCLVHTITGDLLRALEGPENCLFPRLISVSSEGHCIIYYERGRFSNFSINGKLLAQMEINDSTRAILLSSDGQNLVTGGDNGVVEVWQACDFKQLYIYPGCDAGIRAMDLSHDQRTLITGMASGSIVAFNIDFNRWHYEHQNRY

SEQ ID NO: 293039 - DNA, 8832 bp, Artificial Sequence
  derived and/or modified sequence
atggcttcggaaaaaccggggcccgggccaggtcttgaaccgcaacctgtgggccttatcgccgtgggcgccgccgggggagggggcggcggttcaggtggcgggggaaccgggggctccggcatgggggaattgagaggggcgagcggaagtggatctgtgatgctgcctgcgggcatgatcaaccccagcgtgccaatcaggaatatcaggatgaagttcgccgtgctcatcggcctcatacaagttggagaagtgtccaatagggatatagtcgagaccgtgctgaatcttctagttggtggtgagttcgacctcgaaatgaatttcattatacaagatgctgagtcaatcacgtgcatgacggagttactggagcactgcgatgtcacttgccaggccgagatctggtccatgtttacggccatcctgcggaagtccgtccgaaatctgcaaacttcaaccgaagtgggactgatcgaacaggtgttattgaagatgagcgcagtcgatgatatgattgccgatctgctcgtagatatgctgggggtgcttgccagctattcaattacagttaaggaactcaagctgcttttttccatgctgaggggggaatctggcatttggcctagacatgccgtcaaactgctgtcagtactgaaccaaatgccccagcgccacggtcccgacaccttcttcaacttccccggctgcagcgccgccgccatcgccctaccccctatcgccaagtggccataccagaacggattcactttgaacacctggtttagaatggatcctctgaacaatatcaacgttgataaagataaaccatacctgtattgcttccgcacgagtaaaggagtcggatattccgcccacttcgtggggaattgcctcattgtgactagtctcaagtctaagggcaagggcttccaacactgtgtgaaatatgatttccagccccgcaagtggtacatgattagtatagtgcacatttacaatagatggaggaatagcgagatccgatgctacgtgaacggtcagctggtatcctatggcgacatggcctggcatgtgaacacaaacgatagttatgacaagtgttttctcggcagctccgagaccgccgacgcaaacagggtcttttgtggacaactcggggccgtctacgtcttttcagaggctttgaaccccgcacagatttttgctatccaccagcttggtcctggctataaaagcacctttaaattcaagtcggaatccgatattcacttggctgagcatcataagcaggtgctgtacgacggcaaattggcctcttccatcgcattcacatacaacgccaaggccactgatgcccagctttgtctcgaatcttctccaaaagaaaatgctagcatatttgtccactccccccatgcgttgatgttacaagatgtgaaggctattgtgacccatagcatccacagcgccatacacagcatcggcggaatccaggttctctttcctctgtttgcgcagctcgacaataggcagctgaacgactcccaagtggagactaccgtttgtgccactctgcttgctttcctcgtggaattgctgaagtcatctgtagctatgcaggaacagatgttgggcggtaagggctttctggtcatcgggtatttgctcgaaaagtcctctagagttcatattacccgggctgtgttggaacaattcctgagttttgctaaatacttagatggcctttcccacggagcgccactcctgaaacaattatgcgaccatattctgttcaatcccgccatctggatccacacccctgcaaaagtgcagcttagcctgtatacatacctgtctgcggaattcataggtaccgcaactatctacacaaccatcagacgtgtgggaactgtgctgcagctgatgcacacgctgaagtattattattgggtaattaatcctgcagactcctccggcatcaccccaaaagggctcgacggccctcggccttcacagaaggaaatcataagcttacgggctttcatgctgctgttcctcaaacaactgatcctcaaggacaggggggtgaaggaggatgaactgcagtcaatactgaattatcttcttactatgcacgaggatgagaacatccatgacgtgctgcagcttttggtcgcactgatgagcgaacaccctgccagcatgattcctgctttcgatcaaagaaacggaatccgtgtcatttataagttgttggcatctaaaagcgaatccatttgggtccaggcactgaaagttctcggctattttcttaaacatctgggccacaagcgaaaggtggagattatgcatacacatagcctctttaccttacttggtgaaaggcttatgctgcacacgaacaccgtgacagtgaccacctacaacaccctgtatgaaattctcaccgaacaagtttgtactcaggttgtacacaaaccccatcccgagcccgattcaacggtcaaaatccagaatcctatgatactgaaagtcgttgccactctcttgaaaaactctactcctagcgcggagctcatggaggtgaggcgtcttttcttatccgacatgatcaaacttttctcaaactcccgggagaataggcgctgcctcctgcagtgtagcgtgtggcaagattggatgttcagcctgggctacattaaccccaagaattctgaagaacagaagatcaccgagatggtgtacaatatctttagaattttgctttatcatgcgattaagtatgagtgggggggttggagagtttgggtggatacactttctatagcccactcaaaggtaacttatgaggcccacaaggagtacctagcgaagatgtatgaagaataccagcgccaggaggaagaaaacattaagaagggaaagaaagggaatgtgtcaactatctccggactgtctagccaaacaacgggagctaaaggaggcatggaaatccgggaaatcgaagatctcagccagtcacagtcacccgaatccgagaccgattaccctgtgtctacagatacacgggatctgttaatgagcactaaggtcagcgacgacattcttggcaattcagaccgacctgggtctggcgtacacgtggaagtgcacgatctgctggtcgacattaaggcggagaaggttgaagccaccgaggtgaaactggatgacatggatctatcacctgagacactggtgggcggcgagaatggggctcttgtcgaggttgaatcgcttttggacaacgtgtacagtgccgcagttgaaaaactgcagaataatgtgcatggctcagtcggtattataaagaaaaatgaagagaaagacaatggacctcttattacactggctgacgaaaaggaagacctacccaatagttcgacctcatttctattcgacaagatccccaagcaggaggagaaactcctgcctgagctttccagcaatcacattattcccaacattcaggatacccaagttcacctaggcgtgtctgatgatctgggcctactggctcacatgactggctcagtagatctgacatgtacctcaagcataattgaggagaaagagtttaagattcacacgaccagcgatggtatgtccagcatcagcgagagggatctcgcaagctccacaaagggactggagtacgcagagatgacggcgactacactggaaactgaatcctcgtcgtccaagatcgtgcccaatatcgatgcaggctccatcatcagtgatacggagcggagtgacgacggaaaggaatccggcaaagagataaggaagattcagacaaccacgaccacccaagctgtgcagggaagatccattacgcagcaggatagggacctgcgggttgatctaggttttaggggcatgcccatgacagaggaacagcgaaggcaattttccccaggtccacggacaactatgtttagaatacccgagtttaagtggagtcccatgcatcaaaggctgctcacagatctgttgttcgcactggagacagatgttcacgtgtggcgcagtcacagcaccaaaagtgtgatggatttcgtgaacagcaacgaaaacattatcttcgtgcataataccattcatctgatcagtcagatggtcgacaacattatcatcgcgtgcggagggatcctgccactgctgtccgcagcaacaagcccgaccactgaactggagaacatcgaggtgactcagggtatgtctgcggagaccgcagtgaccttcttaagtaggcttatggccatggtggacgtgctcgtgtttgcctccagtctcaacttttccgagatagaggccgagaagaacatgtccagcggcggcctgatgaggcagtgtttgcgccttgtgtgctgtgtggctgttcgcaactgtctggaatgccgccagagacagcgggatcgtgggaataaatccagtcacggatcaagcaagcctcaggaagtcccacagtctgttacagcaacagccgctagcaaaactcctctggaaaacgttcccggcaacctgtccccaatcaaagaccccgaccgcttgttacaggacgttgacatcaatagactccgagcagtagttttccgcgatgtggacgacagcaaacaggctcaatttttggcattagctgtagtgtattttatctccgtgcttatggtgtctaagtaccgcgacatcctggaacctcagcgcgagacgaccagaaccggcagtcagcccggccgcaacatacgccaagagattaattctcctacttctacagttgtggtaattccaagcatacctcacccatcattgaatcatgggttcctggccaaactgatacctgaacaaagctttgggcactcattctataaagagaccccagccgcctttccagatacaattaaggaaaaagaaacccccacccctggcgaggacatccaagtggagagttcgatcccacacaccgatagtggtatcggcgaagaacaagtcgcttccatcctgaatggtgctgagttggagacaagcaccggtccagacgcaatgtcagaactgctgtccaccttgtcaagtgaagtgaaaaaaagtcaggagtccctgacggaaaatccaagcgagactctcaagcccgccactagcatttcgtccatctctcaaaccaaaggaatcaacgtgaaggagatcttaaaaagtctcgtcgctgcgcctgtggaaatagccgaatgtggtcccgagccgataccctacccagatcctgccctgaagagagaaactcaagccattctcccaatgcagttccattcattcgatcggtctgtggtcgtaccagtaaagaagcctcctcctggatccctcgcagttaccacagtgggagccaccacggcagggtctggactgcccacgggatcaaccagtaatatctttgctgccactggagctacacctaaaagcatgatcaacacaactggggccgtagacagcgggtcttcatcttcgtctagtagcagttcctttgtgaatggcgccacgtctaaaaacttacccgccgtgcagaccgtggctcctatgcctgaggacagcgcggaaaacatgagtatcaccgctaaactggagcgggctctggagaaggttgcacctttgcttagggagatcttcgttgactttgctcccttcctctctcggactctacttgggtcccatggacaggaactcttgattgaaggcctggtgtgtatgaagtcgtctacatccgtggtagaattggttatgttactgtgtagccaggaatggcagaactcaatccaaaaaaacgcagggctggccttcatcgagctcataaatgaagggcgcttgctgtgtcacgccatgaaagaccacattgtgagagtcgcgaacgaagctgaatttattctgaatcgtcagcgggccgaagatgtgcataaacatgccgaattcgagtctcaatgtgcccagtatgcagctgaccgacgcgaagaggaaaaaatgtgcgatcatctgatttccgccgcaaaacacagggaccatgtcactgcgaaccagctgaagcagaaaattttgaacatcctaactaacaagcatggggcatggggcgctgtcagccattctcagttacatgatttctggcggcttgactactgggaggacgacttgagaagacgaagaagatttgtccgaaacgcttttgggtcgacacatgcggaggctctgctaaaggccgcaatagaatacggaaccgaagaggacgtggtgaaatcaaaaaaaaccttccgaagccaggctattgtaaatcagaacgcagagacagagttgatgctagagggcgacgacgacgcagtgtctctgctgcaggagaaagaaatcgacaacctcgcgggtccagtggttttgtccacacccgcccaattaatcgcacctgtggttgtagccaaagggactctatctatcaccaccaccgaaatctacttcgaagttgacgaagacgactcagcatttaaaaagatcgacacaaaagttctggcgtacaccgagggacttcacggcaaatggatgttctccgagattcgtgctgtgtttagtcgccgctatttgcttcaaaacactgccctggaggtgtttatggctaaccgcacatccgtaatgtttaacttcccggatcaggctactgtgaaaaaggtggtctattcactgccccgcgtgggggttggtacctcatatgggctgcctcaggctcgcagaatctcactcgcaacaccaaggcagctgtataaaagctcgaatatgacccaacggtggcagaggagagaaatctcaaactttgaatacttgatgttcctgaataccatagctggccgaacatacaatgatttgaaccagtatcctgtgtttccatgggtgcttacgaattatgagtctgaggagctggatcttacattacccggaaactttcgcgacttaagtaaaccaattggtgcactaaaccctaagcgagccgtcttttatgcagaacggtacgaaacatgggaggatgaccagtcccccccttatcactacaatacccactatagcactgcgacgtctacactgagttggctagttaggatcgaacccttcaccacttttttcctgaatgcaaacgatggaaaattcgatcacccagataggacctttagctccgtggccaggagctggaggacatctcagcgggataccagcgacgtcaaggaacttattccagagttttactacctgccagagatgttcgtgaacagtaatgggtataacttaggggtaagagaggacgaagtggtggtcaacgatgttgatctccccccctgggcaaaaaaacctgaagactttgtacggataaatcgcatggctcttgagtcggagttcgtatcatgccaactgcatcaatggatcgacctgatatttggatacaagcagcgtggacctgaagcagtacgggctttaaacgtttttcattacttaacctatgaaggatccgtcaatctagatagcattaccgatccagtgctacgagaagcaatggaagctcagatccagaactttggccagacaccaagccaactgctcatcgaaccacacccccccagaagctcagccatgcatctctgtttcctgccccagtcccccctgatgtttaaggaccagatgcagcaggatgtgatcatggtcctgaaattccccagcaattcccccgtgactcatgttgctgctaatactctgcctcatcttaccattccagcagtggtgacggtgacttgctcccgtctgttcgcagtgaatcgatggcataataccgtgggcctgcgtggggcccctggatactcattggaccaggctcaccaccttccaatcgagatggatccactcatcgcaaacaattccggcgtcaacaagcgtcagatcacagacctggtggaccagtccatccagataaatgcacactgctttgtggtgacagcggataaccgatacatccttatctgcggattttgggacaagtcttttagagtgtacagcactgagaccggtaagctcacacaaattgtattcggtcactgggatgtcgtcacttgtctggctcgtagcgagtcctatatcgggggcgactgttacattgttagcgggtctcgtgatgccacactgctactgtggtactggtctggaagacaccacatcatcggagataatcctaactctagtgattaccctgctcccagagccgtactcacaggccatgaccacgaagttgtgtgtgtatctgtctgtgcggagcttggactggtaatctcaggcgctaaggaggggccctgcttggtgcacactattacgggtgatctacttagagccctcgagggacctgagaactgtttattccctcggttgatctctgtgagcagcgagggacactgcataatttattacgaaagaggcagattcagtaatttctccattaatggcaagcttcttgcgcagatggaaattaacgactcaacccgagccatacttcttagcagtgacggacaaaatctggtgaccgggggggataatggagtcgtagaggtctggcaggcctgcgacttcaaacagctctatatctacccgggttgtgatgcggggatccgggccatggatctctctcacgaccagaggacgctgatcaccggcatggcctcaggctcaatcgtcgcctttaacattgatttcaacagatggcactatgaacatcagaatagatactag

SEQ ID NO: 293040 - DNA, 4728 bp, Artificial Sequence
  derived and/or modified sequence
atgcatcaaagactcctaaccgatctgttgtttgcactagaaactgacgtgcatgtctggcggtctcactccaccaaatccgtcatggactttgtaaatagtaatgagaatattatcttcgtgcacaacactattcatctgatttctcagatggttgacaacatcatcatagcttgtggcggtatcctccctctgctgagcgctgctacctctccaactacagagctggaaaatatcgaggtgacacagggcatgagcgccgaaacagctgtgactttcttgtcccggctgatggccatggtggacgtgttggtatttgctagttcgctgaatttttcagagatagaagccgagaagaatatgtcatccggcggtctcatgagacagtgcctcaggttggtgtgctgcgtggctgttcgaaattgtcttgagtgtaggcagcgccagagggaccgtgggaacaaatcgtcccatggaagtagtaagccccaggaagtaccacagtctgtcacagctacagctgcatctaaaacccctctggagaacgtcccaggaaatctgagtccgataaaggatccggaccgcttattgcaggatgtggatatcaacaggctccgcgctgttgtttttcgggacgtagacgactccaaacaagcacagttcttggccttggccgtagtttatttcatctccgtgcttatggtgtccaagtaccgcgatatcttagaacctcagcgcgaaactacacgcacaggtagtcagccaggccgtaacattcgccaggagatcaattctcccacttctaccgagacgccagctgccttcccagacactattaaggagaaagagacccccacgccaggagaagacatccaagtggaaagctcaattcctcataccgacagcggcatcggggaagaacaggtggcaagtattctcaatggcgcagaacttgagactagcacaggccctgacgccatgtccgaattactgtcaacccttagctccgaagttaagaaaagccaggaaagcttgaccgagaatccctctgagactctgaaacccgcaacttccatctcctcaatatcccaaacaaaggggattaatgttaaagaaattctcaagtccttggtggctgcccctgtcgaaattgctgaatgtgggcccgagcccatcccatatcctgacccagctctaaaaagggagacccaggccatcctgccaatgcagttccactcatttgatcgctcggtcgtggtcccagttaagaaacctccaccgggatcattggccgtgacaaccgttggggccaccaccgctgggtccggcctccctacaggctcaaccagcaacattttcgctgccacaggggctactcccaaatccatgatcaatacaactggagccgtggattctggctcaagttcttcatcatctagtagtagttttgtgaatggtgccaccagtaaaaatctgcccgcggtgcagactgtagcaccgatgccagaggattcagctgagaatatgagcatcacagctaaactggagagggcactggaaaaagtcgcgcctctcctgagggaaatttttgtggactttgcaccttttctctcgcgcaccttacttgggtctcatggccaagagcttctgatcgagggattggtgtgcatgaaatccagcacatccgttgtggagcttgttatgctgctatgttcccaggagtggcagaatagcatccagaaaaatgccgggctcgctttcatcgagcttataaatgaaggtcggctactatgtcacgcaatgaaggaccatattgtgagagtcgcgaatgaggcagagttcattctgaatagacagcgagcggaggacgtgcataagcatgcggaattcgagtcccagtgcgcacagtatgctgccgaccggcgggaggaggaaaagatgtgcgaccacctgatatccgctgccaaacacagagaccacgtaaccgccaaccagctgaaacagaaaatacttaacatactgactaataagcatggagcctggggggccgtcagtcatagccagctacacgacttttggagactcgattactgggaggacgatctgcgcagacgcagaaggttcgtgcgcaatgcttttgggtccacccacgctgaagctctgttgaaggccgctatcgagtatggaactgaagaggacgtcgtgaagtccaaaaaaacatttcggagccaggctatcgtcaaccagaacgccgaaaccgagctgatgctggaaggtgatgacgatgcagtgagcctgttgcaagaaaaagaaatagataatttggctgggcccgtagtgctgtctacacccgcacagttgatagcccccgtggttgtggcgaaaggcaccctgagcatcaccacgactgaaatttactttgaggtcgacgaggatgacagcgccttcaagaagatcgataccaaagtgcttgcctatacagaaggcctgcatggcaaatggatgtttagcgaaattagagcagtattttccaggagatatttgctgcagaataccgctcttgaggtgtttatggcgaacaggacctccgttatgttcaattttccagaccaagctactgtgaagaaggtagtctactcattgccacgcgtgggcgtgggtacttcatacgggctccctcaagctcggcgcatttctctggccacgccccgtcagctgtataaatccagtaacatgacacaacgctggcagaggcgagagatcagcaatttcgagtatctgatgttcctgaacaccattgccgggcgaacatacaacgatcttaatcagtatcccgtgttcccatgggtcctcactaattacgagtcagaggagctggatctcactctcccaggcaactttagagacctttctaaaccaataggcgccctgaatccgaagcgggcagtgttttacgccgagagatacgaaacttgggaggatgaccaatctcccccttaccactacaacacacattatagcaccgcgacctccaccctctcctggctggtacgcattgagcccttcaccactttcttcctcaatgccaacgacggaaaattcgaccacccagacaggaccttttcatctgtggccaggtcatggcgaacctcccagagggatactagcgacgtgaaagagctgatacccgaattctactacctgcctgaaatgtttgtcaactctaatgggtacaatctgggcgttcgcgaggacgaggtggtggtgaacgatgtagatttgcctccttgggcaaagaagcctgaagactttgtcagaataaaccgcatggccttggagtcagagttcgtatcttgccagctacaccagtggatagacctaattttcggctataaacagcgaggaccagaggcagtccgcgccttgaatgtgtttcactacctcacttacgaaggcagtgtcaatctggacagcataacagatcctgtattacgggaggccatggaagctcagatccagaactttggccagacaccttcccaactcctgattgagccgcatcctcctcgatcttctgcgatgcatctgtgctttctgccacaatctcccctgatgttcaaggaccaaatgcagcaagatgtcataatggttttgaaattcccctctaacagcccggtaacacatgtggccgccaatacgctcccccatctgacaatccccgccgtagtcaccgtcacctgcagcaggttgtttgccgtgaacagatggcataataccgtgggactgaggggggcccctggctattccctggaccaagcgcatcatctaccaattgagatggaccctctgatcgccaacaatagtggggttaataaaaggcagattaccgaccttgtagaccaaagcattcagatcaacgctcactgcttcgttgtgactgccgacaacaggtacatcctcatatgcggattttgggacaagtctttcagagtctactccaccgagaccgggaaactcacccagatcgtgttcggacactgggacgtggtgacctgcctagcaagaagtgaatcttatatcggcggcgattgttatatcgtctctggttcaagggatgccactctcctgttgtggtattggagcggccgccaccacattataggtgacaacccaaactctagtgaatgcgactaccccgcgcctcgagccgtgctgacaggacatgatcatgaggtggtttgtgtttctgtgtgcgccgagctggggttggtaatttccggcgctaaagagggcccatgtctggtgcacacaatcaccggcgatttgttgcgagcccttgagggcccagagaattgcttatttcctcgtctaatttcagtgagctccgaagggcactgcatcatctactatgagcgtggccgtttctctaacttcagtatcaatggcaagctgctggcgcaaatggaaattaacgactctacccgtgcaatcctgctgagcagtgacgggcaaaaccttgttaccgggggcgataatggtgtggtggaggtgtggcaagcgtgcgactttaaacagctgtacatttaccccgggtgtgacgctggcatacgcgccatggacctgtcccatgatcagaggaccctgattaccggtatggcctccggatcaatcgttgcttttaacattgacttcaataggtggcattatgagcaccagaacagatactag

SEQ ID NO: 293041 - DNA, 2220 bp, Artificial Sequence
  derived and/or modified sequence
atgttttcagaaataagggcggtatttagcagaaggtacctcctgcagaatacggcgctcgaggtgttcatggccaaccgcactagcgtcatgttcaacttccccgatcaggctacggtaaagaaggtcgtgtattctctgccaagggtaggagtaggaacttcttacggactgccgcaagcccggaggatctctctggcaaccccacgccagctctataaatctagtaatatgacccagaggtggcagcggagggaaattagcaacttcgaatatctgatgtttctgaatacgatcgcggggcgtacgtacaacgatctgaaccagtaccctgtcttcccatgggttttgacgaactatgagtcagaagagctggatctaacacttcccggaaactttagagatctgtctaagcctattggggcactgaaccccaagcgggcggtgttctacgctgagagatacgaaacttgggaggatgaccaaagccccccttaccactataacacccactactcaacagcaactagtactcttagttggttagtccgaatcgagcctttcaccactttttttctgaacgcaaatgatgggaagtttgatcacccagatagaaccttctcaagtgtggctcgcagctggagaacctctcagagagataccagcgatgtgaaagagttgattccagagttctattacctgccagagatgttcgtgaactccaatggctacaacctgggagttcgggaagatgaggttgtggtgaatgatgttgacctccccccttgggcaaaaaagcctgaggacttcgtgaggattaatcgcatggccctggaatccgagttcgtcagctgccagttacaccaatggattgatctaatcttcggctacaaacagaggggcccagaggccgtgcgggctttgaacgtttttcactacttgacatatgaaggaagtgtcaatctggattcgattacggaccccgtgcttcgggaagcaatggaagctcagattcagaacttcggccagactccgtcccagctcctgatagagccacacccccctagaagcagtgccatgcacctctgtttcctgcctcagtccccactaatgtttaaagaccaaatgcagcaggatgtgattatggtactcaagttccctagcaactctccggtgacccacgttgcagctaacaccctcccgcacctaacaatacccgctgtcgtcaccgtcacctgctccaggttgttcgccgtaaatcggtggcataacaccgtgggactcagaggggccccagggtactcgctcgatcaggcccaccatcttccaatcgagatggacccactgatcgccaataattctggcgttaataagaggcagatcaccgatctagtggaccagagcatacaaatcaacgcacattgttttgtggttacggccgataacaggtatattctgatctgtggtttctgggacaagtccttcagagtctactccaccgagacaggcaagctgacccaaatcgtgtttggacactgggacgtcgttacctgtcttgctagaagtgagtcatatatcggaggggattgttatattgtgagtggaagtcgggatgctaccctgctcctgtggtactggtccggcagacatcacattataggagacaatccgaactcctccgactaccccgcaccacgcgccgtcctgactggacacgaccacgaggttgtatgtgtgtccgtatgcgcagaactgggcctcgtcattagcggagccaaggagggcccgtgtctcgttcataccatcacaggggaccttcttcgggcccttgaaggcccggaaaattgtctcttcccccgccttatctccgtcagctcggagggccattgcattatctactacgagcgaggccgctttagcaacttcagtatcaatggtaagttgctggctcaaatggagatcaacgattccactagagcgattctcctgtctagtgacgggcagaatttagtaactggcggcgacaatggagtagtcgaggtgtggcaggcttgcgacttcaagcaactatatatatatcctgggtgtgatgccgggattcgtgccatggacctttcccatgaccagcgcactctgataacagggatggcatccggcagcatagttgcctttaatattgactttaaccgatggcattacgaacatcagaatcgttactag

SEQ ID NO: 293042 - DNA, 8832 bp, Artificial Sequence
  derived and/or modified sequence
atggccagcgagaagccaggccctggccctggcctggagccccagcctgtgggcctgattgctgtgggcgctgctgggggcggcggcggcggcagcggcggcggcggcactggaggcagcggcatgggagagctgcggggggccagcggcagcggctctgtgatgctgcctgctggcatgatcaaccccagcgtgcccatccggaacatccgcatgaagtttgctgtgctgattggcctcatccaggtgggggaggtgagcaacagagacatcgtggagaccgtgctgaacctgctggtgggcggggagtttgacctggagatgaacttcatcatccaggatgctgagagcatcacctgcatgacagagctgctggagcactgtgatgtgacctgccaggccgagatctggagcatgttcaccgccatcctgaggaagtctgtgaggaacctgcagaccagcacagaggtgggcctcatcgagcaggtgctgctgaagatgtctgctgtggatgacatgattgctgacctgctggtggacatgctgggcgtgctggccagctacagcatcaccgtgaaggagctgaagctgctcttctccatgctgcggggggagagcggcatctggcccaggcatgctgtgaagctgctgtctgtgctgaaccagatgccccagagacatggccctgacaccttcttcaacttccctggctgcagcgctgctgccatcgccctgccccccatcgccaagtggccctaccagaatggcttcaccctgaacacctggttcaggatggaccccctgaacaacatcaacgtggacaaggacaagccctacctgtactgcttccgcaccagcaaaggagtgggctacagcgcccactttgtgggcaactgcctgattgtgaccagcctgaagagcaagggcaagggcttccagcactgtgtgaagtatgacttccagcccaggaagtggtacatgatcagcatcgtgcacatctacaaccgctggaggaacagcgagatccgctgctacgtgaatggccagctggtgtcctatggagacatggcctggcacgtgaacaccaatgacagctatgacaagtgcttcctgggcagcagcgagacagcagatgccaacagagtcttctgtggccagctgggcgctgtgtatgtgttcagcgaggccctgaacccagcccagatctttgccatccaccagctgggccctggctacaagagcaccttcaagttcaagtctgagagtgacatccacctggccgagcaccacaagcaggtgctgtatgatggcaagctggccagcagcatcgccttcacctacaatgccaaggccacagatgcccagctgtgcctggagagcagccccaaggaaaatgccagcatctttgtgcacagcccccacgccctgatgctgcaggatgtgaaggccatcgtgacccacagcatccacagcgccatccacagcatcggcggcatccaggtgctcttccccctgtttgcccagctggacaaccggcagctgaatgacagccaggtggagaccaccgtgtgtgccaccctgctggccttcctggtggagctgctgaagagctctgtggccatgcaggagcagatgctgggcggcaagggcttcctggtgattggctacctgctggagaagagcagccgggtgcacatcaccagggctgtgctggagcagttcctgagctttgccaagtacctggatggcctgagccacggggcccccctgctgaagcagctgtgtgaccacatcctcttcaacccagccatctggatccacaccccagccaaggtgcagctgagcctgtacacctacctgtctgctgagttcatcggcacagccaccatctacaccaccatcagaagagtgggcaccgtgctgcagctgatgcacaccctgaagtactactactgggtgatcaacccagctgacagcagcggcatcacccccaagggcctggatggcccccggcccagccagaaggagatcatcagcctgcgggccttcatgctgctcttcctgaagcagctgatcctgaaggacagaggagtgaaggaggatgagctgcagagcatcctgaactacctgctgaccatgcatgaagatgagaacatccatgatgtgctgcagctgctggtggccctgatgtctgagcacccagcctccatgatcccagcctttgaccagagaaatggcatccgggtcatctacaagctgctggccagcaagtctgagagcatctgggtgcaggccctgaaggtgctgggctacttcctgaagcacctgggccacaagaggaaggtggagatcatgcacacccacagcctcttcaccctgctgggggagcggctgatgctgcacaccaacacagtgacagtgaccacctacaacaccctgtatgagatcctgacagagcaggtgtgcacccaggtggtgcacaagccccaccctgagccagacagcacagtgaagatccagaaccccatgatcctgaaggtggtggccaccctgctgaagaacagcacccccagcgctgagctgatggaggtgagaagactcttcctgagtgacatgatcaagctgttcagcaacagcagagaaaatcgccgctgcctgctgcagtgcagcgtgtggcaggactggatgttcagcctgggctacatcaaccccaagaacagcgaggagcagaagatcacagagatggtgtacaacatcttccgcatcctgctgtaccacgccatcaagtatgagtggggcggctggagggtgtgggtggacaccctgagcatcgcccacagcaaggtgacctatgaggcccacaaggagtacctggccaagatgtatgaggagtaccagaggcaggaggaggagaacatcaagaagggcaagaagggaaatgtgtccaccatcagcggcctgagcagccagaccaccggggccaagggcggcatggagatccgggagattgaggacctgagccagagccagagccctgagagcgagacagactaccctgtgtccacagacacccgggacctgctgatgagcaccaaggtgtctgatgacatcctgggcaacagcgaccggcccggcagcggcgtgcacgtggaggtgcatgacctgctggtggacatcaaggccgagaaggtggaggccacagaggtgaagctggatgacatggacctgagccctgagaccctggtgggcggagaaaatggagccctggtggaggtggagagcctgctggacaacgtgtacagcgctgctgtggagaagctgcagaacaacgtgcacggctctgtgggcatcatcaagaagaatgaggagaaggacaatggccccctcatcaccctggctgatgagaaggaggacctgcccaacagcagcaccagcttcctgtttgacaagatccccaagcaggaggagaagctgctgcctgagctgagcagcaaccacatcatccccaacatccaggacacccaggtgcacctgggcgtgtctgatgacctgggcctgctggcccacatgactggatctgtggacctgacctgcaccagcagcatcatcgaggagaaggagttcaagatccacaccaccagtgatggcatgagcagcatcagcgagcgggacctggccagcagcaccaagggcctggagtatgcagagatgacagccaccaccctggagacagagagcagcagcagcaagatcgtgcccaacattgatgctggcagcatcatcagtgacacagagaggagtgatgatggcaaggagagcggcaaggagatcaggaagatccagaccaccaccaccacccaggccgtgcagggccgcagcatcacccagcaggaccgggacctgcgggtggacctgggcttccggggcatgcccatgacagaggagcagaggcggcagttcagccctggccccaggaccaccatgttccgcatccctgagttcaagtggagccccatgcaccagaggctgctgacagacctgctgtttgccctggagacagatgtgcacgtgtggaggagccacagcaccaagtctgtgatggactttgtgaacagcaatgaaaacatcatctttgtgcacaacaccatccacctgatcagccagatggtggacaacatcatcatcgcctgtggcggcatcctgcccctgctgtctgctgccaccagccccaccacagagctggagaacatcgaggtgacccagggcatgtctgctgagacagctgtgaccttcctgagccggctgatggccatggtggatgtgctggtgtttgccagcagcctgaacttcagcgagattgaagctgagaagaacatgagcagcggcggcctgatgaggcagtgcctgcggctggtgtgctgcgtggccgtgaggaactgcctggagtgccggcagaggcagagggaccggggcaacaagagcagccacggcagcagcaagccccaggaggtgccccagagcgtgacagccacagctgccagcaagacccccctggagaatgtgcccggcaacctgagccccatcaaggaccctgaccggctgctgcaggatgtggacatcaaccggctgcgggctgtggtgttcagagatgtggatgacagcaagcaggcccagttcctggccctggccgtggtgtacttcatctctgtgctgatggtgtccaagtacagagacatcctggagccccagcgggagaccaccaggacaggcagccagcctggaagaaacatccggcaggagatcaacagccccaccagcacagtggtggtgatccccagcatcccccaccccagcctgaaccacggcttcctggccaagctgatccctgagcagagctttggccacagcttctacaaggagaccccagctgccttcccagacaccatcaaggagaaggagacccccaccccaggagaggacatccaggtggagagcagcatcccccacacagacagcggcatcggggaggagcaggtggccagcatcctgaatggagctgagctggagaccagcacaggcccagatgccatgtctgagctgctgagcaccctgagcagcgaggtgaagaagagccaggagagcctgacagagaaccccagcgagaccctgaagccagccaccagcatcagcagcatcagccagaccaagggcatcaacgtgaaggagatcctgaagagcctggtggccgcccctgtggagattgctgaatgtggccctgagcccatcccctacccagaccctgccctgaagcgggagacccaggccatcctgcccatgcagttccacagctttgacagatctgtggtggtgcctgtgaagaagcccccacctggcagcctggccgtgaccaccgtgggcgccaccacagctggcagcggcctgcccaccggcagcaccagcaacatctttgctgccaccggggccacccccaagtccatgatcaacaccactggagctgtggacagcggcagcagcagcagcagcagcagcagcagctttgtgaatggagccaccagcaagaacctgcctgctgtgcagacagtggcccccatgccagaagattctgctgagaacatgagcatcacagccaagctggagcgggccctggagaaggtggcccccctgctgcgggagatctttgtggactttgcccccttcctgagcaggaccctgctgggcagccacggccaggagctgctgattgagggcctggtgtgcatgaagagcagcacctctgtggtggagctggtgatgctgctgtgcagccaggagtggcagaacagcatccagaagaatgccggcctggccttcatcgagctgatcaatgaaggccgcctgctgtgccacgccatgaaggaccacatcgtgcgggtggccaatgaggccgagttcatcctgaaccggcagagagcagaagatgtgcacaagcacgccgagtttgagagccagtgtgcccagtatgctgctgacagaagagaggaggagaagatgtgtgaccacctgatctctgctgccaagcaccgggaccacgtgacagccaaccagctgaagcagaagatcctgaacatcctgaccaacaagcacggggcctggggcgctgtgagccacagccagctgcatgacttctggaggctggactactgggaggatgacctgcggaggagaagaagatttgtgagaaatgccttcggcagcacccacgccgaggccctgctgaaggccgccatcgagtatggaacagaggaggatgtggtgaagagcaagaagaccttccgcagccaggccatcgtgaaccagaatgctgagacagagctgatgctggagggagatgatgatgctgtgtccctgctgcaggagaaggagattgacaacctggccggccctgtggtgctgagcaccccagcccagctgattgcccctgtggtggtggccaagggcaccctgagcatcaccaccacagagatctactttgaggtggatgaagatgacagcgccttcaagaagattgacaccaaggtgctggcctacacagagggcctgcacggcaagtggatgttttctgagatccgggctgtgttcagccgccgctacctgctgcagaacacagccctggaggtgttcatggccaacagaacatctgtgatgttcaacttcccagaccaggccaccgtgaagaaggtggtgtacagcctgccccgggtgggcgtgggcaccagctatggcctgccccaggcccggcgcatcagcctggccaccccccggcagctgtacaagagcagcaacatgacccagcgctggcagaggcgggagatcagcaactttgagtacctgatgttcctgaacaccatcgccggccgcacctacaatgacctgaaccagtaccctgtgttcccctgggtgctgaccaactatgagagcgaggagctggacctgaccctgcccggcaacttccgggacctgagcaagcccatcggggccctgaaccccaagagagctgtgttctacgccgagagatatgagacctgggaggatgaccagagccccccctaccactacaacacccactacagcacagccaccagcaccctgtcctggctggtgagaattgagcccttcaccaccttcttcctgaatgccaatgatggcaagtttgaccacccagacaggaccttcagctctgtggcccgctcctggaggaccagccagagggacaccagtgatgtgaaggagctgatccctgagttctactacctgcctgagatgtttgtgaacagcaatggctacaacctgggcgtgcgggaggatgaggtggtggtgaatgatgtggacctgcccccctgggccaagaagccagaggactttgtgcgcatcaacaggatggccctggagagcgagtttgtgtcctgccagctgcaccagtggattgacctgatcttcggctacaagcagaggggccctgaggccgtgcgggccctgaatgtgttccactacctgacctatgagggctctgtgaacctggacagcatcacagatcctgtgctgcgggaggccatggaggcccagatccagaactttggccagacccccagccagctgctgattgagccccacccccccaggagcagcgccatgcacctgtgcttcctgccccagagccccctgatgttcaaggaccagatgcagcaggatgtgatcatggtgctgaagttccccagcaacagccctgtgacccacgtggccgccaacaccctgccccacctgaccatcccagctgtggtgacagtgacctgcagccggctgtttgctgtgaaccgctggcacaacacagtgggcctgcggggggcccctggctacagcctggaccaggcccaccacctgcccatcgagatggaccccctcatcgccaacaacagcggcgtgaacaagaggcagatcacagacctggtggaccagagcatccagatcaatgcccactgctttgtggtgacagctgacaaccgctacatcctgatctgtggcttctgggacaagagcttccgggtgtacagcacagagaccgggaagctgacccagatcgtgtttggccactgggatgtggtgacctgcctggcccggtctgagagctacatcggcggggactgctacatcgtgtctggcagcagagatgccaccctgctgctgtggtactggagcggccgccaccacatcattggagacaaccccaacagcagtgactacccagcccccagggctgtgctgaccggccatgaccacgaggtggtgtgtgtgtctgtgtgtgccgagctgggcctggtgatcagcggggccaaggagggcccctgcctggtgcacaccatcactggagacctgctgcgggccctggagggccctgagaactgcctcttccccaggctcatctctgtgagcagcgagggccactgcatcatctactatgaaagaggccgcttcagcaacttcagcatcaatggcaagctgctggcccagatggagatcaatgacagcacccgggccatcctgctgagcagtgatggccagaacctggtgactggaggagacaacggggtggtggaggtgtggcaggcctgtgacttcaagcagctgtacatctacccaggctgtgatgctggcatccgggccatggacctgagccatgaccagaggaccctcatcaccggcatggccagcggcagcatcgtggccttcaacatcgacttcaaccgctggcactatgagcaccagaaccgctactag

SEQ ID NO: 293043 - DNA, 4728 bp, Artificial Sequence
  derived and/or modified sequence
atgcaccagaggctgctgacagacctgctgtttgccctggagacagatgtgcacgtgtggaggagccacagcaccaagtctgtgatggactttgtgaacagcaatgaaaacatcatctttgtgcacaacaccatccacctgatcagccagatggtggacaacatcatcatcgcctgtggcggcatcctgcccctgctgtctgctgccaccagccccaccacagagctggagaacatcgaggtgacccagggcatgtctgctgagacagctgtgaccttcctgagccggctgatggccatggtggatgtgctggtgtttgccagcagcctgaacttcagcgagattgaagctgagaagaacatgagcagcggcggcctgatgaggcagtgcctgcggctggtgtgctgcgtggccgtgaggaactgcctggagtgccggcagaggcagagggaccggggcaacaagagcagccacggcagcagcaagccccaggaggtgccccagagcgtgacagccacagctgccagcaagacccccctggagaatgtgcccggcaacctgagccccatcaaggaccctgaccggctgctgcaggatgtggacatcaaccggctgcgggctgtggtgttcagagatgtggatgacagcaagcaggcccagttcctggccctggccgtggtgtacttcatctctgtgctgatggtgtccaagtacagagacatcctggagccccagcgggagaccaccaggacaggcagccagcctggaagaaacatccggcaggagatcaacagccccaccagcacagagaccccagctgccttcccagacaccatcaaggagaaggagacccccaccccaggagaggacatccaggtggagagcagcatcccccacacagacagcggcatcggggaggagcaggtggccagcatcctgaatggagctgagctggagaccagcacaggcccagatgccatgtctgagctgctgagcaccctgagcagcgaggtgaagaagagccaggagagcctgacagagaaccccagcgagaccctgaagccagccaccagcatcagcagcatcagccagaccaagggcatcaacgtgaaggagatcctgaagagcctggtggccgcccctgtggagattgctgaatgtggccctgagcccatcccctacccagaccctgccctgaagcgggagacccaggccatcctgcccatgcagttccacagctttgacagatctgtggtggtgcctgtgaagaagcccccacctggcagcctggccgtgaccaccgtgggcgccaccacagctggcagcggcctgcccaccggcagcaccagcaacatctttgctgccaccggggccacccccaagtccatgatcaacaccactggagctgtggacagcggcagcagcagcagcagcagcagcagcagctttgtgaatggagccaccagcaagaacctgcctgctgtgcagacagtggcccccatgccagaagattctgctgagaacatgagcatcacagccaagctggagcgggccctggagaaggtggcccccctgctgcgggagatctttgtggactttgcccccttcctgagcaggaccctgctgggcagccacggccaggagctgctgattgagggcctggtgtgcatgaagagcagcacctctgtggtggagctggtgatgctgctgtgcagccaggagtggcagaacagcatccagaagaatgccggcctggccttcatcgagctgatcaatgaaggccgcctgctgtgccacgccatgaaggaccacatcgtgcgggtggccaatgaggccgagttcatcctgaaccggcagagagcagaagatgtgcacaagcacgccgagtttgagagccagtgtgcccagtatgctgctgacagaagagaggaggagaagatgtgtgaccacctgatctctgctgccaagcaccgggaccacgtgacagccaaccagctgaagcagaagatcctgaacatcctgaccaacaagcacggggcctggggcgctgtgagccacagccagctgcatgacttctggaggctggactactgggaggatgacctgcggaggagaagaagatttgtgagaaatgccttcggcagcacccacgccgaggccctgctgaaggccgccatcgagtatggaacagaggaggatgtggtgaagagcaagaagaccttccgcagccaggccatcgtgaaccagaatgctgagacagagctgatgctggagggagatgatgatgctgtgtccctgctgcaggagaaggagattgacaacctggccggccctgtggtgctgagcaccccagcccagctgattgcccctgtggtggtggccaagggcaccctgagcatcaccaccacagagatctactttgaggtggatgaagatgacagcgccttcaagaagattgacaccaaggtgctggcctacacagagggcctgcacggcaagtggatgttttctgagatccgggctgtgttcagccgccgctacctgctgcagaacacagccctggaggtgttcatggccaacagaacatctgtgatgttcaacttcccagaccaggccaccgtgaagaaggtggtgtacagcctgccccgggtgggcgtgggcaccagctatggcctgccccaggcccggcgcatcagcctggccaccccccggcagctgtacaagagcagcaacatgacccagcgctggcagaggcgggagatcagcaactttgagtacctgatgttcctgaacaccatcgccggccgcacctacaatgacctgaaccagtaccctgtgttcccctgggtgctgaccaactatgagagcgaggagctggacctgaccctgcccggcaacttccgggacctgagcaagcccatcggggccctgaaccccaagagagctgtgttctacgccgagagatatgagacctgggaggatgaccagagccccccctaccactacaacacccactacagcacagccaccagcaccctgtcctggctggtgagaattgagcccttcaccaccttcttcctgaatgccaatgatggcaagtttgaccacccagacaggaccttcagctctgtggcccgctcctggaggaccagccagagggacaccagtgatgtgaaggagctgatccctgagttctactacctgcctgagatgtttgtgaacagcaatggctacaacctgggcgtgcgggaggatgaggtggtggtgaatgatgtggacctgcccccctgggccaagaagccagaggactttgtgcgcatcaacaggatggccctggagagcgagtttgtgtcctgccagctgcaccagtggattgacctgatcttcggctacaagcagaggggccctgaggccgtgcgggccctgaatgtgttccactacctgacctatgagggctctgtgaacctggacagcatcacagatcctgtgctgcgggaggccatggaggcccagatccagaactttggccagacccccagccagctgctgattgagccccacccccccaggagcagcgccatgcacctgtgcttcctgccccagagccccctgatgttcaaggaccagatgcagcaggatgtgatcatggtgctgaagttccccagcaacagccctgtgacccacgtggccgccaacaccctgccccacctgaccatcccagctgtggtgacagtgacctgcagccggctgtttgctgtgaaccgctggcacaacacagtgggcctgcggggggcccctggctacagcctggaccaggcccaccacctgcccatcgagatggaccccctcatcgccaacaacagcggcgtgaacaagaggcagatcacagacctggtggaccagagcatccagatcaatgcccactgctttgtggtgacagctgacaaccgctacatcctgatctgtggcttctgggacaagagcttccgggtgtacagcacagagaccgggaagctgacccagatcgtgtttggccactgggatgtggtgacctgcctggcccggtctgagagctacatcggcggggactgctacatcgtgtctggcagcagagatgccaccctgctgctgtggtactggagcggccgccaccacatcattggagacaaccccaacagcagtgaatgtgactacccagcccccagggctgtgctgaccggccatgaccacgaggtggtgtgtgtgtctgtgtgtgccgagctgggcctggtgatcagcggggccaaggagggcccctgcctggtgcacaccatcactggagacctgctgcgggccctggagggccctgagaactgcctcttccccaggctcatctctgtgagcagcgagggccactgcatcatctactatgaaagaggccgcttcagcaacttcagcatcaatggcaagctgctggcccagatggagatcaatgacagcacccgggccatcctgctgagcagtgatggccagaacctggtgactggaggagacaacggggtggtggaggtgtggcaggcctgtgacttcaagcagctgtacatctacccaggctgtgatgctggcatccgggccatggacctgagccatgaccagaggaccctcatcaccggcatggccagcggcagcatcgtggccttcaacatcgacttcaaccgctggcactatgagcaccagaaccgctactag

SEQ ID NO: 293044 - DNA, 2220 bp, Artificial Sequence
  derived and/or modified sequence
atgttttctgagatccgggctgtgttcagccgccgctacctgctgcagaacacagccctggaggtgttcatggccaacagaacatctgtgatgttcaacttcccagaccaggccaccgtgaagaaggtggtgtacagcctgccccgggtgggcgtgggcaccagctatggcctgccccaggcccggcgcatcagcctggccaccccccggcagctgtacaagagcagcaacatgacccagcgctggcagaggcgggagatcagcaactttgagtacctgatgttcctgaacaccatcgccggccgcacctacaatgacctgaaccagtaccctgtgttcccctgggtgctgaccaactatgagagcgaggagctggacctgaccctgcccggcaacttccgggacctgagcaagcccatcggggccctgaaccccaagagagctgtgttctacgccgagagatatgagacctgggaggatgaccagagccccccctaccactacaacacccactacagcacagccaccagcaccctgtcctggctggtgagaattgagcccttcaccaccttcttcctgaatgccaatgatggcaagtttgaccacccagacaggaccttcagctctgtggcccgctcctggaggaccagccagagggacaccagtgatgtgaaggagctgatccctgagttctactacctgcctgagatgtttgtgaacagcaatggctacaacctgggcgtgcgggaggatgaggtggtggtgaatgatgtggacctgcccccctgggccaagaagccagaggactttgtgcgcatcaacaggatggccctggagagcgagtttgtgtcctgccagctgcaccagtggattgacctgatcttcggctacaagcagaggggccctgaggccgtgcgggccctgaatgtgttccactacctgacctatgagggctctgtgaacctggacagcatcacagatcctgtgctgcgggaggccatggaggcccagatccagaactttggccagacccccagccagctgctgattgagccccacccccccaggagcagcgccatgcacctgtgcttcctgccccagagccccctgatgttcaaggaccagatgcagcaggatgtgatcatggtgctgaagttccccagcaacagccctgtgacccacgtggccgccaacaccctgccccacctgaccatcccagctgtggtgacagtgacctgcagccggctgtttgctgtgaaccgctggcacaacacagtgggcctgcggggggcccctggctacagcctggaccaggcccaccacctgcccatcgagatggaccccctcatcgccaacaacagcggcgtgaacaagaggcagatcacagacctggtggaccagagcatccagatcaatgcccactgctttgtggtgacagctgacaaccgctacatcctgatctgtggcttctgggacaagagcttccgggtgtacagcacagagaccgggaagctgacccagatcgtgtttggccactgggatgtggtgacctgcctggcccggtctgagagctacatcggcggggactgctacatcgtgtctggcagcagagatgccaccctgctgctgtggtactggagcggccgccaccacatcattggagacaaccccaacagcagtgactacccagcccccagggctgtgctgaccggccatgaccacgaggtggtgtgtgtgtctgtgtgtgccgagctgggcctggtgatcagcggggccaaggagggcccctgcctggtgcacaccatcactggagacctgctgcgggccctggagggccctgagaactgcctcttccccaggctcatctctgtgagcagcgagggccactgcatcatctactatgaaagaggccgcttcagcaacttcagcatcaatggcaagctgctggcccagatggagatcaatgacagcacccgggccatcctgctgagcagtgatggccagaacctggtgactggaggagacaacggggtggtggaggtgtggcaggcctgtgacttcaagcagctgtacatctacccaggctgtgatgctggcatccgggccatggacctgagccatgaccagaggaccctcatcaccggcatggccagcggcagcatcgtggccttcaacatcgacttcaaccgctggcactatgagcaccagaaccgctactag

SEQ ID NO: 293045 - DNA, 8832 bp, Artificial Sequence
  derived and/or modified sequence
atggccagcgagaagcccggccccggccccggcctggagccccagcccgttggacttattgctgtaggggctgccggaggcgggggcggcggaagtggtgggggcggcaccggcggctccggcatgggggaactccgcggagcgtcaggatccgggagtgttatgctgcccgcaggtatgattaacccctctgtgccgatcaggaacataaggatgaagtttgctgtccttataggattgatccaggtcggcgaggtgagcaatagggacatcgttgaaactgtgctaaacctgctggtaggcggagaattcgacttagaaatgaattttatcatccaagacgccgaaagcatcacctgcatgacggagttacttgagcactgcgatgtcacttgtcaagcggaaatttggagtatgttcacagccattctgaggaagtccgttagaaatttgcagacctctactgaagtggggttaattgagcaggtgctgcttaagatgtctgctgtggatgatatgatcgcagacctcctcgtggatatgttgggggttcttgcaagctatagtatcactgtgaaagagctcaagctcctcttcagtatgcttcggggcgagagcggtatctggccaaggcatgctgtaaagttactttccgtcctgaatcaaatgccacaacggcatggcccagacacattttttaacttcccaggctgcagtgcggccgctattgccctgcctccaatcgcaaagtggccttatcagaacggattcactctgaatacatggttcaggatggacccactgaataatattaacgtggacaaggataaaccatacctctattgctttaggacaagtaagggtgtcggttacagtgcacatttcgtcggtaactgtctgattgtgactagccttaagagcaagggcaaggggttccaacactgtgtgaagtacgactttcagcctagaaagtggtacatgatctcaatagtccatatttataaccgatggagaaactcggagattcggtgttacgttaatgggcagctggtctcttacggagatatggcctggcacgttaacactaacgactcctatgataagtgctttctgggttcatccgagacagctgatgcaaaccgggtcttctgcgggcaacttggggccgtctatgttttttctgaagccctgaatccagcacagatcttcgcaatacaccagctcggaccgggatataaaagcacctttaaattcaagagcgaaagtgatatccatctggctgaacatcataaacaggtgctgtatgacggaaaactcgcttccagcatagccttcacatacaacgctaaagccaccgatgcccaactatgtctggaaagctcgcctaaggaaaacgcttctattttcgtgcatagtccgcacgccctgatgctccaagacgttaaagccattgtgactcatagcattcattccgccatccacagcatcggcggaatccaagttcttttccctttattcgcccagttggataatcggcaactgaacgatagtcaggttgaaaccacagtttgtgccaccctattggcattcttggtggagctcctcaagagcagcgtcgcaatgcaggaacagatgctgggcggaaaaggattcctggtgatagggtatctcttggaaaagagctccagagtccatattactagagcggtgctggaacagttcctttctttcgctaaatacctcgacggtctgtctcatggggcacctttactgaaacagttgtgcgatcacattctgttcaaccctgctatttggatccacacaccagctaaagtccagctgtcattatacacgtacctgtcagccgagtttattggcacagctaccatatataccaccatcagacgtgtgggaacagtactccaactgatgcacacactgaagtactactattgggtcattaatccagctgattcaagtgggattacccccaaaggactggatggtccacggcccagtcagaaagagatcatcagtctcagagcattcatgcttcttttcctgaaacagctgattctcaaagacagaggcgttaaggaagatgagctgcagagcatcttgaactatttgctgactatgcatgaggacgagaacatccacgacgttctgcagctactcgtggcactgatgtcagaacatccagctagtatgattcctgcattcgatcagcgcaatggcattagggttatctataagcttctggccagcaaatccgagtcgatctgggtccaggcgctgaaggtcctgggatatttccttaaacacctggggcacaagcgtaaagtcgagattatgcacacacactcactgttcactctcctgggtgagcggctgatgctgcacaccaacactgtcacagtcaccacatataatactctgtacgaaatcctgactgagcaggtgtgtacccaggtcgtccataagccccaccccgagcctgattcaacagtgaaaatccagaacccaatgattttgaaagtggtcgctaccctactaaagaattccacaccctcggccgaactgatggaggttagaaggttgttcctgagtgatatgatcaaacttttttctaatagcagggaaaaccgaagatgtctgctgcagtgttccgtgtggcaggattggatgttctccctgggctacattaatccaaaaaatagtgaagaacagaaaattaccgaaatggtgtacaacatctttcggatccttctgtaccatgcaatcaagtatgaatggggagggtggcgcgtttgggtcgataccctttccatcgctcattctaaggttacttatgaagcccataaagaatacttggctaagatgtacgaagaataccagaggcaggaagaggagaacataaaaaaggggaagaaagggaacgtgagtacaatctctggcctgagttctcaaacaaccggggcgaagggtggtatggaaattagggagatcgaagacctctctcagagccagtcacccgagagcgagacggactacccagtgtctaccgacactagggatctcctgatgagcacgaaggtctcggacgacattctgggaaactcggatcgtcccggctctggcgttcatgtagaggttcatgacttgctagtcgacattaaggcggagaaggtagaagccactgaagtaaaactagatgacatggacctgtctccagaaaccctggtgggaggggaaaatggcgccttggtagaagtcgaatcgctcctggacaacgtttacagcgctgcggtcgaaaagctgcagaacaacgtacatggcagtgtaggcatcatcaagaagaatgaggagaaagacaatgggccgttaattaccttagctgacgagaaggaggatctgccaaactcgtccacatccttcctgttcgacaagatccccaagcaggaagagaagttgctgccagagcttagttctaaccacatcattcctaatatacaagatacccaggttcacctgggagtgtctgacgaccttggcctgttagctcatatgactggcagtgttgatctgacctgtacttcgagcatcattgaagagaaagagttcaaaatacacacaaccagcgacggtatgagctctatttcagaacgggaccttgcctcctccacaaaaggtctggagtacgcagagatgactgcaaccaccctcgaaacagagagctcatcaagcaaaattgtccccaacatcgatgctggatcgatcatctccgacaccgaacgttcagacgatggaaaggaatccggcaaggagattagaaagattcagacaactactacaacccaggccgtgcaaggaaggagtatcacccaacaggacagggatcttcgagtggaccttggcttcagggggatgcctatgacagaggaacaaagaaggcaattttctccaggtccgcggactaccatgtttcgaatcccagagtttaagtggtcgcccatgcatcagaggttgcttactgatctactgtttgccctggaaactgacgtgcacgtatggaggagccattcgactaaatcagtgatggatttcgtcaattctaacgagaatattatcttcgtgcacaataccatacacttgattagtcaaatggttgataatataattatcgcctgcggaggtatcctgcctctcctgtccgcagcaaccagcccgactacagagcttgagaatattgaggtgacccagggcatgtctgcagaaactgcagtcacgttcctttccaggctgatggctatggtcgatgtgctggtatttgcatcttccctgaatttttccgaaatcgaggccgagaaaaatatgtcttccggggggttgatgagacagtgtctacgcctcgtgtgttgtgttgccgtaaggaattgtttggaatgtcgccagcgacagagagaccggggcaataaaagctcccatggcagctccaagccacaggaggtgcctcaatcagtgacagcaacggcagcctcaaagacacccctggagaatgtacctggaaatctttcccctattaaggaccccgatagactattgcaggatgttgacatcaatagactgcgcgctgtcgtgtttagggatgttgacgatagtaaacaggcacagttcctagccttggctgtggtctatttcatttcagtactcatggtctcgaaatacagggatattcttgagccacagagggagacgacgaggacagggtcccagcctggccgtaatattcgccaggaaattaactccccaacctcgacggttgtggtgatcccctctatcccacatccaagtctgaatcacggcttcctagcaaagctcattcctgaacagtcctttgggcacagcttttacaaagagacacccgctgcgtttccagacacaattaaagagaaagagacacccacacctggagaagatattcaagtcgaatcttcaattcctcacactgattctgggattggggaggaacaggtcgcttccatcttgaacggagcggagcttgagacttctacggggcccgatgccatgtctgagttgctgtccacattgtcctctgaagtcaaaaaaagtcaggagagcctcaccgagaacccctccgagacgctcaagccagcgacttctatctcctcaattagccagaccaaaggcatcaacgtgaaagagattctgaagagtctcgtggcagccccagtggagatcgccgaatgtggaccggagcctatcccttatccggaccctgctctcaagagggagacccaggcaattctgcctatgcagtttcatagcttcgaccggagcgtggtcgtgccagtcaagaagccaccgcccgggagcctggcagtgaccaccgtgggcgcaacaacggcgggttcagggttgccaaccggctccacttccaatatcttcgctgctactggtgcaactcccaagagtatgatcaatacgacaggagcagttgactcaggcagcagcagctcctcttcttcgtctagctttgtaaacggtgcaacttctaagaacctacccgcggtgcaaacggtggcaccaatgcctgaggacagtgcagagaatatgagcattactgcaaagctcgagcgtgcgctggaaaaagttgcccctcttctccgcgaaatcttcgtggactttgccccattcctctcaagaacacttctagggagtcacgggcaggagctcctgattgaagggcttgtatgtatgaagtcctctacttcagtggtagagctggttatgcttttgtgttctcaagagtggcagaattctattcaaaaaaacgctgggcttgcatttatagagctcatcaatgaaggtcggctgctgtgtcacgccatgaaagatcacattgtgcgcgtggccaatgaggctgagttcatccttaatcggcagagggccgaagacgtgcacaagcatgccgagtttgaaagtcagtgcgcgcagtacgcggcagatcgtagggaggaggagaagatgtgtgaccatttgattagcgctgccaaacaccgggatcacgtgacagccaaccagctcaagcagaagattctcaatatcttgacaaataagcacggagcatggggggccgtgtcccactcccagttgcacgatttttggaggctcgattactgggaggacgatctcaggcgaagaagacgcttcgtccggaacgcatttggttccacccacgccgaggcacttcttaaggccgcaattgaatatgggactgaggaggacgtggttaaatccaagaaaacatttcggtcccaggctatagtgaaccagaacgctgaaacagaactgatgctggagggagatgatgatgccgtcagcctcctgcaggagaaggaaatagataatctcgctggtccagtggtgttaagcacacccgcgcaattgatcgcccccgtagtcgtagcaaagggaactttgtcaattaccaccactgagatctacttcgaggttgacgaggacgattcagcttttaaaaaaattgacacgaaggttctcgcctacaccgagggactgcacgggaagtggatgttttctgagatcagagcagttttttctagacgatatttgctgcagaataccgcccttgaggtcttcatggctaatcggaccagtgtgatgttcaatttcccagaccaagcaaccgtaaagaaggtagtgtacagcttgccaagggtcggagtgggaacatcttacggcctgccccaggctagaaggatctctcttgcaaccccgaggcaactctacaaaagctccaatatgacccagcggtggcagcgaagggaaatctccaattttgagtatttgatgttcctgaatacaatcgccggtaggacatataatgacttaaaccaatatcctgtcttcccatgggtcctcaccaattacgagagcgaggagctggatctgactcttccaggaaacttccgagacctgtcgaaacctattggggctctcaaccctaaacgagcagtgttctatgccgaaagatatgagacctgggaagatgaccagtcacccccatatcactataatactcactattcaacagcaacctccaccctgtcgtggctcgtacgaatcgaaccttttacaaccttctttctgaatgcaaatgatggaaagttcgaccacccagaccggacttttagctcagttgctagatcttggcgcacatcccagagagacacatccgacgtcaaggagctgatccccgagttttattaccttccagagatgttcgtgaactccaacggctataatctgggagttagggaggacgaggttgtagttaacgacgtagacctgcctccttgggccaagaaaccagaagatttcgtgagaattaaccggatggccctggagtccgagtttgttagctgtcagctgcatcagtggatcgaccttattttcggctacaagcagaggggacccgaggctgtgcgagcactcaatgtcttccattatctgacatacgagggtagtgtcaatctggacagtatcacagatcccgtcctgcgcgaggccatggaggctcagatacagaactttggacagactccctctcagctgctgatcgagcctcatccaccacgctcctcagccatgcacctatgtttccttccccaaagcccactgatgttcaaggaccagatgcaacaagacgtaatcatggttctcaaattcccctcaaattcaccagtgacgcacgtggcggccaacacacttccacacctcaccatacctgccgtcgtgaccgtgacttgtagcaggttatttgctgttaaccgttggcacaatacagtgggtctcagaggcgctcctgggtactctctcgatcaggcacaccacctgcctatagaaatggaccccctaatcgcaaataattctggagttaacaaacggcagatcacggatttggtggatcagtccatccagattaacgcacactgcttcgtggtaactgctgacaaccgctatatactgatttgtggattctgggataagtcatttagagtatactccactgaaacaggcaaattaacccagatcgtgttcggacattgggacgttgtgacttgcttggctcggagcgagagctacatcggaggcgactgttacattgttagcggaagccgagacgccacacttctcctttggtactggtcagggaggcaccatattattggggacaaccccaactccagtgattacccagcaccccgagcagtgctgaccgggcatgaccacgaggtggtttgcgtgtctgtgtgcgcagagctcggtctggtgatcagcggcgctaaagaaggcccctgcctggtgcacactattacaggggacctcctaagggccctggaagggccagagaattgcctgtttccacggttaatctccgtgagttccgagggccactgcattatttactacgagcgtgggcgattttcaaactttagtattaatggcaagttgcttgcgcagatggaaatcaatgattcaactagggccatccttctgtcctctgacggccagaacctggtgaccgggggggataacggcgtggttgaggtgtggcaggcttgtgattttaagcagctttacatttaccccgggtgtgacgccggcattagagcaatggacctgtcccacgatcagcgtaccctgatcacaggcatggcaagcggatccattgttgctttcaatatcgacttcaatcggtggcattatgagcatcagaaccgctactag

SEQ ID NO: 293046 - DNA, 4728 bp, Artificial Sequence
  derived and/or modified sequence
atgcaccagcggctgctgaccgacctgctgttcgccctggagaccgatgtgcatgtgtggaggtcccactctaccaaaagtgtgatggactttgtgaactctaacgaaaatatcatattcgtgcacaatacaattcatctaatttcacaaatggtggataacataatcattgcctgcggcggcatcctgccactgctgagcgcggccacgagtccaacaacggaattggagaacatcgaggtaacccagggaatgtccgcggagactgcagtgactttcctcagtaggcttatggcaatggtagatgtccttgtcttcgcttctagtttgaattttagcgagattgaggccgaaaagaatatgtcctctggcgggctaatgaggcaatgcctgagactggtgtgttgtgttgccgtcagaaactgtctggaatgtagacagcggcagagggaccggggcaacaagagcagccacgggagctctaagccccaggaggtaccccagagcgtgactgctaccgccgctagcaaaacaccgctggagaacgtcccagggaacctgtccccaatcaaagatcccgatcgattactacaggatgttgacattaataggttacgcgcggttgtgtttcgagatgtggatgactctaagcaagctcagtttttagcactagccgttgtgtacttcatttccgtgttgatggtgtccaagtacagggacatcctggagccccagcgtgagactacaaggaccggctctcaaccgggacggaatattcgccaggagattaacagtcccacttccacagagactcctgctgcttttccggacacgatcaaggagaaagagacccctacacctggagaagacatccaggtggagtcaagcattccacataccgatagtggcataggcgaggaacaggtggcatctatcttgaacggcgcagaattagagacatctaccggtcctgacgccatgtctgaactgcttagcaccctcagttctgaggttaagaagtcccaggaatcgcttacagagaatccgtctgaaacactcaagcccgccacgagtataagctctatcagccaaaccaaaggcattaacgttaaagagattttaaaatccctggtggcagcccctgtggaaatcgccgaatgcggcccagagcctattccctacccagaccctgctctgaaacgagaaacgcaggccatccttcctatgcagttccatagcttcgaccgtagtgtggtggtgcctgtgaaaaagcctccaccgggatctcttgccgtgaccactgtcggcgctaccactgccggaagcgggctcccgacaggaagtacgtcaaacatcttcgcggctaccggcgctacacctaaatctatgatcaacactactggggccgtcgattccggttcgagtagcagctcatcatcatcctcttttgttaatggcgcgacttccaagaacttgcctgcagtgcagaccgtcgcccccatgcccgaagactccgccgaaaacatgagcataacagcaaagttggagcgagcccttgagaaggtggcaccactcctgcgagaaattttcgtggacttcgctccgttcctttccagaaccctgcttggctcccatgggcaggagctgttgatagagggcctcgtgtgtatgaagtctagcacttccgtggtggaacttgtaatgcttctgtgctcacaggaatggcagaattctatccagaagaacgcaggcctcgccttcatcgagctgataaacgaaggacgcctgctatgtcatgcgatgaaggatcacatcgtccgggtggctaacgaggccgagttcatccttaacaggcagcgggcagaagacgtccacaagcacgccgagtttgaatcccaatgtgcccaatacgctgcggatcgtagagaggaggagaaaatgtgcgaccacctcatcagcgcagcaaagcatcgcgatcacgtgaccgccaaccaacttaagcagaaaatcctaaacattctgacaaacaagcacggcgcctggggtgctgtatcgcactctcagttacacgacttttggcggttagactattgggaggatgacctgagaaggcgacgccggttcgtcagaaacgcctttggatcgacccatgctgaggccttgctgaaggcggctattgagtatggcaccgaagaagacgtcgtaaaaagtaagaaaaccttcaggtctcaggcgattgttaatcagaatgcagagactgaattgatgctggagggggatgatgacgcggtatcgctcctgcaggagaaagagatcgataatctggccggacctgtggtgctgagcacccccgcccaactgattgcacccgtcgtggtcgccaagggaactctgtctattacaacaacagagatttatttcgaagtagacgaggatgattcagcttttaaaaagatcgacaccaaagtgctcgcttacacagagggtctgcatggcaagtggatgttttcggagattcgggcggtgttcagtaggcgctatctgctgcagaataccgcgttggaagtattcatggctaaccgaaccagtgtcatgttcaatttcccggaccaggccacggtgaagaaggtagtttattcgctgccacgagttggcgtgggtaccagctacgggcttccccaggcacgccggatttctttggcgaccccacgccagctttacaagtcctcgaacatgacacagcgatggcagcggagagagatcagcaatttcgaatacttaatgttcctgaacaccattgccgggaggacatataatgacctgaaccagtacccagttttcccctgggtactgaccaactacgaaagcgaggaacttgacttgactctgcccggaaattttcgggacctgtcaaagcctatcggcgcgttaaatcctaagagggcagtgttctatgccgaacgatacgagacctgggaagacgatcagtcaccaccctaccactacaacactcattatagcactgctacctctaccctgtcctggcttgtgcggatcgaaccctttactacattcttcctaaacgcgaatgatggtaaattcgaccatcctgatagaacattttcctccgtcgccaggtcttggaggacaagtcagagagatacctctgacgttaaggagcttatccccgaattctattatctgcccgagatgttcgtgaactccaacggatacaacctcggagtgcgggaggacgaggttgtcgtgaatgatgtagatctgcccccttgggcaaagaaacctgaagattttgtgcgaattaacaggatggccttggagtctgagtttgtgtcttgtcagcttcatcagtggatcgatctcatctttggctataagcagagagggcccgaggccgttcgggctctgaacgtctttcattacctgacctacgagggctccgtgaatctggactccattacagaccccgtcttaagggaagctatggaagctcaaattcagaactttggacagaccccatcccagctgctgattgaaccccatccccctaggagcagcgcgatgcacttgtgttttctgccacagtcaccactgatgttcaaagaccagatgcagcaggatgtaataatggttctgaaattcccctctaacagcccagtcacccatgtggcagcgaacaccttgcctcacctgacaatccccgcggtggtcaccgttacctgctctcgcctgttcgccgtgaacagatggcataacacagtcggccttcggggagccccaggatactcactagatcaggcccatcacctgcctatcgagatggaccccctgatcgcaaacaattctggagtgaacaaaaggcagatcacagatctggtcgaccagtctatccaaattaacgcccattgtttcgtagttaccgcagataatagatatatcctgatctgtggattttgggacaagagctttagggtgtactctacggagacaggaaagctgacccagatagtattcggccattgggacgtagtgacttgcctcgccaggtcagagtcctacatcggcggcgattgctacattgtgtcaggatccagggatgccaccctcctgctctggtactggtccggaaggcaccacataatcggcgataaccctaacagtagtgaatgcgactatcctgcaccacgggctgtcctgacaggccacgatcatgaggtggtgtgtgtgagtgtttgtgccgagcttggcctggttatctcaggtgcaaaggagggaccttgtttggtccataccataacaggtgatctgctgagggccctagaggggcctgagaactgtctgtttcctaggttaatttctgtgagttccgagggtcattgtatcatatactacgagcgcggacgtttttcaaacttcagcattaacggcaaattgctggctcagatggaaattaacgattccaccagggccatactcctgtcctctgacggccagaacctggtgacaggaggagacaacggagtcgtggaagtatggcaggcttgtgattttaagcaactttatatatacccaggctgtgacgctggcattagggccatggacctgtcccacgatcaaaggactctgatcactggcatggcaagtgggtctattgtggcatttaacattgatttcaaccgctggcactatgagcaccaaaatagatactag

SEQ ID NO: 293047 - DNA, 2220 bp, Artificial Sequence
  derived and/or modified sequence
atgttcagcgagatccgggccgtgttcagccggcggtacctgctgcagaatacagccctggaggtgtttatggctaataggactagcgtgatgttcaactttcccgatcaggccaccgtgaagaaggttgtttactcccttccacgcgtgggagttgggacatcatatggactcccacaggcacgccgaatcagtctggccacaccacgtcagctgtacaaatcgagtaacatgacccagaggtggcagcggcgagagatctccaattttgaatacctcatgtttttgaacactatcgctggccggacgtataacgacctgaaccagtaccccgtctttccatgggtcctcactaactacgagtcagaagagctggacctcactctgcctggcaattttagagacctgagcaaacccatcggggctctcaaccccaagcgggcagtgttctatgctgagcgttatgagacctgggaggacgatcagagtccaccttatcactataatacgcactacagtaccgcgacatctacactcagctggttggtcagaattgaacccttcacaacatttttcctgaatgccaatgacggtaaatttgatcatccggatcgcactttctcgtcagtggccagaagttggcggacatctcagcgcgatacttccgatgttaaggagttaatccccgaattctactatctgcccgagatgttcgtcaatagcaatggctataaccttggcgttagggaggacgaggtggtggtgaatgatgtggatctcccaccatgggcaaagaagccagaggattttgttaggattaataggatggcgctggagtctgaattcgtctcctgccagctgcaccaatggatagaccttatcttcggatacaaacagagaggccctgaggcagtaagggctcttaatgtgttccactatctcacctacgagggctctgtcaatctagactcaataaccgatcctgttctcagagaggctatggaggcccaaattcagaattttgggcaaactccctcccagttactgatcgagccccatccaccccggagctccgcgatgcatttgtgtttcctgcctcagagcccactcatgtttaaggaccagatgcagcaggatgtaatcatggtcctcaagtttccatcaaattcgcctgtgacccatgtggcagccaacacactgccgcacctgactattcccgctgtcgtaactgtgacctgctcccggctattcgctgttaatcgatggcataacacggtgggcttgagaggcgcgcctggctattccctcgaccaggcccaccacctcccgatcgagatggatcccctcatcgcaaataactccggcgtgaataagcggcagattacggatttggttgatcagagtatccaaattaacgcccattgttttgtggtgacagcggataacaggtatatcttgatctgtggattttgggataagagtttccgtgtgtatagcactgaaacaggtaagctaacccaaattgtcttcggccattgggatgtggtcacttgtcttgctcgctcggaaagctatattgggggagactgttatatcgtcagcggcagtcgcgacgcaacactgctgctttggtactggtcagggcgacaccacattattggcgacaacccaaactcatctgattaccctgctcctcgggccgtgcttaccggccatgaccacgaagtggtgtgtgtctcggtgtgcgctgaactgggattggttatttccggtgccaaggagggtccttgccttgttcacaccattaccggggaccttctaagagccctcgaaggaccagagaattgcctgtttccccgtctaatctcggtcagctcagaagggcactgtatcatctactatgagaggggccgattttctaacttcagcatcaatggtaaactattggcccagatggagataaacgatagtacacgggctatactgttatcctcagacggtcagaacctggtcaccgggggagataacggagtcgtggaggtgtggcaagcttgtgatttcaaacagctgtacatctaccccggctgtgatgcgggcattagggccatggacttaagccatgaccagagaactctcataaccggtatggctagcggcagtatcgttgccttcaacatcgattttaaccgatggcattatgagcatcaaaacagatactag

SEQ ID NO: 293048 - DNA, 10783 bp, Artificial Sequence
  derived and/or modified sequence
gcggcgtcggggcttcacaacaacagtggtggccgtagcagcggccgggccgggctgaggcgcaggcggggagcgggcccggcgccgcggcgctggtggatgctggggctccgaggcgacggccggggggcgggggccgaggcaggtataacggtaccggcggcggcagcgccgctgctcttcccttctcctcaggaggggggccaatggctagcgagaagccgggcccgggcccggggctcgagcctcagcccgtggggctcattgccgtcggggccgctggcggaggcggcgggggcagcggtggtggcggcaccgggggcagcgggatgggggagctaaggggggcgtccggctccggctcggtgatgctccccgcggggatgattaacccttcggtgccgatccgcaacatccggatgaaattcgcagtgttgattggactcatacaggtcggagaggtcagcaacagggacatcgtggagacggtgctcaacctgctggttggtggagaatttgacttggagatgaactttattatccaggatgctgagagtataacatgtatgacagagcttttggagcactgtgatgtaacatgtcaagcagaaatatggagcatgtttacagccattctacgaaaaagtgttcggaatttacagactagcacagaagttgggctaattgaacaagtattgctgaaaatgagtgctgtagatgacatgatagcagatcttctagttgatatgttgggggttcttgccagctacagcatcactgtcaaggagttgaagcttttgttcagcatgcttcgaggagaaagtggaatctggccaagacatgcagtaaaattattatcagttcttaatcagatgccacagagacacggtcctgatacttttttcaatttccctggttgtagcgctgcggcaattgccttgcctcctattgcaaagtggccttatcagaatggcttcaccttaaacacttggtttcgtatggatccattaaataatattaatgttgataaggataaaccttatctttattgttttcgtactagcaaaggagttggttactctgctcattttgttggcaactgtttaatagtcacatcattgaagtccaaaggaaaaggttttcagcattgtgtgaaatatgattttcaaccacgcaagtggtacatgatcagcattgtccacatttacaatcgatggaggaacagtgaaattcggtgttatgttaatggacaactggtatcttatggtgatatggcttggcatgttaacacaaatgatagctatgacaagtgctttcttggatcatcagaaactgctgatgcaaatagggtattctgtggtcaacttggtgccgtgtatgtgttcagtgaagcactcaacccagcacagatatttgcaattcatcagttaggacctggatataagagtaccttcaagtttaaatctgagagtgatattcatttggcagaacatcataaacaggtgttatatgatgggaaacttgcaagtagcattgcctttacatataatgctaaggccactgatgctcagctctgcctggaatcatcaccaaaagagaatgcatcaatttttgtgcattccccacatgctctaatgcttcaggatgtgaaagcgatagtaacacattcaattcatagtgcaattcattcaattggagggattcaagtgctttttccactttttgcccaattggataataggcagctcaatgacagtcaagtggaaacaactgtctgtgctactctgttggcattcctggttgaactacttaaaagttcagtagccatgcaagaacagatgctgggtggaaaaggctttttagtcattggctacttacttgaaaagtcatcaagagttcatataactagagctgtcctggagcaatttttatcttttgcaaaataccttgatggtttatctcatggagcacctttgctgaagcagctttgtgatcacattttatttaacccagccatctggatacatacacctgcaaaggttcagctttccctatacacatatttgtctgctgaatttattggaactgctaccatctacaccaccatacgcagagtaggaacagtattacagctaatgcacaccttaaaatattactactgggttattaatcctgctgacagtagtggcattacacctaaaggattagatggtccccggccatcacaaaaagaaattatatcactgagggcatttatgctactttttctgaaacagctgatactaaaggatcgaggggtcaaggaagatgaacttcagagtatattaaattacctacttacgatgcatgaggatgaaaatattcatgatgtgctacagttactggtggctttaatgtcggaacacccagcctcaatgataccagcatttgatcaaagaaatggaataagggtgatctacaaattattggcttctaaaagtgaaagtatttgggttcaagctttgaaggttctgggatactttctgaagcatttaggtcacaagagaaaagttgaaattatgcacacccatagtcttttcactcttcttggagaaaggctgatgttgcatacaaacactgtgactgtcaccacatacaacacactttatgagatcttgacagaacaagtatgtactcaggtcgtacacaaaccacatccagagccagattctacagtgaaaattcagaatccaatgattcttaaagtggtggcaactttgttaaaaaactctacaccaagtgcagagctgatggaagttcgtcgtttatttttatctgatatgataaaacttttcagtaacagccgtgaaaatagaagatgcttattgcagtgttcagtgtggcaggattggatgttttctcttggctatatcaatcctaaaaattctgaggaacagaagattaccgaaatggtctacaatatcttccggattcttttgtatcatgcaataaaatatgaatggggaggctggagagtctgggtggataccctctcaatagcccattccaaggtcacttatgaagctcataaggaatacctagccaaaatgtatgaggaatatcaaagacaagaggaggaaaacattaaaaagggaaagaaagggaatgtgagcaccatctctggtctttcatcacagacaacaggagcaaaaggtggaatggaaattcgagagatagaagatctttcacaaagccagagcccagaaagtgagaccgattaccctgtcagcacagatactcgagacttactcatgtcaacaaaagtgtcagatgatattcttggaaattcagatagaccaggaagtggtgtacatgtggaagtacatgatcttttagtagatataaaagcagagaaagtggaagcaacagaagtaaagctcgatgatatggatttatcaccggagactttagtaggtggagagaatggtgcccttgtggaggttgaatctctgttggataatgtatatagtgctgctgttgagaaactccagaacaatgtacatggaagtgttggtatcattaaaaaaaatgaagaaaaggataatggtccattgataacattagcagatgagaaagaagaccttcccaatagtagtacatcatttctctttgataaaatacccaaacaggaggaaaaactacttcctgaactttctagcaatcacattattccaaatattcaggacacacaagtacatcttggtgttagtgatgatcttggattgcttgctcacatgaccggtagcgtagacttaacttgtacatccagtataatagaagaaaaagaattcaaaatccatacaacttcagatggaatgagcagtatttctgaaagagacttagcgtcatcaactaaggggctggagtatgctgaaatgactgctacaactctggaaactgagtcttctagtagcaaaattgtaccaaatattgatgcaggaagtataatttcagatactgaaaggtctgacgatggcaaagaatcaggaaaagaaatccgaaaaatccaaacaactactacgacacaagctgtgcagggtcggtctatcacccaacaagaccgagatctccgagttgatttaggatttcgaggaatgccaatgactgaggaacagcgacgccagtttagcccaggtccacggactacaatgtttcgtattcctgagtttaaatggtctccaatgcaccagcggcttctcactgatttactatttgcattagaaactgatgtacatgtttggaggagccattctacaaagtctgtaatggattttgtcaatagcaatgaaaatattatttttgtacataacacaattcacctcatttcccaaatggtagacaacatcatcattgcttgtggaggaattttacctttgctctctgctgctacatcaccaactacggaattggaaaatattgaagtgacacaaggcatgtcagctgagacagcagtaactttcctcagccggctgatggctatggttgatgtacttgtgtttgcaagctctctaaattttagtgagattgaagctgagaaaaacatgtcttctggaggtttaatgcgacagtgcctaagattagtttgttgtgttgctgtgagaaactgtttagaatgtcggcaaagacagagagacaggggaaataaatcttcccatggaagcagtaaacctcaggaagttcctcaaagtgtgactgctacagcagcttcgaagactccattggaaaatgttccaggtaacctttctcctattaaggatccggatagacttcttcaggatgttgatatcaatcgccttcgtgctgttgtctttcgggatgtggatgatagcaaacaagcacagttcttagctctggctgttgtttacttcatttcggttctgatggtttccaagtatcgtgacatattagaaccccagagagagactacaagaactggaagccaaccaggtagaaacatcaggcaagaaataaattcaccaacaagtacagttgtggtcataccatctatccctcatccaagtttgaaccatggattccttgccaagttaattcctgagcagagctttggccactcattttacaaagaaacacctgctgcatttccagacaccataaaagaaaaagaaacaccaactcctggtgaagatattcaggtagaaagttcaattccccatacagattcaggaattggagaggagcaagtggctagcatcctgaatggggcagaattagaaacaagtacaggccctgatgccatgagtgaactcttatccactttgtcatccgaagtgaagaaatcacaagagagcttaactgaaaatcctagtgaaacgttgaagcctgcaacatccatatctagcattagtcaaaccaaaggcatcaatgtgaaggaaatactgaaaagtcttgtggctgctccagttgaaatagcagaatgtggccctgaacctatcccatacccagatccagcattgaagagagaaacacaagctattcttcctatgcagtttcattcctttgacaggagtgttgtggtgcctgtaaagaaaccacctccaggtagtttagctgtaaccactgtgggagccactactgctggaagtgggctgccaacaggcagtacctctaatatatttgctgctactggagctacaccaaaaagtatgattaatacaacaggtgccgtggattcagggtcctcctcctcttcctcctcttctagttttgtgaatggtgctactagcaaaaaccttccagctgtacaaactgttgctccaatgccagaagattcagctgaaaatatgagcatcactgcaaaacttgaaagagcgttagaaaaagttgctcctcttcttcgtgaaatttttgtagactttgccccattcctatctcgtacacttcttggcagtcatggacaagagctattgatagaaggccttgtttgtatgaagtccagcacatctgtggttgagcttgttatgctgctttgttctcaggaatggcaaaactctattcagaagaatgcaggacttgcatttattgagctcatcaatgaaggaagattactgtgccatgctatgaaggaccatatagtccgtgttgcaaatgaagctgagtttattttgaacagacaaagagccgaggatgtacataaacatgcagagtttgagtcacagtgtgcccaatatgctgctgatagaagagaggaagaaaagatgtgtgaccatcttatcagtgctgctaaacatcgagatcatgtaacagcaaatcagctgaaacagaagattctcaatattctcacaaataaacatggtgcttggggagcagtttctcatagccaattgcatgatttctggcgtttggattactgggaagatgatcttcgtcgaaggagacgatttgttcgcaatgcatttggctccactcatgctgaagcattgctgaaagctgcaatagaatatggcacggaagaagatgtagtaaagtcaaagaaaacattcagaagtcaagcaatagtgaaccaaaatgcagagacagaacttatgctggaaggagacgatgatgcagtcagtctgctacaggagaaagaaattgacaaccttgcaggcccagtggttctcagcacccctgcccagctcatcgctcccgtggtggtggccaaggggactctctccatcaccacgacagaaatctacttcgaggtagatgaggatgattctgccttcaagaagatcgacacgaaagttcttgcatacactgagggacttcacggaaaatggatgttcagcgagatacgagctgtattttcaagacgttaccttctacaaaacactgctttggaagtatttatggcaaaccgaacctcagttatgtttaatttccctgatcaagcaacagtaaaaaaagttgtctatagcttgcctcgggttggagtagggaccagctatggtctgccacaagccaggaggatatcattggccactcctcgacagctttataaatcttccaatatgactcagcgctggcaaagaagggaaatttcaaacttcgaatatttgatgttccttaatactattgcaggacggacatataatgatctgaaccaatatccagtgtttccgtgggtgttaaccaactatgaatcagaagagttggacctgactcttccaggaaacttcagggatctatcaaagccaattggtgctttgaaccccaagagagctgtgttttatgcagagcgttatgagacatgggaagatgatcaaagcccaccctaccattataatacccattattcaacagcaacatctactttatcctggcttgttcgaattgaacctttcacaaccttcttcctcaatgcaaatgatggaaaatttgatcatccagatcgaaccttctcatccgttgcaaggtcttggagaactagtcagagagatacttctgatgtaaaggaactaattccagagttctactacctaccagagatgtttgtcaacagtaatggatataatcttggagtcagagaagatgaagtagtggtaaatgatgttgatcttcccccttgggcaaaaaaacctgaagactttgtgcggatcaacaggatggccctagaaagtgaatttgtttcttgccaacttcatcagtggatcgaccttatatttggctataagcagcgaggaccagaagcagttcgtgctctgaatgtttttcactacttgacttatgaaggctctgtgaacctggatagtatcactgatcctgtgctcagggaggccatggaggcacagatacagaactttggacagacgccatctcagttgcttattgagccacatccgcctcggagctctgccatgcacctgtgtttccttccacagagtccgctcatgtttaaagatcagatgcaacaggatgtgataatggtgctgaagtttccttcaaattctccagtaacccatgtggcagccaacactctgccccacttgaccatccccgcagtggtgacagtgacttgcagccgactctttgcagtgaatagatggcacaacacagtaggcctcagaggagctccaggatactccttggatcaagcccaccatcttcccattgaaatggatccattaatagccaataattcaggtgtaaacaaacggcagatcacagacctcgttgaccagagtatacaaatcaatgcacattgttttgtggtaacagcagataatcgctatattcttatctgtggattctgggataagagcttcagagtttattctacagaaacagggaaattgactcagattgtatttggccattgggatgtggtcacttgcttggccaggtccgagtcatacattggtggggactgctacatcgtgtccggatctcgagatgccaccctgctgctctggtactggagtgggcggcaccatatcataggagacaaccctaacagcagtgactatccggcaccaagagccgtcctcacaggccatgaccatgaagttgtctgtgtttctgtctgtgcagaacttgggcttgttatcagtggtgctaaagagggcccttgccttgtccacaccatcactggagatttgctgagagcccttgaaggaccagaaaactgcttattcccacgcttgatatctgtctccagcgaaggccactgtatcatatactatgaacgagggcgattcagtaatttcagcattaatgggaaacttttggctcaaatggagatcaatgattcaacacgggccattctcctgagcagtgacggccagaacctggtcaccggaggggacaatggggtagtagaggtctggcaggcctgtgacttcaagcaactgtacatttaccctggatgtgatgctggcattagagcaatggacttgtcccatgaccagaggactctgatcactggcatggcttctggtagcattgtagcttttaatatagattttaatcggtggcattatgagcatcagaacagatactgaagataaaggaagaaccaaaagccaagttaaagctgagagcacaagtgctgcatggaaaggcaatatctctggtggaaaaaactcgtctacatcgacctccgtttgtacattccatcacacccagcaatagctgtacattgtagtcagcaaccattttactttgtgtgttttttcacgactgaacaccagctgctatcaagcaagcttatatcatgtaaattatatgaattaggagatgttttggtaattatttcatatattgttgtttattgagaaaaggttgtaggatgtgtcacaagagacttttgacaattctgaggaaccttgtgtccagttgttacaaagtttaagctttgaacctaacctgcatcccatttccagcctcttttcaagctgagaaaaaaaaaaaaaaacacgtttgatactttgtacatcagatgcatcttatttaaaagggatacttttgtaaaagtaaaaccttgtataaagaacaaaatgtttcttaattttattgtggagttacaacttgcatgttccttactcctgttggcttgatggaacaggtgcattcacactatgaaacagaaagatctgtccaaggacacagcttgtatgaaagggttgaatttgggctccatcagtaatttttgacattttcaccaaaatatagtttgcactttttaatctaaagtcatcccttctgagtgaaatttgctcataaagcatttggatactaagccattatttgccattttgggtactttatacaaagaaaattcagccctaccctgcataatttgaagacacagcagaaagggggcttagggatgaggtcctggtttttcttgtataaataggagtcatgggcgttagttctgtagtaataacttcccagcacctggacatctcttccagagttatcccactggcttggtgtgtatacattaggggaggataatctgatgctaactttttttttctctttggttcttgaatagcttagtttctttaataacaagtcaaactttattacaacaataactgaagttattcttttaggttctcgtgaaattctcactgaaagccacattcttagcctaaggcatttcatcttttatgatataaaatgatggctatcaaatgattttccatacattgtactgatcaagttatacacccaggggtatatacactttcttcatgtttcttctttgtatatttggtgactgtatcgtcatagatgtacatattgtgtcggtagggctatgaggcatgttacaggaatgtaattttctcagaatttacactcactcgcagtcatttatttaaaaagataaaacaagataatgggttctttgtattggcactttgcaccagaaacatatcattatttattgatgtgattacttatttgttatccaccttgtactagtaagttttagcactgaattccttcttcactgttgtttgtatttatgaaattctgaaattatggggaatcagcgtaatgattaagttattcatcaccaggctgtaagcaatatcttgagtttgtagcttagaattgggaggatacttaacatctggaagacaagttcatttcatcttgagatcatggtgaaatattttggatatataaattccttaagctattgtaaccatgttttattgcaaagatgtaaaatatgccagatgtgtgtgagttggaaatcaaaaaaagaaaaataaaatatgcaaagaattca

SEQ ID NO: 293049 - DNA, 10692 bp, Artificial Sequence
  derived and/or modified sequence
gcggcgtcggggcttcacaacaacagtggtggccgtagcagcggccgggccgggctgaggcgcaggcggggagcgggcccggcgccgcggcgctggtggatgctggggctccgaggcgacggccggggggcgggggccgaggcaggtataacggtaccggcggcggcagcgccgctgctcttcccttctcctcaggaggggggccaatggctagcgagaagccgggcccgggcccggggctcgagcctcagcccgtggggctcattgccgtcggggccgctggcggaggcggcgggggcagcggtggtggcggcaccgggggcagcgggatgggggagctaaggggggcgtccggctccggctcggtgatgctccccgcggggatgattaacccttcggtgccgatccgcaacatccggatgaaattcgcagtgttgattggactcatacaggtcggagaggtcagcaacagggacatcgtggagacggtgctcaacctgctggttggtggagaatttgacttggagatgaactttattatccaggatgctgagagtataacatgtatgacagagcttttggagcactgtgatgtaacatgtcaagcagaaatatggagcatgtttacagccattctacgaaaaagtgttcggaatttacagactagcacagaagttgggctaattgaacaagtattgctgaaaatgagtgctgtagatgacatgatagcagatcttctagttgatatgttgggggttcttgccagctacagcatcactgtcaaggagttgaagcttttgttcagcatgcttcgaggagaaagtggaatctggccaagacatgcagtaaaattattatcagttcttaatcagatgccacagagacacggtcctgatacttttttcaatttccctggttgtagcgctgcggcaattgccttgcctcctattgcaaagtggccttatcagaatggcttcaccttaaacacttggtttcgtatggatccattaaataatattaatgttgataaggataaaccttatctttattgttttcgtactagcaaaggagttggttactctgctcattttgttggcaactgtttaatagtcacatcattgaagtccaaaggaaaaggttttcagcattgtgtgaaatatgattttcaaccacgcaagtggtacatgatcagcattgtccacatttacaatcgatggaggaacagtgaaattcggtgttatgttaatggacaactggtatcttatggtgatatggcttggcatgttaacacaaatgatagctatgacaagtgctttcttggatcatcagaaactgctgatgcaaatagggtattctgtggtcaacttggtgccgtgtatgtgttcagtgaagcactcaacccagcacagatatttgcaattcatcagttaggacctggatataagagtaccttcaagtttaaatctgagagtgatattcatttggcagaacatcataaacaggtgttatatgatgggaaacttgcaagtagcattgcctttacatataatgctaaggccactgatgctcagctctgcctggaatcatcaccaaaagagaatgcatcaatttttgtgcattccccacatgctctaatgcttcaggatgtgaaagcgatagtaacacattcaattcatagtgcaattcattcaattggagggattcaagtgctttttccactttttgcccaattggataataggcagctcaatgacagtcaagtggaaacaactgtctgtgctactctgttggcattcctggttgaactacttaaaagttcagtagccatgcaagaacagatgctgggtggaaaaggctttttagtcattggctacttacttgaaaagtcatcaagagttcatataactagagctgtcctggagcaatttttatcttttgcaaaataccttgatggtttatctcatggagcacctttgctgaagcagctttgtgatcacattttatttaacccagccatctggatacatacacctgcaaaggttcagctttccctatacacatatttgtctgctgaatttattggaactgctaccatctacaccaccatacgcagagtaggaacagtattacagctaatgcacaccttaaaatattactactgggttattaatcctgctgacagtagtggcattacacctaaaggattagatggtccccggccatcacaaaaagaaattatatcactgagggcatttatgctactttttctgaaacagctgatactaaaggatcgaggggtcaaggaagatgaacttcagagtatattaaattacctacttacgatgcatgaggatgaaaatattcatgatgtgctacagttactggtggctttaatgtcggaacacccagcctcaatgataccagcatttgatcaaagaaatggaataagggtgatctacaaattattggcttctaaaagtgaaagtatttgggttcaagctttgaaggttctgggatactttctgaagcatttaggtcacaagagaaaagttgaaattatgcacacccatagtcttttcactcttcttggagaaaggctgatgttgcatacaaacactgtgactgtcaccacatacaacacactttatgagatcttgacagaacaagtatgtactcaggtcgtacacaaaccacatccagagccagattctacagtgaaaattcagaatccaatgattcttaaagtggtggcaactttgttaaaaaactctacaccaagtgcagagctgatggaagttcgtcgtttatttttatctgatatgataaaacttttcagtaacagccgtgaaaatagaagatgcttattgcagtgttcagtgtggcaggattggatgttttctcttggctatatcaatcctaaaaattctgaggaacagaagattaccgaaatggtctacaatatcttccggattcttttgtatcatgcaataaaatatgaatggggaggctggagagtctgggtggataccctctcaatagcccattccaaggtcacttatgaagctcataaggaatacctagccaaaatgtatgaggaatatcaaagacaagaggaggaaaacattaaaaagggaaagaaagggaatgtgagcaccatctctggtctttcatcacagacaacaggagcaaaaggtggaatggaaattcgagagatagaagatctttcacaaagccagagcccagaaagtgagaccgattaccctgtcagcacagatactcgagacttactcatgtcaacaaaagtgtcagatgatattcttggaaattcagatagaccaggaagtggtgtacatgtggaagtacatgatcttttagtagatataaaagcagagaaagtggaagcaacagaagtaaagctcgatgatatggatttatcaccggagactttagtaggtggagagaatggtgcccttgtggaggttgaatctctgttggataatgtatatagtgctgctgttgagaaactccagaacaatgtacatggaagtgttggtatcattaaaaaaaatgaagaaaaggataatggtccattgataacattagcagatgagaaagaagaccttcccaatagtagtacatcatttctctttgataaaatacccaaacaggaggaaaaactacttcctgaactttctagcaatcacattattccaaatattcaggacacacaagtacatcttggtgttagtgatgatcttggattgcttgctcacatgaccggtagcgtagacttaacttgtacatccagtataatagaagaaaaagaattcaaaatccatacaacttcagatggaatgagcagtatttctgaaagagacttagcgtcatcaactaaggggctggagtatgctgaaatgactgctacaactctggaaactgagtcttctagtagcaaaattgtaccaaatattgatgcaggaagtataatttcagatactgaaaggtctgacgatggcaaagaatcaggaaaagaaatccgaaaaatccaaacaactactacgacacaagctgtgcagggtcggtctatcacccaacaagaccgagatctccgagttgatttaggatttcgaggaatgccaatgactgaggaacagcgacgccagtttagcccaggtccacggactacaatgtttcgtattcctgagtttaaatggtctccaatgcaccagcggcttctcactgatttactatttgcattagaaactgatgtacatgtttggaggagccattctacaaagtctgtaatggattttgtcaatagcaatgaaaatattatttttgtacataacacaattcacctcatttcccaaatggtagacaacatcatcattgcttgtggaggaattttacctttgctctctgctgctacatcaccaactacggaattggaaaatattgaagtgacacaaggcatgtcagctgagacagcagtaactttcctcagccggctgatggctatggttgatgtacttgtgtttgcaagctctctaaattttagtgagattgaagctgagaaaaacatgtcttctggaggtttaatgcgacagtgcctaagattagtttgttgtgttgctgtgagaaactgtttagaatgtcggcaaagacagagagacaggggaaataaatcttcccatggaagcagtaaacctcaggaagttcctcaaagtgtgactgctacagcagcttcgaagactccattggaaaatgttccaggtaacctttctcctattaaggatccggatagacttcttcaggatgttgatatcaatcgccttcgtgctgttgtctttcgggatgtggatgatagcaaacaagcacagttcttagctctggctgttgtttacttcatttcggttctgatggtttccaagtatcgtgacatattagaaccccagagagagactacaagaactggaagccaaccaggtagaaacatcaggcaagaaataaattcaccaacaagtacagaaacacctgctgcatttccagacaccataaaagaaaaagaaacaccaactcctggtgaagatattcaggtagaaagttcaattccccatacagattcaggaattggagaggagcaagtggctagcatcctgaatggggcagaattagaaacaagtacaggccctgatgccatgagtgaactcttatccactttgtcatccgaagtgaagaaatcacaagagagcttaactgaaaatcctagtgaaacgttgaagcctgcaacatccatatctagcattagtcaaaccaaaggcatcaatgtgaaggaaatactgaaaagtcttgtggctgctccagttgaaatagcagaatgtggccctgaacctatcccatacccagatccagcattgaagagagaaacacaagctattcttcctatgcagtttcattcctttgacaggagtgttgtggtgcctgtaaagaaaccacctccaggtagtttagctgtaaccactgtgggagccactactgctggaagtgggctgccaacaggcagtacctctaatatatttgctgctactggagctacaccaaaaagtatgattaatacaacaggtgccgtggattcagggtcctcctcctcttcctcctcttctagttttgtgaatggtgctactagcaaaaaccttccagctgtacaaactgttgctccaatgccagaagattcagctgaaaatatgagcatcactgcaaaacttgaaagagcgttagaaaaagttgctcctcttcttcgtgaaatttttgtagactttgccccattcctatctcgtacacttcttggcagtcatggacaagagctattgatagaaggccttgtttgtatgaagtccagcacatctgtggttgagcttgttatgctgctttgttctcaggaatggcaaaactctattcagaagaatgcaggacttgcatttattgagctcatcaatgaaggaagattactgtgccatgctatgaaggaccatatagtccgtgttgcaaatgaagctgagtttattttgaacagacaaagagccgaggatgtacataaacatgcagagtttgagtcacagtgtgcccaatatgctgctgatagaagagaggaagaaaagatgtgtgaccatcttatcagtgctgctaaacatcgagatcatgtaacagcaaatcagctgaaacagaagattctcaatattctcacaaataaacatggtgcttggggagcagtttctcatagccaattgcatgatttctggcgtttggattactgggaagatgatcttcgtcgaaggagacgatttgttcgcaatgcatttggctccactcatgctgaagcattgctgaaagctgcaatagaatatggcacggaagaagatgtagtaaagtcaaagaaaacattcagaagtcaagcaatagtgaaccaaaatgcagagacagaacttatgctggaaggagacgatgatgcagtcagtctgctacaggagaaagaaattgacaaccttgcaggcccagtggttctcagcacccctgcccagctcatcgctcccgtggtggtggccaaggggactctctccatcaccacgacagaaatctacttcgaggtagatgaggatgattctgccttcaagaagatcgacacgaaagttcttgcatacactgagggacttcacggaaaatggatgttcagcgagatacgagctgtattttcaagacgttaccttctacaaaacactgctttggaagtatttatggcaaaccgaacctcagttatgtttaatttccctgatcaagcaacagtaaaaaaagttgtctatagcttgcctcgggttggagtagggaccagctatggtctgccacaagccaggaggatatcattggccactcctcgacagctttataaatcttccaatatgactcagcgctggcaaagaagggaaatttcaaacttcgaatatttgatgttccttaatactattgcaggacggacatataatgatctgaaccaatatccagtgtttccgtgggtgttaaccaactatgaatcagaagagttggacctgactcttccaggaaacttcagggatctatcaaagccaattggtgctttgaaccccaagagagctgtgttttatgcagagcgttatgagacatgggaagatgatcaaagcccaccctaccattataatacccattattcaacagcaacatctactttatcctggcttgttcgaattgaacctttcacaaccttcttcctcaatgcaaatgatggaaaatttgatcatccagatcgaaccttctcatccgttgcaaggtcttggagaactagtcagagagatacttctgatgtaaaggaactaattccagagttctactacctaccagagatgtttgtcaacagtaatggatataatcttggagtcagagaagatgaagtagtggtaaatgatgttgatcttcccccttgggcaaaaaaacctgaagactttgtgcggatcaacaggatggccctagaaagtgaatttgtttcttgccaacttcatcagtggatcgaccttatatttggctataagcagcgaggaccagaagcagttcgtgctctgaatgtttttcactacttgacttatgaaggctctgtgaacctggatagtatcactgatcctgtgctcagggaggccatggaggcacagatacagaactttggacagacgccatctcagttgcttattgagccacatccgcctcggagctctgccatgcacctgtgtttccttccacagagtccgctcatgtttaaagatcagatgcaacaggatgtgataatggtgctgaagtttccttcaaattctccagtaacccatgtggcagccaacactctgccccacttgaccatccccgcagtggtgacagtgacttgcagccgactctttgcagtgaatagatggcacaacacagtaggcctcagaggagctccaggatactccttggatcaagcccaccatcttcccattgaaatggatccattaatagccaataattcaggtgtaaacaaacggcagatcacagacctcgttgaccagagtatacaaatcaatgcacattgttttgtggtaacagcagataatcgctatattcttatctgtggattctgggataagagcttcagagtttattctacagaaacagggaaattgactcagattgtatttggccattgggatgtggtcacttgcttggccaggtccgagtcatacattggtggggactgctacatcgtgtccggatctcgagatgccaccctgctgctctggtactggagtgggcggcaccatatcataggagacaaccctaacagcagtgagtgtgactatccggcaccaagagccgtcctcacaggccatgaccatgaagttgtctgtgtttctgtctgtgcagaacttgggcttgttatcagtggtgctaaagagggcccttgccttgtccacaccatcactggagatttgctgagagcccttgaaggaccagaaaactgcttattcccacgcttgatatctgtctccagcgaaggccactgtatcatatactatgaacgagggcgattcagtaatttcagcattaatgggaaacttttggctcaaatggagatcaatgattcaacacgggccattctcctgagcagtgacggccagaacctggtcaccggaggggacaatggggtagtagaggtctggcaggcctgtgacttcaagcaactgtacatttaccctggatgtgatgctggcattagagcaatggacttgtcccatgaccagaggactctgatcactggcatggcttctggtagcattgtagcttttaatatagattttaatcggtggcattatgagcatcagaacagatactgaagataaaggaagaaccaaaagccaagttaaagctgagagcacaagtgctgcatggaaaggcaatatctctggtggaaaaaactcgtctacatcgacctccgtttgtacattccatcacacccagcaatagctgtacattgtagtcagcaaccattttactttgtgtgttttttcacgactgaacaccagctgctatcaagcaagcttatatcatgtaaattatatgaattaggagatgttttggtaattatttcatatattgttgtttattgagaaaaggttgtaggatgtgtcacaagagacttttgacaattctgaggaaccttgtgtccagttgttacaaagtttaagctttgaacctaacctgcatcccatttccagcctcttttcaagctgagaaaaaaaaaaaaaaacacgtttgatactttgtacatcagatgcatcttatttaaaagggatacttttgtaaaagtaaaaccttgtataaagaacaaaatgtttcttaattttattgtggagttacaacttgcatgttccttactcctgttggcttgatggaacaggtgcattcacactatgaaacagaaagatctgtccaaggacacagcttgtatgaaagggttgaatttgggctccatcagtaatttttgacattttcaccaaaatatagtttgcactttttaatctaaagtcatcccttctgagtgaaatttgctcataaagcatttggatactaagccattatttgccattttgggtactttatacaaagaaaattcagccctaccctgcataatttgaagacacagcagaaagggggcttagggatgaggtcctggtttttcttgtataaataggagtcatgggcgttagttctgtagtaataacttcccagcacctggacatctcttccagagttatcccactggcttggtgtgtatacattaggggaggataatctgatgctaactttttttttctctttggttcttgaatagcttagtttctttaataacaagtcaaactttattacaacaataactgaagttattcttttaggttctcgtgaaattctcactgaaagccacattcttagcctaaggcatttcatcttttatgatataaaatgatggctatcaaatgattttccatacattgtactgatcaagttatacacccaggggtatatacactttcttcatgtttcttctttgtatatttggtgactgtatcgtcatagatgtacatattgtgtcggtagggctatgaggcatgttacaggaatgtaattttctcagaatttacactcactcgcagtcatttatttaaaaagataaaacaagataatgggttctttgtattggcactttgcaccagaaacatatcattatttattgatgtgattacttatttgttatccaccttgtactagtaagttttagcactgaattccttcttcactgttgtttgtatttatgaaattctgaaattatggggaatcagcgtaatgattaagttattcatcaccaggctgtaagcaatatcttgagtttgtagcttagaattgggaggatacttaacatctggaagacaagttcatttcatcttgagatcatggtgaaatattttggatatataaattccttaagctattgtaaccatgttttattgcaaagatgtaaaatatgccagatgtgtgtgagttggaaatcaaaaaaagaaaaataaaatatgcaaagaattc

SEQ ID NO: 293050 - DNA, 2888 bp, Artificial Sequence
  derived and/or modified sequence
aatcgccactgggctcgtcacgacagcctccttcagctccaacccggctaattaatccccactcatggatataggcacacaaactaaaggttcttgcatacactgagggacttcacggaaaatggatgttcagcgagatacgagctgtattttcaagacgttaccttctacaaaacactgctttggaagtatttatggcaaaccgaacctcagttatgtttaatttccctgatcaagcaacagtaaaaaaagttgtctatagcttgcctcgggttggagtagggaccagctatggtctgccacaagccaggaggatatcattggccactcctcgacagctttataaatcttccaatatgactcagcgctggcaaagaagggaaatttcaaacttcgaatatttgatgttccttaatactattgcaggacggacatataatgatctgaaccaatatccagtgtttccgtgggtgttaaccaactatgaatcagaagagttggacctgactcttccaggaaacttcagggatctatcaaagccaattggtgctttgaaccccaagagagctgtgttttatgcagagcgttatgagacatgggaagatgatcaaagcccaccctaccattataatacccattattcaacagcaacatctactttatcctggcttgttcgaattgaacctttcacaaccttcttcctcaatgcaaatgatggaaaatttgatcatccagatcgaaccttctcatccgttgcaaggtcttggagaactagtcagagagatacttctgatgtaaaggaactaattccagagttctactacctaccagagatgtttgtcaacagtaatggatataatcttggagtcagagaagatgaagtagtggtaaatgatgttgatcttcccccttgggcaaaaaaacctgaagactttgtgcggatcaacaggatggccctagaaagtgaatttgtttcttgccaacttcatcagtggatcgaccttatatttggctataagcagcgaggaccagaagcagttcgtgctctgaatgtttttcactacttgacttatgaaggctctgtgaacctggatagtatcactgatcctgtgctcagggaggccatggaggcacagatacagaactttggacagacgccatctcagttgcttattgagccacatccgcctcggagctctgccatgcacctgtgtttccttccacagagtccgctcatgtttaaagatcagatgcaacaggatgtgataatggtgctgaagtttccttcaaattctccagtaacccatgtggcagccaacactctgccccacttgaccatccccgcagtggtgacagtgacttgcagccgactctttgcagtgaatagatggcacaacacagtaggcctcagaggagctccaggatactccttggatcaagcccaccatcttcccattgaaatggatccattaatagccaataattcaggtgtaaacaaacggcagatcacagacctcgttgaccagagtatacaaatcaatgcacattgttttgtggtaacagcagataatcgctatattcttatctgtggattctgggataagagcttcagagtttattctacagaaacagggaaattgactcagattgtatttggccattgggatgtggtcacttgcttggccaggtccgagtcatacattggtggggactgctacatcgtgtccggatctcgagatgccaccctgctgctctggtactggagtgggcggcaccatatcataggagacaaccctaacagcagtgactatccggcaccaagagccgtcctcacaggccatgaccatgaagttgtctgtgtttctgtctgtgcagaacttgggcttgttatcagtggtgctaaagagggcccttgccttgtccacaccatcactggagatttgctgagagcccttgaaggaccagaaaactgcttattcccacgcttgatatctgtctccagcgaaggccactgtatcatatactatgaacgagggcgattcagtaatttcagcattaatgggaaacttttggctcaaatggagatcaatgattcaacacgggccattctcctgagcagtgacggccagaacctggtcaccggaggggacaatggggtagtagaggtctggcaggcctgtgacttcaagcaactgtacatttaccctggatgtgatgctggcattagagcaatggacttgtcccatgaccagaggactctgatcactggcatggcttctggtagcattgtagcttttaatatagattttaatcggtggcattatgagcatcagaacagatactgaagataaaggaagaaccaaaagccaagttaaagctgagagcacaagtgctgcatggaaaggcaatatctctggtggaaaaaactcgtctacatcgacctccgtttgtacattccatcacacccagcaatagctgtacattgtagtcagcaaccattttactttgtgtgttttttcacgactgaacaccagctgctatcaagcaagcttatatcatgtaaattatatgaattaggagatgttttggtaattatttcatatattgttgtttattgagaaaaggttgtaggatgtgtcacaagagacttttgacaattctgaggaaccttgtgtccagttgttacaaagtttaagctttgaacctaacctgcatcccatttccagcctcttttcaagctgagaaaaaaaaaaaaaaacacgtttgatactttgtacatcagatgcatcttatttaaaagggatacttttgtaaaagtaaaaccttgtataaagaacaaaatgtttcttaattttattgtggagttacaacttgcatgttccttactc

SEQ ID NO: 293051 - DNA, 8831 bp, Artificial Sequence
  derived and/or modified sequence
atggcttccgagaagcctggacccggacctggattggaaccgcagcccgttggcctgatcgcagtcggcgctgccggaggtggcggagggggatctggtggaggagggactggcggttctggaatgggtgagcttaggggtgccagtggctccggaagcgttatgctccctgccggtatgattaatccatctgtgccaattaggaacatccggatgaaatttgcagtgctgatcggcctgatccaggtgggagaggtgagcaaccgcgacattgtcgagaccgttctgaatctccttgtaggaggtgagttcgacttggagatgaatttcattatccaggacgctgagtcaataacctgtatgactgaactgttagaacactgcgatgtgacttgccaagcagagatctggagcatgttcaccgccatcctgcgcaaaagcgtgcggaacctgcagacgtctacagaggtgggccttattgagcaggttctcctgaagatgtccgccgttgacgacatgatcgcagacttactggtggatatgctgggcgtccttgcgagttatagtatcaccgttaaagaactcaagctgctgttcagcatgctcaggggcgaatccgggatctggcctagacatgccgtgaagctccttagcgtgttgaaccaaatgcctcagagacatggtccagataccttcttcaatttccccggttgctccgccgctgcaattgctctccctccaatcgctaaatggccataccagaatgggtttaccctgaatacctggtttcgcatggaccctcttaataatattaatgtcgataaagacaagccttatctctactgcttccgcacatctaaaggcgtaggctactctgcgcactttgtgggcaattgtcttatcgtgaccagcctgaagtctaaaggtaaggggttccagcactgtgttaagtacgatttccagcccagaaaatggtacatgataagcatcgtacacatctacaaccggtggcgcaactccgagatacggtgttacgttaacggccagctcgtgagttatggagatatggcttggcatgtaaacaccaacgattcttatgacaaatgtttccttggctcatccgagaccgctgatgccaacagagtgttctgcggtcagctgggcgctgtatatgtcttctcagaagccctaaatcccgcacaaatcttcgcaatacatcagttaggacctggctataagtcaacatttaagtttaaaagcgagtccgatatccatttagcagaacatcataagcaggtgctgtacgatggtaagctggcatcttcaatcgcctttacttacaacgcaaaggccactgatgcccagctttgcctcgaatcttccccaaaagagaatgcatctatctttgtgcactccccccacgctctcatgttacaagacgtgaaagctatcgttacccacagtatccactccgccattcactcaattggaggaatccaggtgcttttccctcttttcgcacagttggataacagacagctcaatgattcacaggtcgagaccacggtgtgtgccaccctccttgcctttctggtcgagctgctgaagagctccgtggccatgcaggagcagatgctgggagggaagggttttctggtcattggctatctgctcgagaagtcatctagggtacacatcacccgcgcagtattggagcagtttctcagcttcgccaaatatttagacggtctctcccacggggctcccctgcttaaacagctttgcgaccacattctctttaatccagccatttggatccacacacccgcaaaagtccaactatcactatatacatatctttcggcagagttcatagggacagccacgatttatacaacgattaggcgggtcgggacggtgcttcaactgatgcacacccttaaatattactactgggtcataaatccagccgactcatccggaatcacaccaaagggactggacggcccacgtccttcacagaaagaaataatctctctcagggctttcatgctgctgttcttgaagcagctgatccttaaggacagaggagtgaaggaagatgagttgcagagcatactcaattacctgttgaccatgcatgaggacgaaaatatccatgatgtgctgcagctattggtcgccttgatgtccgaacatcctgcatcaatgattcctgcgtttgatcagagaaatggtattagggtaatttataagcttctcgcatcaaagtctgagtccatctgggttcaggccctaaaggtgctggggtatttcttgaagcacctgggccataagcggaaggttgaaataatgcatacacattccctgttcacccttctgggcgagcggttaatgctccatactaatacggttactgtaaccacctacaatactctctatgagatcctgactgaacaggtgtgcacccaggtagttcataagcctcaccccgagcctgactcaacggtcaagatccagaacccaatgattcttaaagtggtggctactctcctcaaaaattctactcctagcgccgaactgatggaagtcagacgcctgttcctttctgatatgattaaattgttttcaaattcacgggagaaccgaagatgccttcttcagtgctctgtgtggcaggactggatgttctcgttggggtacattaaccctaagaactctgaggagcagaaaattacagaaatggtctacaacatttttcgcattttgctgtaccatgccataaaatacgaatggggcggttggcgggtatgggtggataccctgtctatcgcccacagtaaggtgacatacgaagcccataaagagtacttagcaaaaatgtatgaagaatatcagcggcaggaagaagagaacattaaaaagggcaaaaagggcaatgtaagcacaatatccgggctgtcctcacagactactggggcaaaaggcggaatggaaatcagagagatagaggacttaagtcaatcgcagtctcccgagtctgagacagactatcccgtgtccacggacactagagatttgctcatgagcactaaagtctctgacgacattctgggaaatagcgaccggccaggaagcggtgtccacgtcgaagtccatgacttactagttgacataaaggccgaaaaggtggaggccacagaggtgaaactggatgacatggacctcagcccagagactctcgttggaggcgagaacggcgcactggtggaagtggaatctcttctggataatgtgtactctgccgcagttgagaaacttcagaataatgtgcatggctccgtcggtataattaaaaagaatgaagaaaaggacaatgggcctcttattaccctggcggatgagaaggaggatctaccgaactcttcgaccagcttcctcttcgataaaattccaaagcaggaagagaagctgttgcccgaacttagctctaatcacattatccccaacatccaggatacgcaggtacacttgggggtgtcggatgacctcgggcttctggcacatatgaccggcagtgtggatcttacatgcacctcttctattatcgaggaaaaagagttcaaaattcatactacctctgatgggatgagcagtatctcagagagagacctggcgtccagtaccaagggccttgagtacgccgaaatgacggcaaccacactcgagaccgagtctagctcctccaaaatagtgccgaacatcgacgccggttctatcatatccgacactgagcggtccgacgacggcaaagagagcgggaaagagatcagaaaaattcaaactacaaccacaactcaggccgtgcaaggcaggtccatcacccagcaggatagagacctgagagtagacctgggtttcaggggaatgcccatgacggaagagcagagacgccagttcagccccggaccgagaaccaccatgttccgaattcctgagtttaaatggtctccaatgcatcagcgcctcctgactgatttactcttcgcactggagacggacgtccacgtctggagaagtcattctaccaaaagcgtcatggattttgtcaatagcaacgagaacatcattttcgtgcacaataccatccacctgattagccagatggtcgacaatatcattattgcatgcggcggaatactgcctctcttgtccgctgccacttcacctaccactgaactggagaacatagaggtaacgcaggggatgtccgccgagacggccgtgaccttcctctctcgactcatggccatggttgatgtcctagtttttgcctctagcctcaacttctctgagatcgaggctgagaaaaacatgagctcaggaggccttatgcgccagtgcctgcgcctcgtatgttgcgtggcagttcgaaattgtttagaatgtaggcagaggcagcgtgacagagggaacaagtcgagccacggaagctctaagccacaggaagtgcctcagagcgtaacagccactgccgcatccaagacgccccttgaaaatgttcctggaaacctatctcctattaaggacccagatcgcctactgcaggacgtggacatcaacagacttcgtgccgtcgtgtttagagatgttgacgacagtaagcaggcgcagtttctggcactggcggtcgtgtatttcatcagtgtgctcatggttagtaagtaccgggacatcctggaaccacagagagaaacaacacgtactggtagccagcccggaagaaacattcgccaggagattaactcccccacaagtacagttgtggttatcccttccatcccacatccgtctctcaaccatgggttcctcgctaagctgattccagagcaatcctttggtcattcattctataaggagacacccgctgccttccctgatacaattaaggagaaggagacacctactcccggagaggatatccaggttgagtcaagcatcccacacaccgattccggaattggcgaagagcaggttgccagcatattaaacggagccgaactggaaaccagtacaggtcccgacgctatgagtgagcttttgtccaccctaagcagcgaagttaagaagtcccaggagtcattaaccgagaaccccagtgagacattgaaaccagcaacgagcatttccagcatctcgcagaccaagggcataaatgtcaaagaaattttgaagagtttggtggctgccccagtggagatcgccgaatgtggacctgaacccatcccttatcctgatccggctctgaaacgagaaacccaagccatcttgccaatgcagttccattcgttcgataggtcagtagtagtccccgtcaagaaacctccacccggaagcctagctgtgactacagtaggtgccactactgccggatccggccttcctacaggatctacatctaatattttcgcggctacaggtgccactcctaaatcaatgattaataccacaggggctgtcgactctggttccagtagctcctccagttcctcctcttttgtgaacggagctacctcaaagaacctacccgctgtgcaaacggttgcaccaatgcccgaggactcagccgaaaatatgagcatcactgctaaactcgaaagggctctggagaaagtagcccctttgctccgggagattttcgtggatttcgcaccttttctctcaaggaccttgctcggctcacacggacaggagctgctaatcgagggcctggtttgtatgaaatcaagcacctcagtcgtcgaacttgtgatgctattgtgttctcaggaatggcagaactccattcagaaaaacgctggactggctttcatcgaactaatcaatgaaggcaggctgctctgccacgcgatgaaggatcacatagtcagggtggccaatgaagccgagttcatattaaatagacaacgtgcagaggacgtgcacaagcatgcagagtttgagtcgcagtgtgctcaatatgccgctgatcggcgagaagaagaaaaaatgtgtgaccacctgatctctgcagcaaaacacagggatcacgttacagccaaccagttgaagcagaagatcctcaacatcttgaccaataaacacggcgcttggggtgccgtcagtcacagtcagttacacgatttttggcgcctggattattgggaagacgatctccgcagaagacgcagattcgtcagaaacgccttcggcagtacccatgccgaggcactgcttaaggctgcgatcgagtacgggacagaggaagacgtggtcaagagcaagaaaactttcagatcacaagccatcgtgaatcaaaacgccgaaacagagctaatgctcgaaggcgacgacgatgccgtgtctttgttacaggagaaagagatagacaaccttgctggccctgtggtgctatccacacccgctcaactgatcgctccagtggttgtcgccaagggtactctaagcataacaaccacagaaatctactttgaggtggacgaggatgactcagcctttaaaaagatcgacacaaaagtgctggcgtacactgaaggcctgcatggaaagtggatgtttagcgaaattcgcgcagtgttttctagaaggtacctgcttcaaaacaccgctctggaggtgttcatggcaaatcgaaccagcgtgatgttcaacttcccagaccaggcaactgtgaagaaggtggtgtactccctgccaagagtcggggtgggcacaagctacggattgcctcaggcccgtaggatttccctcgccacccctcgccagttgtataaatccagtaacatgacacagcggtggcagaggcgcgagattagcaactttgaatatctcatgtttcttaacacgattgcaggcaggacatataacgacctcaatcagtacccagtctttccctgggttctaaccaactacgagtccgaagagctggatctcacgctacctgggaatttccgcgatctgagcaaacccatcggtgccctcaatcctaagagagctgtgttttatgcagagcgatacgaaacatgggaggatgaccagagccccccttaccattacaacactcattatagcactgcgactagcactcttagctggttggtccgaattgaacctttcactaccttcttcttgaacgccaacgatggaaaattcgatcatcctgatcgcaccttttcgagtgttgcacgcagttggcgcacctcccagagggacactagtgatgtgaaggagctgatccccgagttctactacttgcccgagatgtttgtcaattccaatggctataatctgggcgttagagaagacgaagttgtagtgaatgacgtggacctccccccttgggccaagaaaccagaggacttcgtgagaatcaatagaatggctcttgaatccgagttcgttagctgtcagctccaccaatggatagaccttatcttcggttacaagcagcggggtcccgaggccgtgagggctcttaacgtctttcactaccttacctatgaaggctctgtgaatctcgactcgatcaccgatcccgtgctgcgtgaagcaatggaggcccaaattcaaaacttcgggcagaccccaagtcagctgctgattgaaccccatccgcctcgaagttctgcgatgcacttgtgtttcctgccccagagccccctgatgtttaaggatcaaatgcagcaagatgtaatcatggtcctaaagtttccctctaacagccccgtaacccatgtagcagctaatacactgccgcacctgacaatccccgctgtggttactgtgacctgctctcgcttgttcgcagtcaaccggtggcataacactgtaggtctgcggggagcccctggctattctctggaccaggctcaccacctgcctatcgagatggacccactcattgcgaataattcaggcgtaaacaagcgacagattaccgacttagtggaccagtctatacagattaacgcacactgcttcgtggtaaccgcggataatagatacatcctgatctgcgggttctgggataagtcctttcgtgtgtacagtacagagacaggcaaattaactcagattgtctttgggcattgggacgtagttacgtgcctagccaggagtgagtcttatattgggggagactgctacatcgtttccggctcaagggacgccactctgctgctctggtactggtcagggcgacaccatatcatcggtgataacccaaacagtagtgactatcctgctccgagagccgtgcttaccggccacgaccatgaggtggtatgcgttagtgtatgtgcagagctgggtctagtgatatctggagccaaagaaggcccttgcctggtacacaccatcaccggcgatttgctcagagctcttgaaggtcccgagaactgcctgttccccaggcttatctccgtgtcctccgagggccactgcattatatattatgagcggggaaggttttccaattttagtatcaacgggaagctgctcgcccagatggaaatcaatgactccaccagagccatcctactttcctcagatgggcagaatttggtgaccggcggtgacaatggggtcgtggaggtctggcaggcatgcgatttcaaacagctatacatttacccaggctgcgatgccggaattcgcgcaatggaccttagtcatgaccagcggactctaattaccgggatggcttctggctccattgtagcctttaacattgacttcaaccggtggcactacgaacaccaaaatcggtatta

SEQ ID NO: 293052 - DNA, 4727 bp, Artificial Sequence
  derived and/or modified sequence
atgcatcaacgtcttttaaccgacttgctcttcgccctggaaaccgacgtacacgtgtggagatctcactccaccaagtctgtaatggattttgttaattccaacgaaaatataattttcgttcacaacacgattcacctaatcagccagatggtggataatatcattattgcatgcggaggcatccttcccctgctgtcagctgccacatcaccaactactgaattggagaacattgaagtgactcaggggatgagcgccgagactgccgtgactttcttgtcccgccttatggccatggtggacgtgctggtgttcgctagctctctcaacttttcagagattgaagccgagaagaacatgtcctcagggggattgatgcggcagtgtctacggttggtgtgttgcgtggctgtacggaattgcctggagtgtcgacagcgacagcgtgataggggcaataaaagtagccatggttccagcaagccccaagaggtgccgcaaagtgtcacagccacagcagcatccaagaccccactcgagaacgtacccggtaatttgagcccaatcaaagatcccgatcgcctgttgcaggatgtggacattaaccgattgcgagcagtggtgtttagagatgtggatgactcgaagcaagctcagttcctggcgcttgcagtagtttatttcatttcagtccttatggtgtctaagtatagagacattcttgaaccccagagagagacgactcgcacgggatctcagcctggcagaaacattcgacaggaaatcaattcccctaccagtactgaaaccccggcagctttccctgacaccattaaggagaaggagacccccacccccggtgaagacatccaggttgagtcctctattcctcacactgactctggcataggggaggagcaggtcgcatctatactcaacggggctgaactcgagaccagcacaggaccagatgccatgtccgaattgcttagtacactttcttctgaggtgaaaaagtcccaggagagcctcaccgagaatccttccgagaccctcaagccagctacaagcatctccagcatttcacagacgaaaggaatcaacgttaaggaaattctcaagtccttggtggcggctcccgtggagatagccgaatgtgggccagagcctattccttaccctgatcccgctctgaagcgggagacccaagccattttgccaatgcaattccattcatttgatcggagtgttgtggtacctgtcaagaagcccccaccaggatctctggcagtgacaactgtgggggctacgaccgccggttccggactgccaaccgggtccacttctaacatttttgccgcaacaggtgctacgcccaagagcatgattaatacgacaggcgctgttgacagtggatcctcatcttctagctcttcttcatcattcgtgaacggcgcaactagcaaaaacctgccagctgtgcagacagtggcgccaatgccagaggatagcgccgagaacatgtcaattaccgcaaaattagaacgggcactcgaaaaggtcgcccctctcctccgggagatttttgtggatttcgctcctttcctatcacgcaccctgctgggcagccatggacaagaactcttgatcgagggactggtttgtatgaagagtagtacgagcgtggtggagctggtcatgctcctctgctctcaggagtggcagaatagtattcagaaaaatgccggtctcgcttttatcgaactgattaacgaaggcaggttgttgtgtcatgcaatgaaggaccacatcgtacgcgttgctaacgaggccgagttcattctaaatcgccagagggccgaggatgttcacaaacacgctgaattcgaatctcaatgcgcacagtatgctgcggacagacgggaagaggaaaaaatgtgcgatcatctgatcagcgctgctaagcatagagaccatgtgacggccaatcaattgaaacagaagatacttaacatccttacgaacaaacacggcgcttggggagcagtttctcattcccagctgcacgacttctggaggcttgattattgggaggacgacctgcgccgaaggaggaggttcgttcgcaatgctttcgggtccacgcacgcagaggctctcctgaaggctgccatcgaatatggtaccgaagaggacgtggtcaagtctaagaaaaccttccgcagccaggcgatcgtaaaccaaaatgcagaaacagagttgatgctggagggagacgatgacgctgtgagcctgctccaagaaaaggagatcgacaaccttgctgggccagtggttctgagcactcctgctcagctgatagcacccgtcgttgtagcaaaggggaccctgagtatcactacgactgagatctactttgaggtcgacgaggatgactctgcttttaagaagatcgacacgaaggtgctcgcatacacagaagggttacatggaaaatggatgttctctgagatccgggcagtgttctccagaaggtatctactccagaacaccgccctggaagtgtttatggccaatcggacatctgttatgttcaacttcccggatcaggccaccgtgaaaaaagttgtttactctcttccaagagtaggcgtgggaaccagttatggccttcctcaggctcgccgaatttccctcgcaacccccagacagctgtataagtcgtctaacatgacacaacgctggcagcggagagaaatatcgaacttcgagtacctcatgtttctgaacaccattgcgggaagaacatacaacgatctcaaccagtacccagtctttccatgggtcctcaccaactacgagtctgaagagctggatctgactctgcccggaaacttccgggacctgtccaagccaatcggcgctctgaaccctaaaagagctgtcttttacgctgagaggtatgagacatgggaagacgatcagtctccaccttaccactacaacacccactatagcaccgcgacaagtaccctctcctggctggtgagaatagagcctttcaccactttttttttgaacgcaaatgatggcaagttcgatcacccagataggaccttctcctccgtcgcccgttcatggcggacttcccaacgagacacgagcgacgtgaaggaacttatccccgaattctactacttacccgaaatgttcgtgaactccaacggatacaatctcggagtgcgagaggacgaggttgtcgtgaatgatgtggacctgccaccctgggctaagaaacccgaagactttgttagaatcaatagaatggctctggagagcgaatttgtgagctgccagttacatcaatggattgatctcatctttggttacaagcaaagggggcctgaggccgttagagccctgaacgtgttccactacctcacctacgaaggtagcgttaacctggactccataacagatccagtgctccgtgaagctatggaagcccaaatccaaaactttggccagacgccttcccagctactgatagagccacacccgccacggagttccgcgatgcatctttgcttcttgccgcagtcaccgcttatgtttaaggatcagatgcagcaggacgtgatcatggtgttgaaatttccctccaattcccctgtgacccacgttgctgccaataccttacctcacctgaccattcccgcagtggtgactgtgacatgctcccggttatttgctgtgaacagatggcacaacactgttggtctgaggggtgcgccaggatactctttggaccaggctcatcacctgccaatcgagatggaccctttgatagctaataattcaggtgtgaataaaaggcagataacagaccttgttgatcaaagcattcagatcaacgcccattgcttcgtcgtgacagcagacaatcgatacattctcatttgcggcttctgggacaagtccttccgtgtctactccacggaaactggaaaattgacccagatagtcttcgggcattgggacgttgtgacttgccttgcgagatccgagtcctatatcgggggtgattgttacatcgtttctgggtctagggatgctacattgctcctctggtactggtctggacgacatcacatcattggcgacaacccgaattcaagcgagtgtgactatcctgcaccacgtgcagtattgactggccacgaccatgaggtggtgtgtgtgtctgtctgtgcagagctgggattagtgatttcgggtgcaaaggaggggccttgcctagttcacaccatcactggcgacctgctacgggctctggaggggccagaaaattgcttgtttcccagacttatctctgtgtctagcgaaggtcactgcatcatatattacgaaagggggcgatttagtaatttttccataaacggaaagctgctggctcagatggaaatcaatgactcaactcgcgcaatactcctgagtagcgacggacagaatctagttacaggtggagacaatggagtcgtggaagtatggcaagcttgcgacttcaagcagctttatatctatccaggctgcgatgctgggatccgggcaatggacttgtcgcacgaccagcggacactcatcaccggaatggctagtggatcaatcgtagccttcaacatcgattttaatcgctggcattatgaacaccagaaccgctacta

SEQ ID NO: 293053 - DNA, 2220 bp, Artificial Sequence
  derived and/or modified sequence
atgtttagcgaaatccgtgctgttttctctaggaggtatctgctccagaataccgcacttgaggttttcatggcaaaccgtaccagcgtgatgtttaactttccagatcaggccaccgttaaaaaagtagtttattcattgcccagagttggcgtgggcacttcatatgggctgccacaagcacggagaattagcctagctacgcccaggcagttgtataaaagcagcaatatgactcagagatggcagaggcgagaaatctctaattttgagtatctgatgtttctcaacacaatagccggtaggacctacaacgacctgaaccagtatcctgtgttcccttgggtgctcacaaactacgagagcgaggagcttgacctaaccttacctgggaacttcagagacctgtcaaagcccatcggtgccttgaacccgaagcgtgcagttttctatgcggaacgttatgaaacctgggaggacgatcagtcacctccttaccactacaatacccattactcaacagccaccagcaccctgtcttggctggtgaggattgaacccttcactaccttcttcttgaatgccaacgacgggaaatttgatcatcctgacagaaccttttcaagcgttgcacggtcctggagaacatcccagcgggacacctccgatgtgaaggaactcatacctgagttttattacctgcccgagatgttcgtgaattcgaacggctataatctcggggtgcgcgaagacgaggtggtggttaacgacgtggatctacctccctgggccaagaagcccgaggacttcgtgagaatcaatagaatggctttggagtcagaatttgtcagctgtcagctgcatcagtggatcgacctcatatttgggtacaaacagcgtggacctgaggcagtacgagcgttaaacgttttccactacctgacctacgagggctcagttaatctggatagtatcacagacccagtgctcagggaggccatggaggcacaaattcaaaattttggccagactccttctcagctgctcatcgagccgcatcctcccaggtctagcgccatgcatctgtgtttcctgccccagtcaccattgatgtttaaggaccagatgcagcaggacgtcattatggttctgaagttcccgtccaacagtcctgtgactcacgtggccgctaataccctcccacacctcaccatccccgctgtagtcacagtgacttgtagtcggttgtttgcagtgaatcgctggcacaacaccgtcggtctccgcggagccccaggatattcccttgatcaggcccaccacctaccaatcgagatggatcccctgattgccaataactcaggagtgaataagagacagatcaccgacctcgttgaccagagcatacaaataaacgcacactgtttcgtggtgacagccgataacagatatatactcatttgcggtttctgggataagagtttccgtgtctatagcaccgagaccgggaagcttacacagatagtatttggtcactgggacgtcgtgacttgtctagcgcgatctgagtcatatattggcggtgattgctacattgtcagtggatcaagagatgcgacccttctcctctggtattggtctggtcggcaccacatcatcggggataaccccaattctagtgactacccagcgccaagggccgttcttaccggccatgaccacgaagttgtgtgcgtcagcgtctgtgcagagctcggcctcgtgatttccggtgctaaagaagggccatgtctggtgcacactatcactggagacctcttgagagcattggagggcccagagaattgcctgtttccccgtctcattagcgtctcctcagaagggcactgcattatttattatgagagaggccgtttctccaacttcagcatcaatggaaaacttctggcacaaatggagatcaatgatagcacgagggctattcttctcagttctgacgggcagaacctcgtgacaggcggagacaatggcgttgtggaagtctggcaagcttgtgatttcaagcagctatatatctatcctggttgtgacgctggcatccgtgcaatggacctgtcccatgaccaacgaacactaattacaggcatggcatcaggctctattgttgctttcaatatcgatttcaacagatggcactatgaacaccagaatcggtattag

SEQ ID NO: 293054 - DNA, 8832 bp, Artificial Sequence
  derived and/or modified sequence
atggccagcgagaagcccggccccggccccggcctggagccccagcccgtgggcctgatcgccgtgggcgccgccggcggcggcggcggcggcagcggcggcggcggcaccggcggcagcggcatgggcgagctgagaggcgccagcggcagcggcagcgtgatgctgcccgccggcatgatcaaccccagcgtgcccatcagaaacatcagaatgaagttcgccgtgctgatcggcctgatccaggtgggcgaggtgagcaacagagacatcgtggagaccgtgctgaacctgctggtgggcggcgagttcgacctggagatgaacttcatcatccaggacgccgagagcatcacctgcatgaccgagctgctggagcactgcgacgtgacctgccaggccgagatctggagcatgttcaccgccatcctgagaaagagcgtgagaaacctgcagaccagcaccgaggtgggcctgatcgagcaggtgctgctgaagatgagcgccgtggacgacatgatcgccgacctgctggtggacatgctgggcgtgctggccagctacagcatcaccgtgaaggagctgaagctgctgttcagcatgctgagaggcgagagcggcatctggcccagacacgccgtgaagctgctgagcgtgctgaaccagatgccccagagacacggccccgacaccttcttcaacttccccggctgcagcgccgccgccatcgccctgccccccatcgccaagtggccctaccagaacggcttcaccctgaacacctggttcagaatggaccccctgaacaacatcaacgtggacaaggacaagccctacctgtactgcttcagaaccagcaagggcgtgggctacagcgcccacttcgtgggcaactgcctgatcgtgaccagcctgaagagcaagggcaagggcttccagcactgcgtgaagtacgacttccagcccagaaagtggtacatgatcagcatcgtgcacatctacaacagatggagaaacagcgagatcagatgctacgtgaacggccagctggtgagctacggcgacatggcctggcacgtgaacaccaacgacagctacgacaagtgcttcctgggcagcagcgagaccgccgacgccaacagagtgttctgcggccagctgggcgccgtgtacgtgttcagcgaggccctgaaccccgcccagatcttcgccatccaccagctgggccccggctacaagagcaccttcaagttcaagagcgagagcgacatccacctggccgagcaccacaagcaggtgctgtacgacggcaagctggccagcagcatcgccttcacctacaacgccaaggccaccgacgcccagctgtgcctggagagcagccccaaggagaacgccagcatcttcgtgcacagcccccacgccctgatgctgcaggacgtgaaggccatcgtgacccacagcatccacagcgccatccacagcatcggcggcatccaggtgctgttccccctgttcgcccagctggacaacagacagctgaacgacagccaggtggagaccaccgtgtgcgccaccctgctggccttcctggtggagctgctgaagagcagcgtggccatgcaggagcagatgctgggcggcaagggcttcctggtgatcggctacctgctggagaagagcagcagagtgcacatcaccagagccgtgctggagcagttcctgagcttcgccaagtacctggacggcctgagccacggcgcccccctgctgaagcagctgtgcgaccacatcctgttcaaccccgccatctggatccacacccccgccaaggtgcagctgagcctgtacacctacctgagcgccgagttcatcggcaccgccaccatctacaccaccatcagaagagtgggcaccgtgctgcagctgatgcacaccctgaagtactactactgggtgatcaaccccgccgacagcagcggcatcacccccaagggcctggacggccccagacccagccagaaggagatcatcagcctgagagccttcatgctgctgttcctgaagcagctgatcctgaaggacagaggcgtgaaggaggacgagctgcagagcatcctgaactacctgctgaccatgcacgaggacgagaacatccacgacgtgctgcagctgctggtggccctgatgagcgagcaccccgccagcatgatccccgccttcgaccagagaaacggcatcagagtgatctacaagctgctggccagcaagagcgagagcatctgggtgcaggccctgaaggtgctgggctacttcctgaagcacctgggccacaagagaaaggtggagatcatgcacacccacagcctgttcaccctgctgggcgagagactgatgctgcacaccaacaccgtgaccgtgaccacctacaacaccctgtacgagatcctgaccgagcaggtgtgcacccaggtggtgcacaagccccaccccgagcccgacagcaccgtgaagatccagaaccccatgatcctgaaggtggtggccaccctgctgaagaacagcacccccagcgccgagctgatggaggtgagaagactgttcctgagcgacatgatcaagctgttcagcaacagcagagagaacagaagatgcctgctgcagtgcagcgtgtggcaggactggatgttcagcctgggctacatcaaccccaagaacagcgaggagcagaagatcaccgagatggtgtacaacatcttcagaatcctgctgtaccacgccatcaagtacgagtggggcggctggagagtgtgggtggacaccctgagcatcgcccacagcaaggtgacctacgaggcccacaaggagtacctggccaagatgtacgaggagtaccagagacaggaggaggagaacatcaagaagggcaagaagggcaacgtgagcaccatcagcggcctgagcagccagaccaccggcgccaagggcggcatggagatcagagagatcgaggacctgagccagagccagagccccgagagcgagaccgactaccccgtgagcaccgacaccagagacctgctgatgagcaccaaggtgagcgacgacatcctgggcaacagcgacagacccggcagcggcgtgcacgtggaggtgcacgacctgctggtggacatcaaggccgagaaggtggaggccaccgaggtgaagctggacgacatggacctgagccccgagaccctggtgggcggcgagaacggcgccctggtggaggtggagagcctgctggacaacgtgtacagcgccgccgtggagaagctgcagaacaacgtgcacggcagcgtgggcatcatcaagaagaacgaggagaaggacaacggccccctgatcaccctggccgacgagaaggaggacctgcccaacagcagcaccagcttcctgttcgacaagatccccaagcaggaggagaagctgctgcccgagctgagcagcaaccacatcatccccaacatccaggacacccaggtgcacctgggcgtgagcgacgacctgggcctgctggcccacatgaccggcagcgtggacctgacctgcaccagcagcatcatcgaggagaaggagttcaagatccacaccaccagcgacggcatgagcagcatcagcgagagagacctggccagcagcaccaagggcctggagtacgccgagatgaccgccaccaccctggagaccgagagcagcagcagcaagatcgtgcccaacatcgacgccggcagcatcatcagcgacaccgagagaagcgacgacggcaaggagagcggcaaggagatcagaaagatccagaccaccaccaccacccaggccgtgcagggcagaagcatcacccagcaggacagagacctgagagtggacctgggcttcagaggcatgcccatgaccgaggagcagagaagacagttcagccccggccccagaaccaccatgttcagaatccccgagttcaagtggagccccatgcaccagagactgctgaccgacctgctgttcgccctggagaccgacgtgcacgtgtggagaagccacagcaccaagagcgtgatggacttcgtgaacagcaacgagaacatcatcttcgtgcacaacaccatccacctgatcagccagatggtggacaacatcatcatcgcctgcggcggcatcctgcccctgctgagcgccgccaccagccccaccaccgagctggagaacatcgaggtgacccagggcatgagcgccgagaccgccgtgaccttcctgagcagactgatggccatggtggacgtgctggtgttcgccagcagcctgaacttcagcgagatcgaggccgagaagaacatgagcagcggcggcctgatgagacagtgcctgagactggtgtgctgcgtggccgtgagaaactgcctggagtgcagacagagacagagagacagaggcaacaagagcagccacggcagcagcaagccccaggaggtgccccagagcgtgaccgccaccgccgccagcaagacccccctggagaacgtgcccggcaacctgagccccatcaaggaccccgacagactgctgcaggacgtggacatcaacagactgagagccgtggtgttcagagacgtggacgacagcaagcaggcccagttcctggccctggccgtggtgtacttcatcagcgtgctgatggtgagcaagtacagagacatcctggagccccagagagagaccaccagaaccggcagccagcccggcagaaacatcagacaggagatcaacagccccaccagcaccgtggtggtgatccccagcatcccccaccccagcctgaaccacggcttcctggccaagctgatccccgagcagagcttcggccacagcttctacaaggagacccccgccgccttccccgacaccatcaaggagaaggagacccccacccccggcgaggacatccaggtggagagcagcatcccccacaccgacagcggcatcggcgaggagcaggtggccagcatcctgaacggcgccgagctggagaccagcaccggccccgacgccatgagcgagctgctgagcaccctgagcagcgaggtgaagaagagccaggagagcctgaccgagaaccccagcgagaccctgaagcccgccaccagcatcagcagcatcagccagaccaagggcatcaacgtgaaggagatcctgaagagcctggtggccgcccccgtggagatcgccgagtgcggccccgagcccatcccctaccccgaccccgccctgaagagagagacccaggccatcctgcccatgcagttccacagcttcgacagaagcgtggtggtgcccgtgaagaagcccccccccggcagcctggccgtgaccaccgtgggcgccaccaccgccggcagcggcctgcccaccggcagcaccagcaacatcttcgccgccaccggcgccacccccaagagcatgatcaacaccaccggcgccgtggacagcggcagcagcagcagcagcagcagcagcagcttcgtgaacggcgccaccagcaagaacctgcccgccgtgcagaccgtggcccccatgcccgaggacagcgccgagaacatgagcatcaccgccaagctggagagagccctggagaaggtggcccccctgctgagagagatcttcgtggacttcgcccccttcctgagcagaaccctgctgggcagccacggccaggagctgctgatcgagggcctggtgtgcatgaagagcagcaccagcgtggtggagctggtgatgctgctgtgcagccaggagtggcagaacagcatccagaagaacgccggcctggccttcatcgagctgatcaacgagggcagactgctgtgccacgccatgaaggaccacatcgtgagagtggccaacgaggccgagttcatcctgaacagacagagagccgaggacgtgcacaagcacgccgagttcgagagccagtgcgcccagtacgccgccgacagaagagaggaggagaagatgtgcgaccacctgatcagcgccgccaagcacagagaccacgtgaccgccaaccagctgaagcagaagatcctgaacatcctgaccaacaagcacggcgcctggggcgccgtgagccacagccagctgcacgacttctggagactggactactgggaggacgacctgagaagaagaagaagattcgtgagaaacgccttcggcagcacccacgccgaggccctgctgaaggccgccatcgagtacggcaccgaggaggacgtggtgaagagcaagaagaccttcagaagccaggccatcgtgaaccagaacgccgagaccgagctgatgctggagggcgacgacgacgccgtgagcctgctgcaggagaaggagatcgacaacctggccggccccgtggtgctgagcacccccgcccagctgatcgcccccgtggtggtggccaagggcaccctgagcatcaccaccaccgagatctacttcgaggtggacgaggacgacagcgccttcaagaagatcgacaccaaggtgctggcctacaccgagggcctgcacggcaagtggatgttcagcgagatcagagccgtgttcagcagaagatacctgctgcagaacaccgccctggaggtgttcatggccaacagaaccagcgtgatgttcaacttccccgaccaggccaccgtgaagaaggtggtgtacagcctgcccagagtgggcgtgggcaccagctacggcctgccccaggccagaagaatcagcctggccacccccagacagctgtacaagagcagcaacatgacccagagatggcagagaagagagatcagcaacttcgagtacctgatgttcctgaacaccatcgccggcagaacctacaacgacctgaaccagtaccccgtgttcccctgggtgctgaccaactacgagagcgaggagctggacctgaccctgcccggcaacttcagagacctgagcaagcccatcggcgccctgaaccccaagagagccgtgttctacgccgagagatacgagacctgggaggacgaccagagccccccctaccactacaacacccactacagcaccgccaccagcaccctgagctggctggtgagaatcgagcccttcaccaccttcttcctgaacgccaacgacggcaagttcgaccaccccgacagaaccttcagcagcgtggccagaagctggagaaccagccagagagacaccagcgacgtgaaggagctgatccccgagttctactacctgcccgagatgttcgtgaacagcaacggctacaacctgggcgtgagagaggacgaggtggtggtgaacgacgtggacctgcccccctgggccaagaagcccgaggacttcgtgagaatcaacagaatggccctggagagcgagttcgtgagctgccagctgcaccagtggatcgacctgatcttcggctacaagcagagaggccccgaggccgtgagagccctgaacgtgttccactacctgacctacgagggcagcgtgaacctggacagcatcaccgaccccgtgctgagagaggccatggaggcccagatccagaacttcggccagacccccagccagctgctgatcgagccccacccccccagaagcagcgccatgcacctgtgcttcctgccccagagccccctgatgttcaaggaccagatgcagcaggacgtgatcatggtgctgaagttccccagcaacagccccgtgacccacgtggccgccaacaccctgccccacctgaccatccccgccgtggtgaccgtgacctgcagcagactgttcgccgtgaacagatggcacaacaccgtgggcctgagaggcgcccccggctacagcctggaccaggcccaccacctgcccatcgagatggaccccctgatcgccaacaacagcggcgtgaacaagagacagatcaccgacctggtggaccagagcatccagatcaacgcccactgcttcgtggtgaccgccgacaacagatacatcctgatctgcggcttctgggacaagagcttcagagtgtacagcaccgagaccggcaagctgacccagatcgtgttcggccactgggacgtggtgacctgcctggccagaagcgagagctacatcggcggcgactgctacatcgtgagcggcagcagagacgccaccctgctgctgtggtactggagcggcagacaccacatcatcggcgacaaccccaacagcagcgactaccccgcccccagagccgtgctgaccggccacgaccacgaggtggtgtgcgtgagcgtgtgcgccgagctgggcctggtgatcagcggcgccaaggagggcccctgcctggtgcacaccatcaccggcgacctgctgagagccctggagggccccgagaactgcctgttccccagactgatcagcgtgagcagcgagggccactgcatcatctactacgagagaggcagattcagcaacttcagcatcaacggcaagctgctggcccagatggagatcaacgacagcaccagagccatcctgctgagcagcgacggccagaacctggtgaccggcggcgacaacggcgtggtggaggtgtggcaggcctgcgacttcaagcagctgtacatctaccccggctgcgacgccggcatcagagccatggacctgagccacgaccagagaaccctgatcaccggcatggccagcggcagcatcgtggccttcaacatcgacttcaacagatggcactacgagcaccagaacagatactag

SEQ ID NO: 293055 - DNA, 4728 bp, Artificial Sequence
  derived and/or modified sequence
atgcaccagagactgctgaccgacctgctgttcgccctggagaccgacgtgcacgtgtggagaagccacagcaccaagagcgtgatggacttcgtgaacagcaacgagaacatcatcttcgtgcacaacaccatccacctgatcagccagatggtggacaacatcatcatcgcctgcggcggcatcctgcccctgctgagcgccgccaccagccccaccaccgagctggagaacatcgaggtgacccagggcatgagcgccgagaccgccgtgaccttcctgagcagactgatggccatggtggacgtgctggtgttcgccagcagcctgaacttcagcgagatcgaggccgagaagaacatgagcagcggcggcctgatgagacagtgcctgagactggtgtgctgcgtggccgtgagaaactgcctggagtgcagacagagacagagagacagaggcaacaagagcagccacggcagcagcaagccccaggaggtgccccagagcgtgaccgccaccgccgccagcaagacccccctggagaacgtgcccggcaacctgagccccatcaaggaccccgacagactgctgcaggacgtggacatcaacagactgagagccgtggtgttcagagacgtggacgacagcaagcaggcccagttcctggccctggccgtggtgtacttcatcagcgtgctgatggtgagcaagtacagagacatcctggagccccagagagagaccaccagaaccggcagccagcccggcagaaacatcagacaggagatcaacagccccaccagcaccgagacccccgccgccttccccgacaccatcaaggagaaggagacccccacccccggcgaggacatccaggtggagagcagcatcccccacaccgacagcggcatcggcgaggagcaggtggccagcatcctgaacggcgccgagctggagaccagcaccggccccgacgccatgagcgagctgctgagcaccctgagcagcgaggtgaagaagagccaggagagcctgaccgagaaccccagcgagaccctgaagcccgccaccagcatcagcagcatcagccagaccaagggcatcaacgtgaaggagatcctgaagagcctggtggccgcccccgtggagatcgccgagtgcggccccgagcccatcccctaccccgaccccgccctgaagagagagacccaggccatcctgcccatgcagttccacagcttcgacagaagcgtggtggtgcccgtgaagaagcccccccccggcagcctggccgtgaccaccgtgggcgccaccaccgccggcagcggcctgcccaccggcagcaccagcaacatcttcgccgccaccggcgccacccccaagagcatgatcaacaccaccggcgccgtggacagcggcagcagcagcagcagcagcagcagcagcttcgtgaacggcgccaccagcaagaacctgcccgccgtgcagaccgtggcccccatgcccgaggacagcgccgagaacatgagcatcaccgccaagctggagagagccctggagaaggtggcccccctgctgagagagatcttcgtggacttcgcccccttcctgagcagaaccctgctgggcagccacggccaggagctgctgatcgagggcctggtgtgcatgaagagcagcaccagcgtggtggagctggtgatgctgctgtgcagccaggagtggcagaacagcatccagaagaacgccggcctggccttcatcgagctgatcaacgagggcagactgctgtgccacgccatgaaggaccacatcgtgagagtggccaacgaggccgagttcatcctgaacagacagagagccgaggacgtgcacaagcacgccgagttcgagagccagtgcgcccagtacgccgccgacagaagagaggaggagaagatgtgcgaccacctgatcagcgccgccaagcacagagaccacgtgaccgccaaccagctgaagcagaagatcctgaacatcctgaccaacaagcacggcgcctggggcgccgtgagccacagccagctgcacgacttctggagactggactactgggaggacgacctgagaagaagaagaagattcgtgagaaacgccttcggcagcacccacgccgaggccctgctgaaggccgccatcgagtacggcaccgaggaggacgtggtgaagagcaagaagaccttcagaagccaggccatcgtgaaccagaacgccgagaccgagctgatgctggagggcgacgacgacgccgtgagcctgctgcaggagaaggagatcgacaacctggccggccccgtggtgctgagcacccccgcccagctgatcgcccccgtggtggtggccaagggcaccctgagcatcaccaccaccgagatctacttcgaggtggacgaggacgacagcgccttcaagaagatcgacaccaaggtgctggcctacaccgagggcctgcacggcaagtggatgttcagcgagatcagagccgtgttcagcagaagatacctgctgcagaacaccgccctggaggtgttcatggccaacagaaccagcgtgatgttcaacttccccgaccaggccaccgtgaagaaggtggtgtacagcctgcccagagtgggcgtgggcaccagctacggcctgccccaggccagaagaatcagcctggccacccccagacagctgtacaagagcagcaacatgacccagagatggcagagaagagagatcagcaacttcgagtacctgatgttcctgaacaccatcgccggcagaacctacaacgacctgaaccagtaccccgtgttcccctgggtgctgaccaactacgagagcgaggagctggacctgaccctgcccggcaacttcagagacctgagcaagcccatcggcgccctgaaccccaagagagccgtgttctacgccgagagatacgagacctgggaggacgaccagagccccccctaccactacaacacccactacagcaccgccaccagcaccctgagctggctggtgagaatcgagcccttcaccaccttcttcctgaacgccaacgacggcaagttcgaccaccccgacagaaccttcagcagcgtggccagaagctggagaaccagccagagagacaccagcgacgtgaaggagctgatccccgagttctactacctgcccgagatgttcgtgaacagcaacggctacaacctgggcgtgagagaggacgaggtggtggtgaacgacgtggacctgcccccctgggccaagaagcccgaggacttcgtgagaatcaacagaatggccctggagagcgagttcgtgagctgccagctgcaccagtggatcgacctgatcttcggctacaagcagagaggccccgaggccgtgagagccctgaacgtgttccactacctgacctacgagggcagcgtgaacctggacagcatcaccgaccccgtgctgagagaggccatggaggcccagatccagaacttcggccagacccccagccagctgctgatcgagccccacccccccagaagcagcgccatgcacctgtgcttcctgccccagagccccctgatgttcaaggaccagatgcagcaggacgtgatcatggtgctgaagttccccagcaacagccccgtgacccacgtggccgccaacaccctgccccacctgaccatccccgccgtggtgaccgtgacctgcagcagactgttcgccgtgaacagatggcacaacaccgtgggcctgagaggcgcccccggctacagcctggaccaggcccaccacctgcccatcgagatggaccccctgatcgccaacaacagcggcgtgaacaagagacagatcaccgacctggtggaccagagcatccagatcaacgcccactgcttcgtggtgaccgccgacaacagatacatcctgatctgcggcttctgggacaagagcttcagagtgtacagcaccgagaccggcaagctgacccagatcgtgttcggccactgggacgtggtgacctgcctggccagaagcgagagctacatcggcggcgactgctacatcgtgagcggcagcagagacgccaccctgctgctgtggtactggagcggcagacaccacatcatcggcgacaaccccaacagcagcgagtgcgactaccccgcccccagagccgtgctgaccggccacgaccacgaggtggtgtgcgtgagcgtgtgcgccgagctgggcctggtgatcagcggcgccaaggagggcccctgcctggtgcacaccatcaccggcgacctgctgagagccctggagggccccgagaactgcctgttccccagactgatcagcgtgagcagcgagggccactgcatcatctactacgagagaggcagattcagcaacttcagcatcaacggcaagctgctggcccagatggagatcaacgacagcaccagagccatcctgctgagcagcgacggccagaacctggtgaccggcggcgacaacggcgtggtggaggtgtggcaggcctgcgacttcaagcagctgtacatctaccccggctgcgacgccggcatcagagccatggacctgagccacgaccagagaaccctgatcaccggcatggccagcggcagcatcgtggccttcaacatcgacttcaacagatggcactacgagcaccagaacagatactag

SEQ ID NO: 293056 - DNA, 2220 bp, Artificial Sequence
  derived and/or modified sequence
atgttcagcgagatcagagccgtgttcagcagaagatacctgctgcagaacaccgccctggaggtgttcatggccaacagaaccagcgtgatgttcaacttccccgaccaggccaccgtgaagaaggtggtgtacagcctgcccagagtgggcgtgggcaccagctacggcctgccccaggccagaagaatcagcctggccacccccagacagctgtacaagagcagcaacatgacccagagatggcagagaagagagatcagcaacttcgagtacctgatgttcctgaacaccatcgccggcagaacctacaacgacctgaaccagtaccccgtgttcccctgggtgctgaccaactacgagagcgaggagctggacctgaccctgcccggcaacttcagagacctgagcaagcccatcggcgccctgaaccccaagagagccgtgttctacgccgagagatacgagacctgggaggacgaccagagccccccctaccactacaacacccactacagcaccgccaccagcaccctgagctggctggtgagaatcgagcccttcaccaccttcttcctgaacgccaacgacggcaagttcgaccaccccgacagaaccttcagcagcgtggccagaagctggagaaccagccagagagacaccagcgacgtgaaggagctgatccccgagttctactacctgcccgagatgttcgtgaacagcaacggctacaacctgggcgtgagagaggacgaggtggtggtgaacgacgtggacctgcccccctgggccaagaagcccgaggacttcgtgagaatcaacagaatggccctggagagcgagttcgtgagctgccagctgcaccagtggatcgacctgatcttcggctacaagcagagaggccccgaggccgtgagagccctgaacgtgttccactacctgacctacgagggcagcgtgaacctggacagcatcaccgaccccgtgctgagagaggccatggaggcccagatccagaacttcggccagacccccagccagctgctgatcgagccccacccccccagaagcagcgccatgcacctgtgcttcctgccccagagccccctgatgttcaaggaccagatgcagcaggacgtgatcatggtgctgaagttccccagcaacagccccgtgacccacgtggccgccaacaccctgccccacctgaccatccccgccgtggtgaccgtgacctgcagcagactgttcgccgtgaacagatggcacaacaccgtgggcctgagaggcgcccccggctacagcctggaccaggcccaccacctgcccatcgagatggaccccctgatcgccaacaacagcggcgtgaacaagagacagatcaccgacctggtggaccagagcatccagatcaacgcccactgcttcgtggtgaccgccgacaacagatacatcctgatctgcggcttctgggacaagagcttcagagtgtacagcaccgagaccggcaagctgacccagatcgtgttcggccactgggacgtggtgacctgcctggccagaagcgagagctacatcggcggcgactgctacatcgtgagcggcagcagagacgccaccctgctgctgtggtactggagcggcagacaccacatcatcggcgacaaccccaacagcagcgactaccccgcccccagagccgtgctgaccggccacgaccacgaggtggtgtgcgtgagcgtgtgcgccgagctgggcctggtgatcagcggcgccaaggagggcccctgcctggtgcacaccatcaccggcgacctgctgagagccctggagggccccgagaactgcctgttccccagactgatcagcgtgagcagcgagggccactgcatcatctactacgagagaggcagattcagcaacttcagcatcaacggcaagctgctggcccagatggagatcaacgacagcaccagagccatcctgctgagcagcgacggccagaacctggtgaccggcggcgacaacggcgtggtggaggtgtggcaggcctgcgacttcaagcagctgtacatctaccccggctgcgacgccggcatcagagccatggacctgagccacgaccagagaaccctgatcaccggcatggccagcggcagcatcgtggccttcaacatcgacttcaacagatggcactacgagcaccagaacagatactag

SEQ ID NO: 293057 - DNA, 610 bp, Artificial Sequence
  derived and/or modified sequence
gcttccaccacaaccgatgtcaactctcctagcgcccctccgctcaccggtaaaccaggacagtggaggggcgccctgatgcggtgtctttcaggttgcagaaaagatggaaaaaaggacatgtgcactctgccccaaagatgtcgaatataatgtcctatactttgcacaatcagagaatatagctgctcatgagaattgtttgctgtattcttcaggacttgtggaatgtgaggatcaggatccacttaatcctgatagaagttttgatgtggaatcagtaaagaaagaaatccagagaggaaggaagttgaaatgcaaattttgtcataaaagaggagccaccgtgggatgtgatttaaaaaactgtaacaagaattaccactttttctgtgccaagaaggacgacgcagttccacagtctgatggagttcgaggaatttataaactgctttgccagcaacatgctcaattcccgatcatcgctcaaagtgctaaattttcaggagtgaaaagaaaaagaggaaggaagaaacccctctcaggcaatcatgtacagccacccgaaacaatgaaatgtaatacattcataagacaagtgaaagaagag

SEQ ID NO: 293058 - DNA, 566 bp, Artificial Sequence
  derived and/or modified sequence
agtgcttccaccacaaccgatgtcaactctcctagcgcccctccgctcaccggtaaaccaggacagtggaggggcgccctgatgcgggcaagactcagccaaaggtggaaaagttgaaggggtgttcccagcagagaggatgacacaaaggcaccaaaccacaaaacgtcacacgtaaacatcatacgtggcaaccacaagccaatcagttggatatttcattcattggtatacatatggactgtaaggtgtctttcaggttgcagaaaagatggaaaaaaggacatgtgcactctgccccaaagatgtcgaatataatgtcctatactttgcacaatcagagaatatagctgctcatgagaattgtttgctgtattcttcaggacttgtggaatgtgaggatcaggatccacttaatcctgatagaagttttgatgtggaatcagtaaagaaagaaatccagagaggaaggaagttgaaatgcaaattttgtcataaaagaggagccaccgtgggatgtgatttaaaaaactgtaacaagaattaccactttttctgtgccaaga

SEQ ID NO: 293059 - DNA, 2031 bp, Artificial Sequence
  derived and/or modified sequence
atggacgtgctgatcgtgctggccaccagcatcgcctacgtgtacagcctggtgatcctggtggtggccgtggccgagaaggccgagagaagccccgtgaccttcttcgacaccccccccatgctgttcgtgttcatcgccctgggcagatggctggagcacctggccaagagcaagaccagcgaggccctggccaagctgatgagcctgcaggccaccgaggccaccgtggtgaccctgggcgaggacaacctgatcatcagagaggagcaggtgcccatggagctggtgcagagaggcgacatcgtgaaggtggtgcccggcggcaagttccccgtggacggcaaggtgctggagggcaacaccatggccgacgagagcctgatcaccggcgaggccatgcccgtgaccaagaagcccggcagcaccgtgatcgccggcagcatcaacgcccacggcagcgtgctgatcaaggccacccacgtgggcaacgacaccaccctggcccagatcgtgaagctggtggaggaggcccagatgagcaaggcccccatccagcagctggccgacagattcagcggctacttcgtgcccttcatcatcatcatgagcaccctgaccctggtggtgtggatcgtgatcggcttcatcgacttcggcgtggtgcagagatacttccccaaccccaacaagcacatcagccagaccgaggtgatcatcagattcgccttccagaccagcatcaccgtgctgtgcatcgcctgcccctgcagcctgggcctggccacccccaccgccgtgatggtgggcaccggcgtggccgcccagaacggcatcctgatcaagggcggcaagcccctggagatggcccacaaggagctgggcaccgagaccctgggctactgcaccgacttccaggccgtgcccggctgcggcatcggctgcaaggtgagcaacgtggagggcatcctggcccacagcgagagacccctgagcgcccccgccagccacctgaacgaggccggcagcctgcccgccgagaaggacgccgtgccccagaccttcagcgtgctgatcggcaacagagagtggctgagaagaaacggcctgaccatcagcagcgacgtgagcgacgccatgaccgaccacgagatgaagggccagaccgccatcctggtggccatcgacggcgtgctgtgcggcatgatcgccatcgccgacgccgtgaagcaggaggccgccctggccgtgcacaccctgcagagcatgggcgtggacgtggtgctgatcaccggcgacaacagaaagaccgccagagccatcgccacccaggtgggcatcaacaaggtgttcgccgaggtgctgcccagccacaaggtggccaaggtgcaggagctgcagaacaagggcaagaaggtggccatggtgggcgacggcgtgaacgacagccccgccctggcccaggccgacatgggcgtggccatcggcaccggcaccgacgtggccatcgaggccgccgacgtggtgctgatcagaaacgacctgctggacgtggtggccagcatccacctgagcaagagaaccgtgagaagaatcagaatcaacctggtgctggccctgatctacaacctggtgggcatccccatcgccgccggcgtgttcatgcccatcggcatcgtgctgcagccctggatgggcagcgccgccatggccgccagcagcgtgagcgtggtgctgagcagcctgcagctgaagtgctacaagaagcccgacctggagagatacgaggcccaggcccacggccacatgaagcccctgaccgccagccaggtgagcgtgcacatcggcatggacgacagatggagagacagccccagagccaccccctgggaccaggtgagctacgtgagccaggtgagcctgagcagcctgaccagcgacaagcccagcagacacagcgccgccgccgacgacgacggcgacaagtggagcctgctgctgaacggcagagacgaggagcagtacatctag

SEQ ID NO: 293060 - DNA, 2031 bp, Artificial Sequence
  derived and/or modified sequence
atggatgtcctgattgttctggcgacttctattgcctatgtgtactccctggtcatacttgtggtcgccgttgccgagaaggctgaacgctctcccgtcaccttcttcgacactccaccgatgctgttcgtcttcattgccctcggccgatggttggagcaccttgccaaatccaaaaccagtgaggctctggcgaagctcatgtctttacaggctaccgaggcaacagtcgtgaccctcggggaagacaacctaatcattagggaagaacaggtgcccatggagctggtacagcggggtgacattgtcaaggtggtgcccggaggcaagtttcccgtggatggcaaggtacttgagggaaatacaatggccgatgaatccttgatcacaggggaggccatgcccgtgacaaagaagccgggttccactgtgatcgcaggcagtattaatgcccacggctccgtgctgattaaagccacccatgtgggtaacgacacaacactcgcccagattgtgaagctggtggaggaagcccagatgtctaaagcaccgatccaacaactggccgacagattctcaggatatttcgttcctttcatcatcataatgtcaactctgacactggttgtctggattgtgatcggatttattgatttcggcgtcgttcagcgttatttcccaaatccaaataagcatataagccagactgaggtaattatacgcttcgccttccagacatccattaccgtattgtgcatcgcctgcccctgctctctgggtctcgcgacgcccacagctgtcatggtgggcaccggcgtcgccgcacaaaacggaatactcatcaaaggtgggaaaccgctcgagatggctcacaaggaactgggtactgagactctgggatactgtaccgattttcaggccgtgcccggttgtggcatcggatgcaaagtctccaacgttgagggcatccttgctcactccgagcggccactgagcgcccccgcctcgcatctgaatgaagcaggttccttgcccgccgagaaagatgcggtccctcagactttcagtgtgcttattggcaaccgggagtggctgagacgaaacggcctaactatttcgtccgacgtgagtgacgctatgaccgaccacgagatgaaggggcagacagccattctggtcgctatcgatggcgtgctatgcgggatgatcgccatagcggatgctgtgaagcaggaggcagctctggccgtgcatacacttcagtcaatgggcgtcgacgtggttcttataaccggcgacaacaggaagacagcaagggccatcgcaacccaggttggcatcaataaagtatttgccgaggttcttcctagccacaaggttgccaaagttcaggagctgcagaataagggcaagaaggtagccatggtgggagacggcgtgaatgatagcccagctcttgcacaggctgatatgggcgttgctatcggaactggaactgacgtggctatagaagctgcggacgtggttttgatccggaacgatctgttagacgtggtcgccagcatacacctgagtaagcgtaccgtcaggcggatcagaattaacctggtgctggccctgatatacaatttggtgggaattcccatagcggctggcgtgtttatgcctataggaatcgtcctccagccatggatgggatctgctgctatggcggcttcttctgtaagcgtcgtgctcagcagtctgcaactcaagtgctataagaagccggacctggagcgatatgaggctcaggctcacggccatatgaagcccttgactgcatcacaggtatccgtccacatcggaatggacgaccggtggagagactctcctcgcgccactccctgggaccaggtaagttatgtctctcaggtatcactatcttctctgacatccgacaaaccctccagacattctgcggcagcagacgacgacggtgataaatggagcctgctcctcaacggcagggacgaggagcagtacatatag

SEQ ID NO: 293061 - DNA, 2031 bp, Artificial Sequence
  derived and/or modified sequence
atggatgtgctgattgtgctggccaccagcatcgcctacgtgtacagcctggtgatcctggtggtggccgtggccgagaaggccgagaggagccctgtgaccttctttgacaccccacccatgctgtttgtgttcatcgccctgggccgctggctggagcacctggccaagagcaagaccagcgaggccctggccaagctgatgagcctgcaggccacagaggccaccgtggtgaccctgggggaggacaacctgatcatccgggaggagcaggtgcccatggagctggtgcagagaggagacatcgtgaaggtggtgcctgggggcaagtttcctgtggatggcaaggtgctggagggcaacaccatggctgatgagagcctcatcaccggggaggccatgcctgtgaccaagaagccaggcagcacagtgattgctggcagcatcaatgcccacggctctgtgctgatcaaggccacccacgtgggcaatgacaccaccctggcccagatcgtgaagctggtggaggaggcccagatgagcaaggcccccatccagcagctggccgaccgcttcagcggctactttgtgcccttcatcatcatcatgagcaccctgaccctggtggtgtggatcgtcatcggcttcatcgactttggagtggtgcagcgctacttccccaaccccaacaagcacatcagccagacagaggtgatcatccgctttgccttccagaccagcatcaccgtgctgtgcatcgcctgcccctgcagcctgggcctggccacccccacagctgtgatggtgggcactggagtggccgcccagaatggcatcctgatcaagggcggcaagcccctggagatggcccacaaggagctgggcacagagaccctgggctactgcacagacttccaggccgtgcccggctgcggcatcggctgcaaggtgtccaatgtggagggcatcctggcccacagcgagcggcccctgagcgccccagccagccacctgaatgaagctggcagcctgcctgctgagaaggatgctgtgccccagaccttctctgtgctgattggcaaccgggagtggctgcggagaaatggcctgaccatcagcagtgatgtgtctgatgccatgacagaccacgagatgaagggccagacagccatcctggtggccattgatggagtgctgtgtggcatgattgccatcgcagatgctgtgaagcaggaggccgccctggccgtgcacaccctgcagagcatgggcgtggatgtggtgctgatcactggagacaacaggaagacagcccgggccatcgccacccaggtgggcatcaacaaggtgtttgctgaggtgctgcccagccacaaggtggccaaggtgcaggagctgcagaacaagggcaagaaggtggccatggtgggagatggagtgaatgacagccctgccctggcccaggccgacatgggcgtggccatcggcactggaacagatgtggccattgaagctgctgatgtggtgctgatcagaaatgacctgctggatgtggtggccagcatccacctgagcaagaggacagtgcggcgcatccgcatcaacctggtgctggccctgatctacaacctggtgggcatccccatcgctgctggggtcttcatgcccatcggcatcgtgctgcagccctggatgggcagcgctgccatggccgccagctctgtgtctgtggtgctgagcagcctgcagctgaagtgctacaagaagccagacctggagagatatgaggcccaggcccacggccacatgaagcccctgacagccagccaggtgtctgtgcacatcggcatggatgaccgctggagggacagcccccgggccaccccctgggaccaggtgtcctatgtgtcccaggtgtccctgagcagcctgaccagtgacaagcccagccgccacagcgctgctgctgatgatgatggagacaagtggagcctgctgctgaatggaagagatgaggagcagtacatctag

SEQ ID NO: 293062 - DNA, 2031 bp, Artificial Sequence
  derived and/or modified sequence
atggacgtgctgatcgtgctggccaccagcatcgcctacgtgtactcactcgtcatcctcgtcgttgcggttgcagagaaagctgaacgaagtccggtcacattttttgacacccccccaatgcttttcgtattcatcgctctgggacgatggttagagcatttggcgaagtccaagacgtctgaggccttggccaagctgatgtctcttcaggctactgaagctacagtcgtgaccctcggcgaggacaatttgatcattcgcgaagaacaggtgcctatggagttggtgcagcgaggtgatatagtgaaagtggtgcctggaggcaaattcccggttgatgggaaagtcctggaaggaaataccatggccgacgagtccctcatcacaggcgaggctatgcctgtgaccaagaagcccggtagtactgttatagccggcagcatcaacgctcacggctccgtactgatcaaagccactcatgtcgggaatgatacaacattggcccagattgtgaaactggtcgaagaagcccagatgtctaaagcacccatccaacagctggccgacagattcagcggttatttcgttcccttcatcatcattatgtcgactctgacgctggtcgtttggatagtcattggctttatcgacttcggagtcgtgcagcgttacttccctaatcctaataagcacatatcacagacggaagtaattatacggtttgcgttccagacttccatcacagtgctgtgcattgcctgcccatgcagtctgggcctggcaactcctacagcagtcatggtgggcactggggtggccgcgcagaatggcattctcattaaaggagggaaaccactcgagatggctcataaagagcttggcactgagactctcggatattgtacagactttcaggctgtgccagggtgtggtatcgggtgcaaggtatctaatgtggaaggcatactagctcacagtgaaaggcctctgtctgctcctgccagccacctcaatgaggccggatccctgccggccgagaaggacgccgtgccacagaccttcagcgtcttgataggaaacagggagtggctgagacgaaatgggctgacaataagctcggacgtgtcagatgcgatgaccgatcatgagatgaaagggcagaccgccattctggtcgcgatagacggcgttttgtgcggcatgatcgctatagcggacgcggttaaacaagaggccgctctagccgtgcatacccttcagtccatgggagtggacgtcgtcctgattacaggggacaacagaaaaactgcacgtgctatcgcaactcaggtgggaataaataaagtgttcgctgaagtgctgccttctcataaggttgccaaggtccaagaactgcagaataagggcaagaaagtggccatggtcggcgatggagtcaatgactcacctgcactggcacaggccgatatgggcgtcgctatcggaaccggcaccgatgtggctattgaggccgccgacgtggttctgatccgtaacgatctgctggacgtggtagcctcaatacacctgtccaagcgcacggttagacgcatcagaattaatctcgtgttggctttgatctacaacctcgtgggcatccccattgctgccggggtgtttatgccaattgggattgttctgcagccttggatggggtctgcagctatggccgctagttcggtatccgttgtgctatctagcctccagttgaagtgctataagaagccagacctggaaaggtatgaagcgcaggcgcacgggcacatgaagcccttgaccgcaagtcaggtctcagtgcacatcggcatggatgatagatggcgcgattctcctcgcgccacaccttgggatcaggttagctacgtgagccaggttagcctatcgtcactgacttctgataaaccaagtagacattcagctgccgcggatgatgatggggataaatggtccctgctgctcaacggccgagacgaggagcagtatatttag

SEQ ID NO: 293063 - DNA, 2031 bp, Artificial Sequence
  derived and/or modified sequence
atggatgtactgattgtcttggcgacgtcgatcgcatatgtgtatagcctagtgatcctcgtcgtggcggtggccgagaaggctgagcgtagcccggtgacgttcttcgacacgccacctatgttgttcgtctttatcgccttaggtaggtggcttgagcatcttgctaagtccaagacttctgaggccctagcaaagctgatgagcctgcaggcgactgaggccacagtcgtgaccctgggtgaagataatctaatcatccgcgaggagcaggtgccaatggaactggtacaacggggagacatcgtcaaagtcgtgcccggaggcaaattcccggtggatgggaaggtcctggagggtaataccatggccgacgaaagcctgatcacaggggaagccatgccggtcacaaaaaaaccaggaagtacagtgattgctgggtcaattaacgctcacggatctgttctcatcaaggctacacacgttggtaatgacactaccttagcacagattgtcaaactcgtcgaagaagcgcagatgtccaaggctcccattcagcaactcgcggacagattcagtggatacttcgtgccattcattataatcatgtcaactttgacccttgtagtgtggatcgtgatcgggttcattgatttcggagtcgtccaaagatactttccaaaccctaacaagcacatatcccagacagaagtcataatccgcttcgcatttcagacgtctataactgttctctgtattgcatgtccctgttcccttgggcttgctactcccaccgccgttatggttggtaccggggtggccgcacagaatggcatacttatcaaagggggaaagccactggaaatggcacacaaggagttaggtaccgagactctgggatactgcacagatttccaagccgtgccgggatgcggcattgggtgcaaggtaagcaacgtggagggtatcctagcccacagtgagcggccattgagcgctcctgccagccatctcaatgaagccggatctcttcccgcagagaaagatgcagtgccccagacattctctgtactcattggtaaccgtgaatggttgaggcgtaacgggctcaccatcagctcagacgtttcagacgcaatgacggaccacgagatgaaaggccaaaccgcgattctggtggccattgacggtgttctttgtgggatgatcgccattgccgatgctgtgaagcaggaggccgcacttgccgtgcacactctgcaaagtatgggcgtcgacgtcgtcctcatcacgggggacaatcgcaaaaccgccagagcgattgccacacaggtcggcataaacaaggtcttcgctgaagtgttgccttcgcataaggtcgccaaagtgcaggaactccagaacaaaggcaaaaaagtagcaatggtcggagacggtgtgaatgattctccagccctggctcaggctgatatgggagtcgccattggcacaggcacggacgtggcaatagaggcggctgacgttgtactgataagaaatgacctgctggatgttgtggcaagcatccatttgtctaagagaacggtgaggcgcattcggattaatctggtgctggccctgatttataacctagtggggatcccaattgccgcaggagtgttcatgccaatcggaattgttctgcagccatggatgggaagtgccgcaatggctgctagttcagtgagtgttgtgcttagcagtctccagctaaagtgctataagaaacctgatctcgaaagatacgaggcccaggcccacgggcacatgaagcctctaaccgcttcccaggtgagcgttcatatcggcatggacgatcgctggagggattctccccgagctacaccatgggaccaggtttcttacgtgtctcaggtgagtctctcctccctgacatcagacaagccttcacgacattccgctgctgctgatgacgatggcgataaatggtctctattgttgaatgggagggacgaggagcagtacatttag

SEQ ID NO: 293064 - DNA, 2031 bp, Artificial Sequence
  derived and/or modified sequence
atggacgtgctaatagtccttgctacgtcaattgcctatgtgtactccttggtgatactagtcgtagccgtggcggagaaggcagaacgttcccccgtgactttctttgacacgcctcctatgctcttcgtctttattgcactgggaagatggctcgaacatcttgccaaatctaaaacgtcagaggccctcgcaaagcttatgagtctacaagcaaccgaggccacagtcgtgacccttggcgaagataacctgattattagggaagaacaggtaccaatggagctggtgcaacgaggtgacattgttaaggttgtacccgggggtaagtttccagtggacggaaaggtgctggaaggaaacactatggctgatgaatctctcatcacaggcgaagcaatgccagtcacaaaaaaacccgggtcaactgttatagcaggaagcatcaatgctcacggcagcgtgctcataaaggccacacacgtgggaaacgacactaccctagcgcagatcgttaagctggtcgaagaggcgcagatgtccaaggcccctattcaacagctggcagatagattttcaggatacttcgtgcctttcattatcattatgtcgacattgacactcgttgtctggatagtaatcgggttcatcgacttcggagtagtccaaagatatttcccaaaccccaataagcatattagccagaccgaagtcatcatccgtttcgcatttcagactagtatcaccgtgctctgcattgcttgcccttgcagtcttggcttggccacacccactgccgtgatggtcggaaccggagtggcagcccagaatgggatcctgatcaagggaggaaaacctttggaaatggcacacaaggaactaggtacagaaacccttggctactgcacagattttcaggctgtccctggatgcggcatcggctgtaaagtgtcaaacgtcgagggaatactggcacacagcgagcggcctctttcggcgccagcttctcatctgaatgaagctgggtcactccctgccgaaaaggacgccgtccctcagactttttctgtcctgatcgggaaccgagagtggctgcgacgcaatgggttgactatcagctcagatgtgagcgacgcgatgaccgatcacgagatgaaaggtcaaacagccatcctggtcgcgatagatggagtgctttgcgggatgattgccattgccgatgcggtaaagcaagaagcagctctcgctgttcatacactgcagtctatgggtgtggatgtggtgctcatcaccggcgataatcgaaagacggccagggcaattgctacacaggtgggcatcaataaagtcttcgcagaagtgttaccaagtcacaaggttgcaaaagtgcaggagttacagaataagggtaaaaaggttgccatggttggagacggagtgaatgatagccccgccctggcacaggccgatatgggcgttgccatcggcacagggactgacgtagccattgaagctgcagacgtggtactcatccgaaacgacttactggacgttgtggcctccatacatctctccaaaaggacggttcgtcgaattcgcataaacctggtacttgccctgatctacaaccttgtagggatcccaattgccgcaggagttttcatgccgattggaatcgtgctacaaccgtggatgggatccgccgccatggctgcctccagcgttagcgtggtcttatcatccttacagttgaaatgctataaaaagcccgatttggaaagatatgaagctcaggctcacggacacatgaagcctctgacggcctcacaggtctccgttcacatcggaatggatgaccggtggcgggactctccccgggcaaccccttgggaccaagtgtcttacgtcagccaggtgagtctcagttcgctgacgtccgacaaaccttcccgacactctgctgcggctgacgatgacggtgataagtggtctctgttacttaacgggcgagacgaggaacagtacatttag

SEQ ID NO: 293065 - DNA, 2031 bp, Artificial Sequence
  derived and/or modified sequence
atggatgtgctgattgtgctggccacctccatcgcttacgtgtacagtctcgtaatcctcgttgtcgcagttgccgaaaaagctgagcggagcccagtgaccttttttgacacccctccaatgttgttcgtatttatcgctttaggacgatggttggagcacttggccaagtctaagacatcagaggcccttgcaaagttaatgagcctccaggccacagaggctacagttgtcaccttgggagaagataacctcataatcagggaggaacaagtgcccatggagctggttcagagaggagacatcgtgaaggtagtccctggcggtaagttccccgtagatggaaaggtacttgaaggcaacaccatggctgatgagagccttattactggtgaagcaatgccagtcactaagaagccaggctctactgtcattgctggaagtattaacgcacacggtagcgttttgatcaaagcaacccacgtagggaatgacacaacactggctcagatcgttaagctcgtggaagaggcccaaatgagcaaggcaccgattcagcagttagccgatcgctttagtggatattttgttcccttcatcatcattatgtcgacattgacactcgttgtctggatagtaatcgggttcatcgacttcggagtagtccaaagatatttcccaaaccccaataagcatattagccagaccgaagtcatcatccgtttcgcatttcagactagtatcaccgtgctctgcattgcttgcccttgcagtcttggcttggccacacccactgccgtgatggtcggaaccggagtggcagcccagaatgggatcctgatcaagggaggaaaacctttggaaatggcacacaaggaactaggtacagaaacccttggctactgcaccgattttcaggccgtccctggatgtggcataggatgtaaagtatcgaatgttgaagggatcctggcccactctgagcgaccactgtccgcacctgcctctcatctcaacgaagccggaagtctgcccgccgaaaaagacgcagtgccccaaactttcagcgttcttatcggaaatcgggaatggctcagacgaaatggactgacgatctcgagcgatgtcagcgacgcaatgacagatcatgaaatgaaaggccagaccgctattctggtggcaatcgacggtgtactttgcggcatgatcgcgattgcagatgccgtgaaacaggaagccgctctggccgtgcatactctccaatcaatgggcgtggacgtggtcctcatcacaggcgataaccgaaaaaccgcacgagctatagcgacccaagtgggaattaacaaagtatttgctgaggtgttgccatcccataaggtagccaaagtccaagaattacagaacaaaggcaagaaagtcgctatggttggcgacggcgttaatgacagccccgcactggctcaggccgacatgggagtagccatcgggaccggaaccgacgtagccattgaagctgcagacgtggtactcatccgaaacgacttactggacgttgtggcctccatacatctctccaaaaggacggttcgtcgaattcgcataaacctggtacttgccctgatctacaaccttgtagggatcccaattgccgcaggagttttcatgccgattggaatcgtgctacaaccgtggatgggatccgccgccatggctgcctccagcgttagcgtggtcttatcatccttacagttgaaatgctataaaaagcccgatttggaaagatatgaagctcaggctcacggccatatgaaacccctgacagcatcccaagtgagcgtgcatatcggcatggacgacaggtggcgggatagcccaagggccaccccctgggaccaggtgagttatgttagtcaagtttctctctcaagcctgacttctgacaagccttccagacacagcgctgctgctgacgatgacggagacaagtggtctttactcttgaatgggcgggacgaagagcagtatatctag

SEQ ID NO: 293066 - RNA, 2031 nt, Artificial Sequence
  derived and/or modified sequence
auggacgugcuaauaguccuugcuacgucaauugccuauguguacuccuuggugauacuagucguagccguggcggagaaggcagaacguucccccgugacuuucuuugacacgccuccuaugcucuucgucuuuauugcacugggaagauggcucgaacaucuugccaaaucuaaaacgucagaggcccucgcaaagcuuaugagucuacaagcaaccgaggccacagucgugacccuuggcgaagauaaccugauuauuagggaagaacagguaccaauggagcuggugcaacgaggugacauuguuaagguuguacccggggguaaguuuccaguggacggaaaggugcuggaaggaaacacuauggcugaugaaucucucaucacaggcgaagcaaugccagucacaaaaaaacccgggucaacuguuauagcaggaagcaucaaugcucacggcagcgugcucauaaaggccacacacgugggaaacgacacuacccuagcgcagaucguuaagcuggucgaagaggcgcagauguccaaggccccuauucaacagcuggcagauagauuuucaggauacuucgugccuuucauuaucauuaugucgacauugacacucguugucuggauaguaaucggguucaucgacuucggaguaguccaaagauauuucccaaaccccaauaagcauauuagccagaccgaagucaucauccguuucgcauuucagacuaguaucaccgugcucugcauugcuugcccuugcagucuuggcuuggccacacccacugccgugauggucggaaccggaguggcagcccagaaugggauccugaucaagggaggaaaaccuuuggaaauggcacacaaggaacuagguacagaaacccuuggcuacugcacagauuuucaggcugucccuggaugcggcaucggcuguaaagugucaaacgucgagggaauacuggcacacagcgagcggccucuuucggcgccagcuucucaucugaaugaagcugggucacucccugccgaaaaggacgccgucccucagacuuuuucuguccugaucgggaaccgagaguggcugcgacgcaauggguugacuaucagcucagaugugagcgacgcgaugaccgaucacgagaugaaaggucaaacagccauccuggucgcgauagauggagugcuuugcgggaugauugccauugccgaugcgguaaagcaagaagcagcucucgcuguucauacacugcagucuauggguguggauguggugcucaucaccggcgauaaucgaaagacggccagggcaauugcuacacaggugggcaucaauaaagucuucgcagaaguguuaccaagucacaagguugcaaaagugcaggaguuacagaauaaggguaaaaagguugccaugguuggagacggagugaaugauagccccgcccuggcacaggccgauaugggcguugccaucggcacagggacugacguagccauugaagcugcagacgugguacucauccgaaacgacuuacuggacguuguggccuccauacaucucuccaaaaggacgguucgucgaauucgcauaaaccugguacuugcccugaucuacaaccuuguagggaucccaauugccgcaggaguuuucaugccgauuggaaucgugcuacaaccguggaugggauccgccgccauggcugccuccagcguuagcguggucuuaucauccuuacaguugaaaugcuauaaaaagcccgauuuggaaagauaugaagcucaggcucacggacacaugaagccucugacggccucacaggucuccguucacaucggaauggaugaccgguggcgggacucuccccgggcaaccccuugggaccaagugucuuacgucagccaggugagucucaguucgcugacguccgacaaaccuucccgacacucugcugcggcugacgaugacggugauaaguggucucuguuacuuaacgggcgagacgaggaacaguacauuuag

SEQ ID NO: 293067 - RNA, 2031 nt, Artificial Sequence
  derived and/or modified sequence
auggaugugcugauugugcuggccaccuccaucgcuuacguguacagucucguaauccucguugucgcaguugccgaaaaagcugagcggagcccagugaccuuuuuugacaccccuccaauguuguucguauuuaucgcuuuaggacgaugguuggagcacuuggccaagucuaagacaucagaggcccuugcaaaguuaaugagccuccaggccacagaggcuacaguugucaccuugggagaagauaaccucauaaucagggaggaacaagugcccauggagcugguucagagaggagacaucgugaagguagucccuggcgguaaguuccccguagauggaaagguacuugaaggcaacaccauggcugaugagagccuuauuacuggugaagcaaugccagucacuaagaagccaggcucuacugucauugcuggaaguauuaacgcacacgguagcguuuugaucaaagcaacccacguagggaaugacacaacacuggcucagaucguuaagcucguggaagaggcccaaaugagcaaggcaccgauucagcaguuagccgaucgcuuuaguggauauuuuguucccuucaucaucauuaugucgacauugacacucguugucuggauaguaaucggguucaucgacuucggaguaguccaaagauauuucccaaaccccaauaagcauauuagccagaccgaagucaucauccguuucgcauuucagacuaguaucaccgugcucugcauugcuugcccuugcagucuuggcuuggccacacccacugccgugauggucggaaccggaguggcagcccagaaugggauccugaucaagggaggaaaaccuuuggaaauggcacacaaggaacuagguacagaaacccuuggcuacugcaccgauuuucaggccgucccuggauguggcauaggauguaaaguaucgaauguugaagggauccuggcccacucugagcgaccacuguccgcaccugccucucaucucaacgaagccggaagucugcccgccgaaaaagacgcagugccccaaacuuucagcguucuuaucggaaaucgggaauggcucagacgaaauggacugacgaucucgagcgaugucagcgacgcaaugacagaucaugaaaugaaaggccagaccgcuauucugguggcaaucgacgguguacuuugcggcaugaucgcgauugcagaugccgugaaacaggaagccgcucuggccgugcauacucuccaaucaaugggcguggacgugguccucaucacaggcgauaaccgaaaaaccgcacgagcuauagcgacccaagugggaauuaacaaaguauuugcugagguguugccaucccauaagguagccaaaguccaagaauuacagaacaaaggcaagaaagucgcuaugguuggcgacggcguuaaugacagccccgcacuggcucaggccgacaugggaguagccaucgggaccggaaccgacguagccauugaagcugcagacgugguacucauccgaaacgacuuacuggacguuguggccuccauacaucucuccaaaaggacgguucgucgaauucgcauaaaccugguacuugcccugaucuacaaccuuguagggaucccaauugccgcaggaguuuucaugccgauuggaaucgugcuacaaccguggaugggauccgccgccauggcugccuccagcguuagcguggucuuaucauccuuacaguugaaaugcuauaaaaagcccgauuuggaaagauaugaagcucaggcucacggccauaugaaaccccugacagcaucccaagugagcgugcauaucggcauggacgacagguggcgggauagcccaagggccacccccugggaccaggugaguuauguuagucaaguuucucucucaagccugacuucugacaagccuuccagacacagcgcugcugcugacgaugacggagacaaguggucuuuacucuugaaugggcgggacgaagagcaguauaucuag

SEQ ID NO: 293068 - protein, 523 aa, Artificial Sequence
  derived and/or modified sequence
MMLRGNLKQVRIEKNPARLRALESAVGESEPAAAAAMALALAGEPAPPAPAPPEDHPDEEMGFTIDIKSFLKPGEKTYTQRCRLFVGNLPTDITEEDFKRLFERYGEPSEVFINRDRGFGFIRLESRTLAEIAKAELDGTILKSRPLRIRFATHGAALTVKNLSPVVSNELLEQAFSQFGPVEKAVVVVDDRGRATGKGFVEFAAKPPARKALERCGDGAFLLTTTPRPVIVEPMEQFDDEDGLPEKLMQKTQQYHKEREQPPRFAQPGTFEFEYASRWKALDEMEKQQREQVDRNIREAKEKLEAEMEAARHEHQLMLMRQDLMRRQEELRRLEELRNQELQKRKQIQLRHEEEHRRREEEMIRHREQEELRRQQEGFKPNYMENREQEMRMGDMGPRGAINMGDAFSPAPAGNQGPPPMMGMNMNNRATIPGPPMGPGPAMGPEGAANMGTPMMPDNGAVHNDRFPQGPPSQMGSPMGSRTGSETPQAPMSGVGPVSGGPGGFGRGSQGGNFEGPNKRRRY

SEQ ID NO: 293069 - protein, 463 aa, Artificial Sequence
  derived and/or modified sequence
MGFTIDIKSFLKPGEKTYTQRCRLFVGNLPTDITEEDFKRLFERYGEPSEVFINRDRGFGFIRLESRTLAEIAKAELDGTILKSRPLRIRFATHGAALTVKNLSPVVSNELLEQAFSQFGPVEKAVVVVDDRGRATGKGFVEFAAKPPARKALERCGDGAFLLTTTPRPVIVEPMEQFDDEDGLPEKLMQKTQQYHKEREQPPRFAQPGTFEFEYASRWKALDEMEKQQREQVDRNIREAKEKLEAEMEAARHEHQLMLMRQDLMRRQEELRRLEELRNQELQKRKQIQLRHEEEHRRREEEMIRHREQEELRRQQEGFKPNYMENREQEMRMGDMGPRGAINMGDAFSPAPAGNQGPPPMMGMNMNNRATIPGPPMGPGPAMGPEGAANMGTPMMPDNGAVHNDRFPQGPPSQMGSPMGSRTGSETPQAPMSGVGPVSGGPGGFGRGSQGGNFEGPNKRRRY

SEQ ID NO: 293070 - DNA, 1572 bp, Artificial Sequence
  derived and/or modified sequence
atgatgcttcgtggcaaccttaagcaggtcagaatagagaaaaacccagcaagacttcgagcactggaatccgctgtcggagaatcagaaccagcagcggccgcagccatggccttagccttggccggcgagcccgccccacccgcacccgctcccccagaagaccaccccgatgaagaaatggggtttactattgatatcaagtctttcctgaagcccggtgaaaagacctacacacagcgatgtaggctgttcgtgggtaacctcccgacagacattactgaagaagacttcaagagactgtttgaacgatacggcgagccgtcggaggtgttcatcaaccgggatcgagggttcggctttatacggttagaatcccggacgcttgccgagatcgccaaggctgagctggacgggaccattctgaaatcgagacctctcagaatacgctttgccacccacggtgccgccctgaccgtcaagaatctttcccccgttgtgtcaaatgaactgctggagcaagcatttagccagttcggacccgtggagaaggcagtggtggtggtggatgaccgcggtagagcgactggcaagggattcgtggaatttgccgcaaaacccccggccagaaaggccctcgaaagatgtggggatggggcctttctgcttactaccacccctcgccccgtgattgtggagcccatggagcagtttgacgatgaagatggcctgcctgaaaaactcatgcagaaaacacagcagtaccataaggaacgcgagcagccccctagattcgcacaaccgggaacgttcgaattcgagtatgcatccaggtggaaggccttagatgaaatggagaaacagcagcgcgagcaagtcgatcggaatataagagaagctaaagagaagttggaggctgagatggaggccgcccggcacgagcatcagctaatgttgatgcgtcaagacctcatgcgacgccaagaggagctgagaaggctggaggaactacggaaccaggagctgcagaagcgtaaacaaatccagctgcgccacgaggaagaacaccgccggagagaggaagagatgatccgccaccgagagcaagaagaactgagacgccagcaggaaggatttaaacctaactatatggaaaacagagagcaagaaatgcgtatgggcgacatgggaccccgcggcgccatcaacatgggggacgcattctcccccgctcccgcgggaaatcagggccctcctcctatgatgggcatgaatatgaataaccgggccacaatcccaggcccaccaatggggccaggccccgccatgggtcctgaaggggccgctaacatgggcactccaatgatgcctgacaacggtgctgtccacaacgatcggttcccccaggggcccccatcccagatgggatcacctatgggctcccgtactggaagcgaaacaccacaagcccctatgtccggagtaggtccggtatccggagggcccggcgggttcggtaggggatcccagggaggaaatttcgagggacccaacaaaaggcggagatactag

SEQ ID NO: 293071 - DNA, 1392 bp, Artificial Sequence
  derived and/or modified sequence
atgggctttaccatcgacatcaagtcctttctgaagcctggggagaaaacgtatacacaacggtgtaggcttttcgtggggaatttgcctaccgacatcacagaagaggactttaagagactctttgaacggtacggggagccttctgaggtgtttattaaccgagatcgaggatttggttttataagacttgagagccggaccctcgccgaaattgctaaagccgagctggatggaactattctgaagtctagacctctcaggattcgcttcgcgacccacggcgcagccctcaccgttaagaacctgagcccggttgtaagcaacgaactcctcgaacaggccttttctcagttcgggccagtcgaaaaggccgtcgtggtggtggacgacagaggccgggccaccggaaaggggttcgtggaatttgcggccaaacctccggcaagaaaggcattagaaaggtgcggagatggggcctttctgctaaccacaactccaaggcccgtgatagtggagccgatggaacagtttgacgatgaggacggcctgcccgagaagctcatgcaaaagacccagcaatatcacaaggaacgcgaacagcctccacggttcgctcagcctggaacattcgaattcgagtatgcttctagatggaaggccttagacgagatggaaaaacagcaaagggagcaagttgatcggaatatccgggaggcgaaagagaaacttgaagccgagatggaagcagcccggcacgagcaccagctcatgctgatgagacaagatttaatgcgcagacaagaggaactcagacggctggaggaactacggaaccaggaactccagaagcgcaagcagatacaactgagacatgaagaagagcaccgaaggcgtgaagaagaaatgatacgccatcgggagcaagaggagctcaggcggcagcaggagggattcaaacccaattacatggaaaaccgggaacaggagatgagaatgggagatatgggacccaggggagcaattaatatgggagatgccttctctcctgcccccgcaggcaatcaaggtccccccccaatgatggggatgaacatgaataaccgggccacgataccagggccgcccatgggcccaggtccagccatggggccggaaggggcagcaaacatgggaacccctatgatgcctgacaatggggctgtccataacgacagatttccacaaggcccaccaagtcaaatgggctcccctatgggatctcggacaggctctgaaaccccgcaagctccgatgtccggggtaggcccagtgtccgggggacctggcggctttggcaggggatcacagggcggtaactttgaaggaccaaacaagagacgcagatactag

SEQ ID NO: 293072 - DNA, 1572 bp, Artificial Sequence
  derived and/or modified sequence
atgatgctgcggggcaacctgaagcaggtgcgcatcgagaagaacccagcccggctgcgggccctggagagcgctgtgggggagagcgagcctgctgctgctgctgccatggccctggccctggccggggagcccgcccccccagccccagcccctcctgaggaccacccagatgaggagatgggcttcaccatcgacatcaagagcttcctgaagccaggagagaagacctacacccagcgctgccgcctgtttgtgggcaacctgcccacagacatcacagaggaggacttcaagaggctgtttgaaagatatggagagcccagcgaggtgttcatcaacagagaccggggcttcggcttcatccggctggagagcaggaccctggccgagatcgccaaggccgagctggatggcaccatcctgaagagccggcccctgcgcatccgctttgccacccacggggccgccctgactgtgaagaacctgagccctgtggtgtccaatgagctgctggagcaggccttcagccagtttggacctgtggagaaggctgtggtggtggtggatgaccggggccgggccaccgggaagggctttgtggagtttgctgccaagcccccagccaggaaggccctggagcgctgtggagatggagccttcctgctgaccaccacccccaggcctgtgattgtggagcccatggagcagtttgatgatgaagatggcctgcctgagaagctgatgcagaagacccagcagtaccacaaggagcgggagcagccccccaggtttgcccagcccggcacctttgaatttgaatatgccagccgctggaaggccctggatgagatggagaagcagcagcgggagcaggtggacaggaacatccgggaggccaaggagaagctggaggccgagatggaggccgcccggcatgagcaccagctgatgctgatgaggcaggacctgatgaggcggcaggaggagctgcggcggctggaggagctgaggaaccaggagctgcagaagaggaagcagatccagctgcggcatgaggaggagcacagaagaagagaggaggagatgatccgccaccgggagcaggaggagctgcggcggcagcaggagggcttcaagcccaactacatggagaaccgggagcaggagatgaggatgggagacatgggccccaggggggccatcaacatgggagatgccttcagccctgccccagctggcaaccagggccccccacccatgatgggcatgaacatgaacaacagagccaccatccctggcccccccatgggccctggccctgccatgggccctgagggcgccgccaacatgggcacccccatgatgccagacaatggagctgtgcacaatgaccgcttcccccagggcccccccagccagatgggcagccccatgggcagcaggactggaagtgagaccccccaggcccccatgtctggagtgggccctgtgtctgggggccctgggggcttcggccggggcagccagggcggcaactttgagggccccaacaagagaagacgctactag

SEQ ID NO: 293073 - DNA, 1392 bp, Artificial Sequence
  derived and/or modified sequence
atgggcttcaccatcgacatcaagagcttcctgaagccaggagagaagacctacacccagcgctgccgcctgtttgtgggcaacctgcccacagacatcacagaggaggacttcaagaggctgtttgaaagatatggagagcccagcgaggtgttcatcaacagagaccggggcttcggcttcatccggctggagagcaggaccctggccgagatcgccaaggccgagctggatggcaccatcctgaagagccggcccctgcgcatccgctttgccacccacggggccgccctgactgtgaagaacctgagccctgtggtgtccaatgagctgctggagcaggccttcagccagtttggacctgtggagaaggctgtggtggtggtggatgaccggggccgggccaccgggaagggctttgtggagtttgctgccaagcccccagccaggaaggccctggagcgctgtggagatggagccttcctgctgaccaccacccccaggcctgtgattgtggagcccatggagcagtttgatgatgaagatggcctgcctgagaagctgatgcagaagacccagcagtaccacaaggagcgggagcagccccccaggtttgcccagcccggcacctttgaatttgaatatgccagccgctggaaggccctggatgagatggagaagcagcagcgggagcaggtggacaggaacatccgggaggccaaggagaagctggaggccgagatggaggccgcccggcatgagcaccagctgatgctgatgaggcaggacctgatgaggcggcaggaggagctgcggcggctggaggagctgaggaaccaggagctgcagaagaggaagcagatccagctgcggcatgaggaggagcacagaagaagagaggaggagatgatccgccaccgggagcaggaggagctgcggcggcagcaggagggcttcaagcccaactacatggagaaccgggagcaggagatgaggatgggagacatgggccccaggggggccatcaacatgggagatgccttcagccctgccccagctggcaaccagggccccccacccatgatgggcatgaacatgaacaacagagccaccatccctggcccccccatgggccctggccctgccatgggccctgagggcgccgccaacatgggcacccccatgatgccagacaatggagctgtgcacaatgaccgcttcccccagggcccccccagccagatgggcagccccatgggcagcaggactggaagtgagaccccccaggcccccatgtctggagtgggccctgtgtctgggggccctgggggcttcggccggggcagccagggcggcaactttgagggccccaacaagagaagacgctactag

SEQ ID NO: 293074 - DNA, 1572 bp, Artificial Sequence
  derived and/or modified sequence
atgatgctgcggggcaacctgaagcaggtgcggatcgagaagaaccccgccaggctgcgcgccctggaatcagcagtcggagaaagtgagcccgccgcggcagctgctatggcactggcattggccggagaacccgcaccgcccgcccctgccccaccagaggaccatcctgatgaagagatgggcttcacaattgacatcaagagttttcttaaaccaggcgaaaaaacatatacccaaaggtgcagactgtttgtcggcaatctacctactgacattaccgaagaagatttcaagaggctctttgaacgatacggggaaccctcggaagtttttattaatcgcgacagaggttttggctttatccggcttgaaagccgcacactggccgagattgccaaggcagagcttgacgggaccatcctgaagtcccggcctttaagaattaggttcgccacacacggtgccgcactgaccgtgaaaaacctaagtcccgttgtctctaatgaacttctggaacaagcctttagccagttcgggcctgtggagaaagccgtagtggtggtcgatgaccggggccgagcgacaggtaagggatttgtggaattcgctgctaaaccacccgctagaaaagctctggagaggtgtggtgatggtgcttttctactgaccaccactccccgcccggtgatagtggagcctatggagcagtttgatgacgaggatgggcttccagagaagctaatgcaaaagactcagcagtatcataaggagcgagaacagcctccacggtttgcccaaccaggtactttcgagtttgagtacgcatcccgatggaaagctcttgatgagatggagaaacaacagagggaacaggtagacaggaatataagggaggccaaagagaaattagaggctgagatggaggccgcgcgacatgagcatcagctcatgcttatgagacaagatctgatgaggagacaggaagaactgcgacgtcttgaggaactgcgtaatcaggaattacaaaagcgcaagcagatccaactccgacacgaggaggagcacagaagacgtgaagaggagatgatccgccatcgggagcaagaggaactgcggagacagcaggagggctttaaacctaattatatggagaatagagagcaggaaatgaggatgggcgacatgggccctaggggcgccatcaacatgggagatgccttctccccagcccctgcagggaatcagggaccgccccctatgatgggtatgaatatgaacaatcgcgctacaattccaggacctcccatgggcccaggcccagcgatgggccccgagggagctgccaatatgggtacccccatgatgcccgacaatggtgccgtgcataacgaccgttttccccaggggccacccagccagatgggttcaccaatgggaagccgtacaggatccgaaaccccccaagcaccaatgagcggcgtcgggcctgtcagcggcggacctggcggattcggcagaggatcacagggtggcaactttgagggtcccaacaaacggaggcggtattag

SEQ ID NO: 293075 - DNA, 1392 bp, Artificial Sequence
  derived and/or modified sequence
atgggcttcaccatcgacatcaagagcttcctgaagcccggcgagaagacctatacacagagatgtagactgttcgtcggcaatctgcccaccgacataaccgaggaggattttaaacggttgttcgagcgatatggagagcccagcgaagtattcatcaaccgggacagggggttcggtttcattcggctcgagagccggaccttagcggagatcgccaaggccgagctcgacggaactattttaaagagccgacccctacgaattaggttcgctacacacggagcggccttaactgtcaaaaatctctcgccggtggtttccaacgagctgctggagcaggccttttcacagttcggacctgtggagaaggccgtagtggtggtggacgaccgcggcagggccacaggaaagggttttgtggaattcgcagccaagccacctgcaaggaaggctctcgaacgctgtggcgacggggctttcctcctcaccacaacaccgcgccccgtgatcgtggaacctatggaacagtttgacgatgaggacggcctacccgaaaaacttatgcagaagacacagcaataccacaaggagagggagcagcccccgcgtttcgcgcaacctggtactttcgagttcgagtacgccagccgctggaaagcattggatgagatggaaaagcaacagagagagcaggtagataggaatataagagaagctaaggaaaaattggaagcggaaatggaagcggcgcggcatgagcaccaactaatgcttatgcgtcaggatctcatgcggcggcaggaggagctacgcagactcgaggagctgaggaatcaggaattgcagaagcggaagcaaatccagctgagacacgaagaagagcaccgacgaagggaagaggaaatgatacgtcatagggaacaggaagaattgagaaggcagcaggaagggttcaagcccaactacatggagaacagagaacaagaaatgcgcatgggagacatggggcctagaggtgccatcaacatgggcgacgccttctccccagctccagctggtaaccagggtccgccgcccatgatggggatgaatatgaacaatagggctactataccagggccacctatgggacccggtcctgctatgggacctgaaggggccgctaatatgggcacccccatgatgcctgacaatggcgcagtccacaacgaccggtttccgcagggacctccaagccagatgggctccccaatgggatccaggaccggttcggagactccacaggcccctatgtcaggcgtggggccagtgagcggggggccgggcggctttgggcgcggaagccaaggtggcaactttgaaggtcccaacaaacgccgccgctactag

SEQ ID NO: 293076 - DNA, 2407 bp, Artificial Sequence
  derived and/or modified sequence
cgtgagttgggggaggacgggttgccgactcgcctacctagcggtctcttgattgtcgatattttgttggcataggtttatgtagagacgtatacatatatatagacacactgtctataaatctaggcctgtatccggtgtccgaggcgaactcagtaagatgatgttaagaggaaacctgaagcaagtgcgcattgagaaaaacccggcccgccttcgcgccctggagtccgcggtgggcgagagcgagccggcggccgcggcagccatggcgctcgctcttgccggggagccggcaccgcccgcgcccgcgcctccagaggaccacccggacgaggagatggggttcactatcgacatcaagagtttcctcaagccgggcgagaagacgtacacgcagcgctgccgcctcttcgtgggaaatctgcccaccgacatcacggaggaggacttcaagaggctcttcgaacgctatggcgagcccagcgaagtcttcatcaaccgggaccgtggcttcggcttcatccgcttggaatccagaaccctggctgaaattgcaaaagcagagctggacggcaccattctcaagagcagacctctacggattcgcttcgctacacatggagcagccttgactgtcaagaacctttctccagttgtttccaatgagctgctagagcaagcattttctcagtttggtccagtagagaaagctgttgtggttgtggatgatcgcggtagagctacaggaaaaggttttgtagagtttgcagcaaaacctcctgcacgaaaggctctggaaagatgtggtgatggggcattcttgctaacaacgacccctcgtccagtcattgtggaacccatggagcagtttgatgatgaagatggcttgccagagaagctgatgcagaaaactcaacaatatcataaggaaagagaacaaccaccacgttttgctcaacctgggacatttgaatttgagtatgcatctcgatggaaggctcttgatgaaatggaaaagcagcagcgtgagcaggttgatagaaacatcagagaagccaaagagaaactggaggcagaaatggaagcagctaggcatgaacaccaattaatgctaatgaggcaagatctaatgaggcgtcaagaagaactcagacgcttggaagaactcagaaaccaagagttgcaaaaacggaagcaaatacaactaagacatgaagaggagcatcggcggcgtgaggaagaaatgatccgacacagagaacaggaggaactgaggcgacagcaagagggctttaagccaaactacatggaaaatagagaacaggaaatgagaatgggtgatatgggtccccgtggagcaataaacatgggagatgcgtttagcccagcccctgctggtaaccaaggtcctcctccaatgatgggtatgaatatgaacaacagagcaactatacctggcccaccaatgggtcctggtcctgccatgggaccagaaggagccgcaaatatgggaactccaatgatgccagataatggagcagtgcacaatgacagatttcctcaaggaccaccatctcagatgggttcacctatggggagtagaacaggttctgaaacccctcaagcaccaatgagtggtgtaggtcctgtgagtggtggtcctggtggctttggtagaggaagtcaagggggcaactttgaaggccctaataagcgtcgtagatattaaacattcgttcattcctggctatctagaaaaaaaaaagtcagtggtatgcctttatacttttacctgttatctggaagaaatggttttattgttaatgtatgtagacttaaaagtttttttttttttgtaaaacttgaggtttttgtatttttctttattcatgagctttgtagattagaatggtaatgatgctcatcattttgaatgttgaaatgtgtttgtgactttagctaaatataagtattccatagtactgtgaaatctatgtagttaatctcaataaagaaatcattttggataatttaaaactgttattagtggtattctcttacggtcttactaaactttgctgtaacagtaatgctttggttgctttaactaatcctatcattaaaaatgaaaatgattttgctttttaatttgcgcaagtagcactaaagatagaagcttaattaatgaaagctaatgtcaataaggggtagatagagtagtatatgtgggggtgggagggtatgggagtttaatttgtataaaccactgatgttctgtgaaatcggaatttccagctacatttcatatagcttctgaatattcaggtattctgagacagattattaaggatatctttgtcctgtgctgatttttccaaataaatctttttcatcttgaaaaaaa

SEQ ID NO: 293077 - DNA, 1645 bp, Artificial Sequence
  derived and/or modified sequence
attttgaatgtgcagctgcagcgggcgcctgtatccggtgtccgaggcgaactcagtaagatgatgttaagaggaaacctgaagcaagtgcgcattgagaaaaacccggcccgcgcctccagaggaccacccggacgaggagatggggttcactatcgacatcaagagtttcctcaagccgggcgagaagacgtacacgcagcgctgccgcctcttcgtgggaaatctgcccaccgacatcacggaggaggacttcaagaggctcttcgaacgctatggcgagcccagcgaagtcttcatcaaccgggaccgtggcttcggcttcatccgcttggaatccagaaccctggctgaaattgcaaaagcagagctggacggcaccattctcaagagcagacctctacggattcgcttcgctacacatggagcagccttgactgtcaagaacctttctccagttgtttccaatgagctgctagagcaagcattttctcagtttggtccagtagagaaagctgttgtggttgtggatgatcgcggtagagctacaggaaaaggttttgtagagtttgcagcaaaacctcctgcacgaaaggctctggaaagatgtggtgatggggcattcttgctaacaacgacccctcgtccagtcattgtggaacccatggagcagtttgatgatgaagatggcttgccagagaagctgatgcagaaaactcaacaatatcataaggaaagagaacaaccaccacgttttgctcaacctgggacatttgaatttgagtatgcatctcgatggaaggctcttgatgaaatggaaaagcagcagcgtgagcaggttgatagaaacatcagagaagccaaagagaaactggaggcagaaatggaagcagctaggcatgaacaccaattaatgctaatgaggcaagatctaatgaggcgtcaagaagaactcagacgcttggaagaactcagaaaccaagagttgcaaaaacggaagcaaatacaactaagacatgaagaggagcatcggcggcgtgaggaagaaatgatccgacacagagaacaggaggaactgaggcgacagcaagagggctttaagccaaactacatggaaaatagagaacaggaaatgagaatgggtgatatgggtccccgtggagcaataaacatgggagatgcgtttagcccagcccctgctggtaaccaaggtcctcctccaatgatgggtatgaatatgaacaacagagcaactatacctggcccaccaatgggtcctggtcctgccatgggaccagaaggagccgcaaatatgggaactccaatgatgccagataatggagcagtgcacaatgacagatttcctcaaggaccaccatctcagatgggttcacctatggggagtagaacaggttctgaaacccctcaagcaccaatgagtggtgtaggtcctgtgagtggtggtcctggtggctttggtagaggaagtcaagggggcaactttgaaggccctaataagcgtcgtagatattaaacattcgttcattcctggctatctagaaaaaaaaaagtcagtggtatgcctttatacttttacctgttatctggaagaaatggttttattgttaatgtatgtagacttaaa

SEQ ID NO: 293078 - DNA, 1572 bp, Artificial Sequence
  derived and/or modified sequence
atgatgctgcggggaaacctaaagcaagtgcgaattgagaagaatcccgctaggctaagggcgcttgaatccgcggtgggcgaatcagagccagcagcagcagctgctatggccctggctttggccggtgaacctgctcccccagctccagcccctccagaagaccatcccgatgaagagatgggttttaccattgatatcaagtcctttctaaaaccaggtgagaaaacgtatacccagcgttgtagattatttgtaggcaatcttccaaccgatataaccgaggaagattttaagagactgttcgagagatacggagagccatccgaggtgtttatcaaccgtgacagaggcttcgggttcatccggctggagtcacgaaccctagctgaaatcgccaaggcagagctcgatggcaccattcttaagagcagacccttgagaatcagatttgctactcatggtgccgctttgaccgtgaagaacctgtccccggtggtgtctaacgagctgctagaacaagcatttagccagtttggcccagtggagaaagccgtcgttgtggtggacgaccgaggaagagcaaccggtaagggtttcgtggagttcgctgcaaagccccctgcgcgtaaggccctggagagatgtggagacggcgcattcctgctaactacaacacccagaccagtgatcgtagaaccaatggagcagtttgatgacgaggacgggctacccgaaaagttgatgcaaaaaacccagcagtaccataaggagagagaacagcctcccagattcgcccagccagggacatttgagttcgaatacgccagcagatggaaagcgcttgatgagatggaaaaacaacagcgtgagcaggtcgaccgcaatatccgcgaggcgaaagagaagctcgaggcagagatggaggctgctagacacgaacatcagctaatgctgatgaggcaggaccttatgcgccgtcaggaagagctgcggcgattggaggaactcagaaatcaagagctccagaaacggaagcagatccaactgagacacgaggaggagcacaggaggcgagaggaggagatgatccgccacagggagcaggaggagctccggagacagcaagaggggttcaagcccaattacatggaaaaccgcgagcaggagatgcggatgggcgatatgggcccaaggggggctattaatatgggagatgctttctcacccgctcccgctggaaatcaggggcctcctccaatgatgggcatgaatatgaacaaccgcgcaaccatccccggtccacccatggggccagggcctgccatgggccctgaaggtgcggctaacatgggaacccccatgatgcccgataatggcgcagtccataatgacaggttcccgcaaggcccaccttctcagatgggatcccctatgggctctcgcacagggagtgagacccctcaggcaccgatgtctggtgttggaccggtaagcggcggaccgggaggctttgggcgaggatcccagggcggaaattttgaaggaccgaacaaaaggagaagatactag

SEQ ID NO: 293079 - DNA, 1392 bp, Artificial Sequence
  derived and/or modified sequence
atgggattcaccatcgatattaagagctttttaaagccaggtgagaaaacatatacccagaggtgtagactctttgtcggcaacctgcctacagatataaccgaagaggatttcaaacgactcttcgaaagatacggcgagccctctgaggtgtttataaatagggatagggggtttggtttcataagattagagtcccgcaccctggccgaaatcgccaaggcggagttggatggcactatcctcaaatctcgcccactgagaatccgattcgcaacacatggagcggctctgaccgtgaagaatctgtctcctgtagtatcaaatgagctcctggaacaggccttcagccaatttgggccagtggaaaaggcggtcgttgtggttgacgaccgtggccgtgccactggcaagggcttcgtggaattcgccgcaaagccaccagcgaggaaggctctggaaaggtgtggcgatggagcctttctgcttacaacaaccccacgtcctgtgatcgttgaacccatggagcagttcgatgatgaggacggcctgccagagaaactgatgcagaaaactcagcaatatcataaggagagagagcagccgcctcggtttgctcaacctgggacgttcgagttcgaatacgcgtcacgttggaaagcattagacgagatggagaaacagcaacgcgagcaggtggatcgtaatattcgggaggcaaaggaaaagctggaggctgagatggaggcagcgcgacacgagcatcagctcatgcttatgaggcaggacctgatgaggaggcaggaggaattacgcaggctagaagaattacggaaccaagagctgcagaaacgcaagcagattcagctgcgccatgaggaagagcatcgaagacgggaagaggagatgatccgacaccgtgagcaggaggaactgcgccgacaacaggagggattcaagcccaactacatggagaacagggagcaggaaatgagaatgggagatatgggacccagaggagccattaacatgggtgacgccttctcacccgcacccgctgggaaccagggcccacctcccatgatgggcatgaacatgaataacagagctaccattccgggtccaccaatggggccaggccctgccatgggcccagagggcgctgccaatatgggcacgcctatgatgccggataacggcgctgtacacaacgaccgtttcccacaaggccctcccagtcaaatggggagccctatgggttccaggacaggctctgaaacaccccaggctcctatgtccggggtgggtccggtttcaggcggaccagggggatttggccgaggatctcaaggcggaaattttgagggaccgaataagcgcagaagatattag

SEQ ID NO: 293080 - DNA, 1572 bp, Artificial Sequence
  derived and/or modified sequence
atgatgctgagaggcaacctgaagcaggtgagaatcgagaagaaccccgccagactgagagccctggagagcgccgtgggcgagagcgagcccgccgccgccgccgccatggccctggccctggccggcgagcccgccccccccgcccccgccccccccgaggaccaccccgacgaggagatgggcttcaccatcgacatcaagagcttcctgaagcccggcgagaagacctacacccagagatgcagactgttcgtgggcaacctgcccaccgacatcaccgaggaggacttcaagagactgttcgagagatacggcgagcccagcgaggtgttcatcaacagagacagaggcttcggcttcatcagactggagagcagaaccctggccgagatcgccaaggccgagctggacggcaccatcctgaagagcagacccctgagaatcagattcgccacccacggcgccgccctgaccgtgaagaacctgagccccgtggtgagcaacgagctgctggagcaggccttcagccagttcggccccgtggagaaggccgtggtggtggtggacgacagaggcagagccaccggcaagggcttcgtggagttcgccgccaagccccccgccagaaaggccctggagagatgcggcgacggcgccttcctgctgaccaccacccccagacccgtgatcgtggagcccatggagcagttcgacgacgaggacggcctgcccgagaagctgatgcagaagacccagcagtaccacaaggagagagagcagccccccagattcgcccagcccggcaccttcgagttcgagtacgccagcagatggaaggccctggacgagatggagaagcagcagagagagcaggtggacagaaacatcagagaggccaaggagaagctggaggccgagatggaggccgccagacacgagcaccagctgatgctgatgagacaggacctgatgagaagacaggaggagctgagaagactggaggagctgagaaaccaggagctgcagaagagaaagcagatccagctgagacacgaggaggagcacagaagaagagaggaggagatgatcagacacagagagcaggaggagctgagaagacagcaggagggcttcaagcccaactacatggagaacagagagcaggagatgagaatgggcgacatgggccccagaggcgccatcaacatgggcgacgccttcagccccgcccccgccggcaaccagggccccccccccatgatgggcatgaacatgaacaacagagccaccatccccggcccccccatgggccccggccccgccatgggccccgagggcgccgccaacatgggcacccccatgatgcccgacaacggcgccgtgcacaacgacagattcccccagggcccccccagccagatgggcagccccatgggcagcagaaccggcagcgagaccccccaggcccccatgagcggcgtgggccccgtgagcggcggccccggcggcttcggcagaggcagccagggcggcaacttcgagggccccaacaagagaagaagatactag

SEQ ID NO: 293081 - DNA, 1392 bp, Artificial Sequence
  derived and/or modified sequence
atgggcttcaccatcgacatcaagagcttcctgaagcccggcgagaagacctacacccagagatgcagactgttcgtgggcaacctgcccaccgacatcaccgaggaggacttcaagagactgttcgagagatacggcgagcccagcgaggtgttcatcaacagagacagaggcttcggcttcatcagactggagagcagaaccctggccgagatcgccaaggccgagctggacggcaccatcctgaagagcagacccctgagaatcagattcgccacccacggcgccgccctgaccgtgaagaacctgagccccgtggtgagcaacgagctgctggagcaggccttcagccagttcggccccgtggagaaggccgtggtggtggtggacgacagaggcagagccaccggcaagggcttcgtggagttcgccgccaagccccccgccagaaaggccctggagagatgcggcgacggcgccttcctgctgaccaccacccccagacccgtgatcgtggagcccatggagcagttcgacgacgaggacggcctgcccgagaagctgatgcagaagacccagcagtaccacaaggagagagagcagccccccagattcgcccagcccggcaccttcgagttcgagtacgccagcagatggaaggccctggacgagatggagaagcagcagagagagcaggtggacagaaacatcagagaggccaaggagaagctggaggccgagatggaggccgccagacacgagcaccagctgatgctgatgagacaggacctgatgagaagacaggaggagctgagaagactggaggagctgagaaaccaggagctgcagaagagaaagcagatccagctgagacacgaggaggagcacagaagaagagaggaggagatgatcagacacagagagcaggaggagctgagaagacagcaggagggcttcaagcccaactacatggagaacagagagcaggagatgagaatgggcgacatgggccccagaggcgccatcaacatgggcgacgccttcagccccgcccccgccggcaaccagggccccccccccatgatgggcatgaacatgaacaacagagccaccatccccggcccccccatgggccccggccccgccatgggccccgagggcgccgccaacatgggcacccccatgatgcccgacaacggcgccgtgcacaacgacagattcccccagggcccccccagccagatgggcagccccatgggcagcagaaccggcagcgagaccccccaggcccccatgagcggcgtgggccccgtgagcggcggccccggcggcttcggcagaggcagccagggcggcaacttcgagggccccaacaagagaagaagatactag

SEQ ID NO: 293082 - protein, 291 aa, Artificial Sequence
  derived and/or modified sequence
MVREQYTTATEGICIERPENQYVYKIGIYGWRKRCLYLFVLLLLIILVVNLALTIWILKVMWFSPAGMGHLCVTKDGLRLEGESEFLFPLYAKEIHSRVDSSLLLQSTQNVTVNARNSEGEVTGRLKVGPKMVEVQNQQFQINSNDGKPLFTVDEKEVVVGTDKLRVTGPEGALFEHSVETPLVRADPFQDLRLESPTRSLSMDAPRGVHIQAHAGKIEALSQMDILFHSSDGMLVLDAETVCLPKLVQGTWGPSGSSQSLYEICVCPDGKLYLSVAGVSTTCQEHNHICL

SEQ ID NO: 293083 - DNA, 1624 bp, Artificial Sequence
  derived and/or modified sequence
gttgctgaagcttcatcctttgctctcattctgtaagtcatagaaaagtttgaaacattctgtctgtggtagagctcgggccagctgtagttcattcgccagtgtgcttttcttaatatctaagatggtgcgtgagcagtacactacagccacagaaggcatctgcatagagaggccagagaatcagtatgtctacaaaattggcatttatggctggagaaagcgctgtctctacttgtttgttcttcttttactcatcatcctcgttgtgaatttagctcttacaatttggattcttaaagtgatgtggttttctccagcaggaatgggccacttgtgtgtaacaaaagatggactgcgcttggaaggggaatcagaatttttattcccattgtatgccaaagaaatacactccagagtggactcatctctgcttctacaatcaacccagaatgtgactgtaaatgcgcgcaactcagaaggggaggtcacaggcaggttaaaagtcggtcccaaaatggtagaagtccagaatcaacagtttcagatcaactccaacgacggcaagccactatttactgtagatgagaaggaagttgtggttggtacagataaacttcgagtaactgggcctgaaggggctctttttgaacattcagtggagacaccccttgtcagagccgacccgtttcaagaccttagattagaatcccccactcggagtctaagcatggatgccccaaggggtgtgcatattcaagctcacgctgggaaaattgaggcgctttctcaaatggatattctttttcatagtagtgatggaatgcttgtgcttgatgctgaaactgtgtgcttacccaagctggtgcaggggacgtggggtccctctggcagctcacagagcctctacgaaatctgtgtgtgtccagatgggaagctgtacctgtctgtggccggtgtgagcaccacgtgccaggagcacaaccacatctgcctctgagctgcctgcgtcctctcggtgagctgtgcagtgccggccccagatcctcacacccagggagcagctgcacatcgtgaaagactgaggcagcgtggatgggaagtaaacgcttccagaggaactcagaaaaaattatgtgccagtgaaagtgtttggacaaaaactacatgatctcaaaatgcacgtggatgtgagacacaaaagttgacaaaatggaaaagcaatgtgtttttccactggattaattttcaccggaacaattgcgaattctctctgcctcgcctccccctatcttgtccgtgtgggcacacactgagtgttgagttgccgtgtggagttaatgtatgacgctccactgtggatatctaatgccctgttgagagtagccttgctcagtactaaaatgccccaaagttctatacagcatttcctttatagcattcaaacctcacatcctcccttcagtttaatgcaagtaagtcaggtttcacaagaaaattttcaagttttgaagggaatttgaggttgatctggttttcaagatgtagttaaaggaataaatcactcaaaattaaactttctgtatatagtcaataagcaataaaaacctcatttttcagagtt

SEQ ID NO: 293084 - DNA, 1097 bp, Artificial Sequence
  derived and/or modified sequence
acattctgtctgtggtagagctcgggccagctgtagttcattcgccagtgtgcttttcttaatatctaagtcttattttcagaaactatgaataaatcttctacaccatcttcccgagagctttagtaagacctcagactggagtagagttgaaggagggaatgccagtctgaagaaggaaaggaagaggagagacagcaaggagaacttcagttgtcaagatggtgcgtgagcagtacactacagccacagaaggcatctgcatagagaggccagagaatcagtatgtctacaaaattggcatttatggctggagaaagcgctgtctctacttgtttgttcttcttttactcatcatcctcgttgtgaatttagctcttacaatttggattcttaaagtgatgtggttttctccagcaggaatgggccacttgtgtgtaacaaaagatggactgcgcttggaaggggaatcagaatttttattcccattgtatgccaaagaaatacactccagagtggactcatctctgcttctacaatcaacccagaatgtgactgtaaatgcgcgcaactcagaaggggaggtcacaggcaggttaaaagtcggtcccaaaatggtagaagtccagaatcaacagtttcagatcaactccaacgacggcaagccactatttactgtagatgagaaggaagttgtggttggtacagataaacttcgagtaactgggcctgaaggggctctttttgaacattcagtggagacaccccttgtcagagccgacccgtttcaagaccttagattagaatcccccactcggagtctaagcatggatgccccaaggggtgtgcatattcaagctcacgctgggaaaattgaggcgctttctcaaatggatattctttttcatagtagtgatggaatgcttgtgcttgatgctgaaactgtgtgcttacccaagctggtgcaggggacgtggggtccctctggcagctcacagagcctctacgaaatctgtgtgtgtccagatgggaagctgtacctgtctgtggccggtgtgagcaccacgtgccaggagcacaaccacatctgcctctga

SEQ ID NO: 293085 - DNA, 1898 bp, Artificial Sequence
  derived and/or modified sequence
gctgagaggaggcgagaggcgggggcgctagggccgagatcatgtctgactgggagaggtttccttggcagcagaggacgctaggtttgggatgaaagaagctgggcagatgcaaaatctggagagcgcgagggccgggcggtcagtcagcacccagactggcagcatgaccggtcagataccaaggctttctaaagtcaaccttttcactctgctcagcctctggatggagctctttccagcagaagcccagcggcaaaaatctcagaaaaatgaagagggaaagcatggacccttaggagataatgaagagaggaccagagtatctactgacaaaagacagctggagttaaccgaatttcatactggcctgctgatccagaaataagtttgcttacggaggcttctagttctgaagatgcaaagttagatgccaaagcagtggaaagattgaagtcaaacagtcgggcccatgtgtgtgtcttacttcaacctttggtgtgttatatggtgcagtttgtagaggagacctcttacaaatgtgactttattcaaaaaattacaaaaacattgccggatgctaacactgacttttattatgaatgtaaacaagaaagaataaaagaatatgaaatgttatttttggtttcaaatgaagaaatgcataagcaaatactgatgactataggtttggagaacctgtgtgaaaatccatactttagcaatctaaggcaaaacatgaaagaccttatcctacttttggccacagtagcttccagtgtgccgaactttaaacacttcggattttaccgtagcaatccagaacagattaatgaaattcacaatcaaagtttgccacaggaaattgcaaggcactgcatggttcaggccaggttattggcatatcgaactgaggatcataaaacaggagttggggcagtcatttgggcagaagggaaatctagaagttgtgatggaacaggtgccatgtactttgtaggatgtggttacaatgcttttcctgttggatctgagtatgctgacttcccacacatggatgacaagcagaaagacagagaaataaggaaattcagatacatcatacatgcggaacagaatgccttgacatttaggtgtcaagaaataaaaccagaagaaagaagcatgatttttgtgacaaagtgcccatgtgatgagtgtgtacctttaattaaaggtgcaggcataaaacaaatctatgcaggagatgtagatgttggaaaaaagaaggcagacatctcttacatgaggttcggggagcttgaaggtgttagcaaatttacgtggcagctgaatccatcaggagcttatggtcttgaacaaaatgagcctgaaaggagagaaaatggtgtgttgagacctgtcccacagaaggaagagcagcaccaggacaagaagctgcgcctcggaatccactaagaaggcctgtctacactgcaggggaacctcaagaacttttcattgcacttctaaaattcagccttgttcattcagaaaataaggatggattttgtgaataattgaaaagattttttaaggaagctaatttatttctaggatacaaatggtgttaataagaatatttgtcttttagatttatgtgtgggttttccataatgtagtagtgtgttattttattacacgaaatgagggagcaataacttcaaccaatgtaatcaccaacagggactgatttctatttatcttgactttatattagccaatttgaaagggtctgcttcacaagaggtcatgcctctgcagggaatcacacaccttttgagaaatattaattcttttgaattacaagagtgacagttagtaaactgctccagggaaataagtgtcatcttttaaga

SEQ ID NO: 293086 - DNA, 951 bp, Artificial Sequence
  derived and/or modified sequence
atggtgcagttcgtggaggagaccagctacaagtgcgacttcatccagaagatcaccaagaccctgcccgacgccaacaccgacttctactacgagtgcaagcaggagagaatcaaggagtacgagatgctgttcctggtgagcaacgaggagatgcacaagcagatcctgatgaccatcggcctggagaacctgtgcgagaacccctacttcagcaacctgagacagaacatgaaggacctgatcctgctgctggccaccgtggccagcagcgtgcccaacttcaagcacttcggcttctacagaagcaaccccgagcagatcaacgagatccacaaccagagcctgccccaggagatcgccagacactgcatggtgcaggccagactgctggcctacagaaccgaggaccacaagaccggcgtgggcgccgtgatctgggccgagggcaagagcagaagctgcgacggcaccggcgccatgtacttcgtgggctgcggctacaacgccttccccgtgggcagcgagtacgccgacttcccccacatggacgacaagcagaaggacagagagatcagaaagttcagatacatcatccacgccgagcagaacgccctgaccttcagatgccaggagatcaagcccgaggagagaagcatgatcttcgtgaccaagtgcccctgcgacgagtgcgtgcccctgatcaagggcgccggcatcaagcagatctacgccggcgacgtggacgtgggcaagaagaaggccgacatcagctacatgagattcggcgagctggagggcgtgagcaagttcacctggcagctgaaccccagcggcgcctacggcctggagcagaacgagcccgagagaagagagaacggcgtgctgagacccgtgccccagaaggaggagcagcaccaggacaagaagctgagactgggcatccactag

SEQ ID NO: 293087 - DNA, 951 bp, Artificial Sequence
  derived and/or modified sequence
atggtgcagtttgttgaggagacatcatataagtgtgactttatccagaaaatcactaaaacccttccagatgccaacactgacttctactacgagtgcaaacaggagaggatcaaggagtacgagatgttgttcttagtttctaacgaagagatgcataagcaaattcttatgaccattggcctggaaaatctctgcgaaaacccctattttagtaaccttcggcagaacatgaaggacttgatcctgctgttggccacagtggcctcctccgtcccgaatttcaagcactttggattttatagatccaacccagagcagattaacgagattcacaatcagtctctcccacaggaaattgcccggcactgcatggttcaggcgcggctgctggcttaccgtacggaagaccacaagacaggagtgggtgctgtcatttgggccgaggggaagtcacggtcctgcgacggaactggggctatgtactttgttggttgcgggtacaacgcctttcctgtgggcagcgaatacgccgacttccctcacatggacgacaagcagaaggaccgcgagatcaggaagttcaggtacatcatccacgcagaacagaatgccttgacgtttcgatgccaggagattaaacccgaggaacgctctatgatttttgttaccaaatgcccatgtgatgagtgtgtgccattgattaaaggggccggaattaagcagatctatgctggagacgtggatgtggggaaaaaaaaggccgatatctcatatatgagatttggggaactagagggggtcagcaaattcacatggcagctgaatccaagtggcgcttatggattggagcagaatgagcctgagagacgtgaaaacggcgtcctccggcccgttccacagaaagaggagcaacaccaggacaaaaagctcagactcggcattcattag

SEQ ID NO: 293088 - DNA, 951 bp, Artificial Sequence
  derived and/or modified sequence
atggtgcagtttgtggaggagaccagctacaagtgtgacttcatccagaagatcaccaagaccctgcctgatgccaacacagacttctactatgagtgcaagcaggagcgcatcaaggagtatgagatgctgttcctggtgtccaatgaggagatgcacaagcagatcctgatgaccatcggcctggagaacctgtgtgagaacccctacttcagcaacctgcggcagaacatgaaggacctgatcctgctgctggccaccgtggccagctctgtgcccaacttcaagcacttcggcttctaccgcagcaaccctgagcagatcaatgagatccacaaccagagcctgccccaggagatcgcccggcactgcatggtgcaggcccggctgctggcctacagaacagaggaccacaagacaggagtgggcgccgtcatctgggccgagggcaagagccgcagctgtgatggcaccggggccatgtactttgtgggctgcggctacaatgccttccctgtgggctctgaatatgctgacttcccccacatggatgacaagcagaaggaccgggagatcaggaagttccgctacatcatccatgctgagcagaatgccctgaccttccgctgccaggagatcaagccagaggagaggtccatgatctttgtgaccaagtgcccctgtgatgaatgtgtgcccctcatcaagggggccggcatcaagcagatctatgctggagatgtggatgtgggcaagaagaaggctgacatctcctacatgagatttggagagctggagggcgtgtccaagttcacctggcagctgaaccccagcggggcctacggcctggagcagaatgaacctgagcggcgggagaatggagtgctgcggcctgtgccccagaaggaggagcagcaccaggacaagaagctgcggctgggcatccactag

SEQ ID NO: 293089 - DNA, 951 bp, Artificial Sequence
  derived and/or modified sequence
atggtgcagttcgtggaggagaccagctacaagtgcgacttcatccagaagataactaagaccctcccggacgctaacaccgatttttactacgagtgtaagcaggagcggattaaggagtacgagatgctgttccttgtgtccaatgaggaaatgcacaagcagatccttatgactattggcctcgagaatctatgcgagaatccttacttctccaacctcaggcaaaacatgaaagacctgattctccttttagctaccgtcgcaagttcggtgccgaatttcaaacactttgggttctaccgctcaaacccggagcagataaacgagattcacaatcagagtctacctcaggagatcgcaagacactgtatggtacaagctcgtctgttggcatatcgaaccgaagaccataaaaccggtgtgggtgccgtgatctgggccgaaggcaaatctagatcgtgtgacggtactggagctatgtactttgtcggctgtggctacaacgcatttcccgttggatccgagtacgctgatttcccgcacatggacgataaacagaaagatagagagatcaggaaatttagatacatcatccatgctgaacaaaacgcccttacatttaggtgtcaggagatcaaacccgaggaaagatcgatgatctttgtcactaagtgtccttgcgacgagtgtgtgcccctcataaagggagccgggattaaacagatttacgccggggatgtggacgtgggaaagaagaaagctgatatctcttacatgcgtttcggagagcttgaaggcgtgtcgaaattcacgtggcaactgaacccaagtggagcttacgggctcgagcagaacgaaccggaacgtcgggaaaacggcgtgctacgccctgtgccgcagaaggaagagcaacatcaagacaagaagttaaggctgggtatccactag

SEQ ID NO: 293090 - DNA, 951 bp, Artificial Sequence
  derived and/or modified sequence
atggtgcaattcgtggaagagacttcatacaagtgcgacttcattcagaagattaccaaaacactgccagatgctaacacggacttttactacgagtgcaagcaggaaaggatcaaggaatatgagatgcttttcctggtctcaaacgaagagatgcacaagcaaatactgatgacgatcggcctggaaaacctatgtgaaaacccatacttcagcaacttgcgacagaacatgaaagatctgatcttactgctggccaccgttgcaagctcggttcctaatttcaaacactttggcttctacagaagcaatcctgaacagataaacgaaattcacaatcaaagcttaccccaggagattgccagacactgtatggtacaggcacggctgcttgcataccgtacggaggatcacaaaacaggggtgggcgcagtcatttgggcagagggaaagtctcgatcctgcgatggtacaggtgccatgtatttcgttggctgtggttacaatgcatttcctgtgggaagcgagtatgccgatttcccccacatggacgacaagcagaaggatcgggaaattcgtaagttcaggtacatcattcacgcggaacaaaatgctcttaccttccgatgccaggagatcaagcccgaagaaagatcaatgatctttgtaaccaagtgcccatgcgacgagtgtgtgcctctcatcaagggtgcagggataaaacagatatacgccggagatgttgatgtggggaagaagaaagccgacattagttacatgaggttcggagagttggagggcgtgtctaaatttacatggcaactgaaccctagtggtgcctatggcctcgagcagaatgagcctgagcggagggagaacggtgtgttacggccagtgcctcaaaaggaggagcagcaccaggacaagaagctgcgactcggcatacactag

SEQ ID NO: 293091 - protein, 740 aa, Artificial Sequence
  derived and/or modified sequence
MSFGRDMELEHFDERDKAQRYSRGSRVNGLPSPTHSAHCSFYRTRTLQTLSSEKKAKKVRFYRNGDRYFKGIVYAISPDRFRSFEALLADLTRTLSDNVNLPQGVRTIYTIDGLKKISSLDQLVEGESYVCGSIEPFKKLEYTKNVNPNWSVNVKTTSASRAVSSLATAKGSPSEVRENKDFIRPKLVTIIRSGVKPRKAVRILLNKKTAHSFEQVLTDITDAIKLDSGVVKRLYTLDGKQVMCLQDFFGDDDIFIACGPEKFRYQDDFLLDESECRVVKSTSYTKIASSSRRSTTKSPGPSRRSKSPASTSSVNGTPGSQLSTPRSGKSPSPSPTSPGSLRKQRSSQHGGSSTSLASTKVCSSMDENDGPGEEVSEEGFQIPATITERYKVGRTIGDGNFAVVKECVERSTAREYALKIIKKSKCRGKEHMIQNEVSILRRVKHPNIVLLIEEMDVPTELYLVMELVKGGDLFDAITSTNKYTERDASGMLYNLASAIKYLHSLNIVHRDIKPENLLVYEHQDGSKSLKLGDFGLATIVDGPLYTVCGTPTYVAPEIIAETGYGLKVDIWAAGVITYILLCGFPPFRGSGDDQEVLFDQILMGQVDFPSPYWDNVSDSAKELITMMLLVDVDQRFSAVQVLEHPWVNDDGLPENEHQLSVAGKIKKHFNTGPKPNSTAAGVSVIATTALDKERQVFRRRRNQDVRSRYKAQPAPPELNSESEDYSPSSSETVRSPNSPF

SEQ ID NO: 293092 - protein, 363 aa, Artificial Sequence
  derived and/or modified sequence
MSFGRDMELEHFDERDKAQRYSRGSRVNGLPSPTHSAHCSFYRTRTLQTLSSEKKAKKVRFYRNGDRYFKGIVYAISPDRFRSFEALLADLTRTLSDNVNLPQGVRTIYTIDGLKKISSLDQLVEGESYVCGSIEPFKKLEYTKNVNPNWSVNVKTTSASRAVSSLATAKGSPSEVRENKDFIRPKLVTIIRSGVKPRKAVRILLNKKTAHSFEQVLTDITDAIKLDSGVVKRLYTLDGKQVMCLQDFFGDDDIFIACGPEKFRYQDDFLLDESECRVVKSTSYTKIASSSRRSTTKSPGPSRRSKSPASTSSVNGTPGSQLSTPRSGKSPSPSPTSPGSLRKQRDLYRPLSSDDLDSVGDSV

SEQ ID NO: 293093 - protein, 619 aa, Artificial Sequence
  derived and/or modified sequence
MSFGRDMELEHFDERDKAQRYSRGSRVNGLPSPTHSAHCSFYRTRTLQTLSSEKKAKKVRFYRNGDRYFKGIVYAISPDRFRSFEALLADLTRTLSDNVNLPQGVRTIYTIDGLKKISSLDQLVEGESYVCGSIEPFKKLEYTKNVNPNWSVNVKTTSASRAVSSLATAKGSPSEVRENKDFIRPKLVTIIRSGVKPRKAVRILLNKKTAHSFEQVLTDITDAIKLDSGVVKRLYTLDGKQVMCLQDFFGDDDIFIACGPEKFRYQDDFLLDESECRVVKSTSYTKIASSSRRSTTKSPGPSRRSKSPASTSSVNGTPGSQLSTPRSGKSPSPSPTSPGSLRKQRSSQHGGSSTSLASTKVCSSMDENDGPGEEVSEEGFQIPATITERYKVGRTIGDGNFAVVKECVERSTAREYALKIIKKSKCRGKEHMIQNEVSILRRVKHPNIVLLIEEMDVPTELYLVMELVKGGDLFDAITSTNKYLHSLNIVHRDIKPENLLVYEHQDGSKSLKLGDFGLATIVDGPLYTVCGTPTYVAPEIIAETGYGLKVDIWAAGVITYILLCGFPPFRGSGDDQEVLFDQILMGQVDFPSPYWDNVSDSAKELITMMASQKMNISCQ

SEQ ID NO: 293094 - DNA, 2223 bp, Artificial Sequence
  derived and/or modified sequence
atgtcctttggtagagacatggagctcgaacatttcgatgaacgggataaggcccagagatacagccgggggagccgagtgaatggtctcccctctcctacccactcagctcactgttccttctaccgcaccaggactcttcagaccctgagcagcgaaaagaaggcgaaaaaagtgaggttctataggaatggagatcgctatttcaaagggatagtatacgccataagtcctgacaggttccgctccttcgaggcattgctggccgacttgaccagaactctgtctgacaatgtaaatttgccgcagggtgtacgcaccatctacaccatcgatggcttgaagaaaatctctagtcttgatcaactggttgagggcgagtcctatgtgtgtggctcaatcgagccatttaagaaattggagtacacgaaaaacgtgaaccccaattggtccgttaatgtcaagacaacctcagcgagcagggccgttagctccctagccacagccaaaggaagccccagtgaggtgcgcgagaataaggactttatcaggcctaaattggtgactatcatcaggagcggcgtgaaacctcgcaaggccgttagaattctcctgaacaaaaaaactgcacattcctttgaacaagttctgaccgatatcacggacgcaataaaactggactccggagtcgtgaaacgactgtatacactagacggcaagcaggtgatgtgcctgcaggatttcttcggggatgatgatattttcatcgcatgcggccccgaaaaattccggtaccaagatgattttctactggacgagagcgagtgcagggttgttaagtcaaccagctatacaaaaatcgccagctcctctagacgatcaaccactaaatcccctggccctagccggcgctccaagtcaccggccagtacatcaagtgtgaacggcactcccggatcccagctttcaacaccacgttctgggaagtctccctccccaagcccaacaagtccggggtccctgcgcaagcagcgttcttctcagcacgggggctcctctaccagcctggcaagcaccaaggtctgctcctcaatggatgaaaacgatggcccgggggaggaggtaagcgaggagggctttcagattccagctacaattacagaaaggtacaaagtcggacggacaatcggagatgggaattttgcagtggtgaaagagtgtgtcgaacgcagtacagctagggaatacgcactgaagattattaagaagtctaaatgccgaggcaaagagcatatgatccagaacgaggtcagcatcctgagacgggttaagcatcccaatattgttttgctgattgaggaaatggatgtgcctaccgagttatatcttgttatggagcttgtgaaaggcggggacctattcgatgcaatcaccagcaccaataaatacaccgaacgagacgcctccggaatgctgtacaacctagcgtccgcaataaaatacctccacagcttgaatattgtgcatcgcgatataaagccggaaaatctgctggtttatgagcaccaggacgggtcgaaatcactgaagcttggagacttcggcctggctacgattgtggatgggcctctgtacaccgtgtgcggcaccccaacatacgtggcccctgaaatcatcgccgagacaggctacggcctgaaggtggacatatgggctgccggcgtgatcacctacattctattatgcggatttccgccctttaggggcagcggcgatgaccaggaagtgttatttgaccagatactaatggggcaggtagattttccctcaccatattgggataacgtctcggactcagctaaggagcttataaccatgatgctcctggtggacgttgaccagcggttctccgccgtccaggtccttgaacatccttgggtcaatgatgatggcctgcccgaaaacgaacaccaattgtccgtggctggtaaaatcaaaaaacactttaacacaggccctaagcccaactctaccgcagcgggggtttccgtcatcgctacgacagccctggacaaagagagacaggtgtttcgcagacggagaaatcaggacgtgcggagtagatataaagcacaaccagcccccccagagctgaacagtgagtcagaggactactccccttcttccagcgaaaccgtccgaagccctaactcccccttttag

SEQ ID NO: 293095 - DNA, 2223 bp, Artificial Sequence
  derived and/or modified sequence
atgagctttggccgggacatggagctggagcactttgatgagcgggacaaggcccagcgctacagccggggcagccgggtgaatggcctgcccagccccacccacagcgcccactgcagcttctaccgcaccaggaccctgcagaccctgagcagcgagaagaaggccaagaaggtgcgcttctacagaaatggagaccgctacttcaagggcatcgtgtatgccatcagcccagaccgcttccgcagctttgaggccctgctggccgacctgaccaggaccctgagtgacaacgtgaacctgccccagggcgtgaggaccatctacaccattgatggcctgaagaagatcagcagcctggaccagctggtggagggggagagctatgtgtgtggcagcattgagcccttcaagaagctggagtacaccaagaatgtgaaccccaactggagcgtgaatgtgaagaccaccagcgccagcagagctgtgagcagcctggccacagccaagggcagccccagcgaggtgcgggagaacaaggacttcatccggcccaagctggtgaccatcatccgctctggagtgaagcccaggaaggctgtgcgcatcctgctgaacaagaagacagcccacagctttgagcaggtgctgacagacatcacagatgccatcaagctggacagcggcgtggtgaagaggctgtacaccctggatggcaagcaggtgatgtgcctgcaggacttctttggagatgatgacatcttcatcgcctgtggccctgagaagttccgctaccaggatgacttcctgctggatgaaagtgaatgtcgggtggtgaagagcaccagctacaccaagatcgccagcagcagccgccgcagcaccaccaagagccctggccccagcagaagaagcaagagccctgccagcaccagctctgtgaatggcaccccaggcagccagctgagcacccccaggtctgggaagagccccagccccagccccaccagccctggcagcctgaggaagcagaggagcagccagcacggcggcagcagcaccagcctggccagcaccaaggtgtgcagctccatggatgaaaatgatggccctggagaggaggtgtctgaggagggcttccagatcccagccaccatcacagagcgctacaaggtgggccgcaccatcggagatggcaactttgctgtggtgaaggaatgtgtggagaggagcacagcccgggagtatgccctgaagatcatcaagaagagcaaatgtcggggcaaggagcacatgatccagaatgaggtgtccatcctgcggcgggtgaagcaccccaacatcgtgctgctgattgaggagatggatgtgcccacagagctgtacctggtgatggagctggtgaagggcggggacctgtttgatgccatcaccagcaccaacaagtacacagaaagagatgccagcggcatgctgtacaacctggccagcgccatcaagtacctgcacagcctgaacatcgtgcaccgggacatcaagccagagaacctgctggtgtatgagcaccaggacggcagcaagagcctgaagctgggggactttggcctggccaccatcgtggatggccccctgtacacagtgtgtggcacccccacctacgtggcccctgagatcatcgccgagaccggctacggcctgaaggtggacatctgggccgccggggtcatcacctacatcctgctgtgtggcttcccccccttccggggcagcggagatgaccaggaggtgctgtttgaccagatcctgatgggccaggtggacttccccagcccctactgggacaacgtgtctgattctgccaaggagctgatcaccatgatgctgctggtggatgtggaccagcgcttctctgctgtgcaggtgctggagcacccctgggtgaatgatgatggcctgcctgaaaatgagcaccagctgtctgtggccggcaagatcaagaagcacttcaacacaggccccaagcccaacagcacagctgctggggtgtctgtgattgccaccacagccctggacaaggagcggcaggtgttcagaagaagaagaaaccaggatgtgcgcagccgctacaaggcccagcctgcccctcctgagctgaacagcgagagcgaggactacagccccagcagcagcgagaccgtgcgcagccccaacagccccttctag

SEQ ID NO: 293096 - DNA, 2223 bp, Artificial Sequence
  derived and/or modified sequence
atgagcttcggccgggacatggagctggagcacttcgacgagcgggacaaagcccaaaggtattccagaggcagcagggttaacggcctaccctcccccactcactcggcccactgttcgttctaccgaactcggacattacagacgctctccagtgaaaagaaggccaaaaaagtgcgtttctatagaaatggcgataggtactttaaaggcattgtgtatgcgatctcccctgacagatttcgttcctttgaagccttgttagccgatttaacacgcacgctgagcgataacgtgaacttacctcaaggcgtaaggactatctacaccatcgacgggctgaaaaagatcagctccctcgaccaattggtcgagggagagagctacgtgtgcggaagtatcgagcctttcaaaaagctggagtatactaagaacgtgaatcccaattggagcgtgaacgtaaagacgacctccgcatctagagcggtatcttctcttgcaaccgctaaaggatctccctccgaggtgcgagaaaacaaagactttataaggcccaaattggtgacaatcatccggtccggggttaaacccagaaaggccgtgagaatcctactgaataagaagactgcccactcattcgagcaggttttgactgatataactgacgcaataaaattggattctggagtggtcaagcgcttatatacgctggatggaaagcaggtcatgtgccttcaggatttttttggtgatgacgacattttcattgcttgtggcccagaaaagtttaggtaccaagacgactttctgttggatgaatcagaatgcagagtggttaagagcacctcatataccaagattgcaagttctagtcgtcgctctacaaccaaaagtccaggaccttccagaaggagcaaatcccccgctagcacatccagcgtgaacggcacacccggcagccagctttcgacgcccagaagtggcaaatccccaagcccctcgccaacaagccccgggagcctcaggaaacagcgatcttcccagcatggcggctccagcaccagtcttgcctcgacaaaagtgtgttccagcatggacgagaacgacgggcctggcgaggaggtttcagaagagggttttcagatcccggctacgataaccgaacgctacaaagtagggaggactattggcgatggcaattttgctgtggtgaaagaatgtgttgagagatctactgctcgagagtacgcacttaaaatcattaaaaaaagtaagtgcagagggaaggaacacatgatacaaaatgaagtcagcattcttagaagggtaaaacaccccaatatagttctgctgatcgaggaaatggacgtgcccactgagctgtacctcgtgatggaattagtcaagggcggggatctgtttgacgctatcaccagcaccaacaaatacactgagagagatgcctctggtatgctctataatctggcctccgctatcaaatatttgcacagccttaacatagtgcaccgggacattaaacctgaaaatctgcttgtttatgaacatcaggatgggagtaagagcctaaaactaggcgactttgggctggcgaccatagttgatggcccattatacacagtctgcgggacccccacatacgtcgcgccagagattatagcagaaactggctatggactgaaggtggacatctgggccgccggcgtcatcacttatatcctcctgtgtggctttccacctttccgcgggtctggcgatgatcaggaagtcctgtttgatcagatcctcatggggcaggtagatttccccagcccctattgggacaacgtgagcgatagcgctaaagagctcattaccatgatgcttctggtagatgtggatcaaaggttcagtgctgtccaggtactcgagcacccctgggtcaacgacgatgggctgcctgagaatgagcatcaactatccgtcgccggcaaaatcaagaagcatttcaacacaggacccaagcccaattcaactgctgctggagtatcggtgatagcaaccacggcgctggataaagagaggcaggtgtttcgtcgaagaagaaaccaggacgtgagaagtagatacaaggcgcagcctgcgcccccagagttaaattccgaatccgaagattatagcccctcttcaagcgagaccgtgcgcagcccaaactcacccttctag

SEQ ID NO: 293097 - DNA, 2223 bp, Artificial Sequence
  derived and/or modified sequence
atgtcatttggccgagacatggagttagagcacttcgacgagcgggacaaagcccaacggtattcacgcggaagccgggtgaacggcctgcccagcccgacgcactcagcgcactgctctttttatagaacacgcacattgcagactctctcatctgaaaagaaagcgaagaaggttaggttctatagaaacggcgatagatattttaagggaatcgtgtatgccatcagtcccgaccgttttcgaagttttgaagcccttctggctgacctgacacggacccttagcgacaacgttaatcttccgcagggcgtgaggacaatttacacaatcgatggccttaagaagattagcagcctagaccagctggtggagggcgaaagttacgtgtgtggctccattgaacctttcaagaagctggagtacaccaagaatgtaaacccgaattggtcggtcaacgtgaaaactaccagcgccagccgtgccgtctcctcgcttgccaccgctaaggggagccctagcgaggtaagagagaacaaggacttcattagacccaagctagtgacaatcatacgtagtggggtgaagccccgaaaggcggtcagaatactgctcaataaaaaaactgcacacagtttcgaacaggtcctgaccgatatcacagatgcgatcaagctcgacagcggagtggtcaagagactgtacacgctagacggaaagcaagtgatgtgtctccaagacttctttggggatgatgacatcttcatcgcttgtgggcctgaaaagttccggtaccaggatgactttttgctggatgaatctgaatgccgagtggtcaaaagcacttcttataccaagatcgcctcttcctctcgtaggtccacaaccaagagtcccggtccaagcagaaggtcgaaaagtcccgcaagcacctcttccgttaatggaacaccgggatcacaactgtcaactcctagaagcggcaagtcacccagcccctctccgacctcacccggtagtctgagaaagcaacggagctcccaacatggcggttcatctacatctctggccagcactaaggtgtgtagtagtatggacgagaacgatggccctggtgaggaggtatccgaagaaggcttccagatccctgctacgatcacagaacggtataaagttgggagaactattggcgatgggaacttcgccgttgttaaagaatgcgttgaacgttcaaccgcgagagagtacgccctgaagattatcaagaagtcaaaatgtcggggtaaagagcatatgatacagaatgaggtgagtatcctgagaagggtcaaacatcccaatattgtcctgctgatcgaagagatggatgtcccaacggaactgtacctggtcatggagctggttaaagggggtgacctctttgatgccatcacctctacaaataagtacacggagcgggacgcctcgggaatgctctacaatctggcatctgcaataaagtatctgcatagtctcaatatcgtgcaccgcgatataaagcccgaaaacttgctggtttatgagcaccaagacggttccaaaagcctgaaacttggtgatttcggcctggccactattgtcgacggccctctatacacagtttgcggtacccccacctacgtggcaccagagatcatcgccgagaccgggtacggcctgaaggttgacatttgggccgctggggtcattacgtacattcttctgtgcggtttcccgccttttcgcggtagcggcgatgaccaagaagtgctgtttgatcagattctcatggggcaggtggattttccaagtccgtattgggacaacgtctcggattccgctaaagagctaatcaccatgatgctgttggtggacgttgaccaacgtttcagcgctgttcaggtccttgagcatccctgggtcaacgatgacgggctccctgagaacgaacaccagctgagcgtcgccggaaagatcaagaaacatttcaatactggccctaaaccaaatagcacagctgccggtgtgtctgtgatcgctacgactgcactcgataaagagaggcaggtgtttcgcaggcggagaaaccaggacgttagaagtcgatataaagctcagccggcaccacctgaactcaattctgagtccgaagactattcaccatcttcctcagagacagtccgatctcctaactcccccttctag

SEQ ID NO: 293098 - DNA, 2223 bp, Artificial Sequence
  derived and/or modified sequence
atgagcttcggcagagacatggagctggagcacttcgacgagagagacaaggcccagagatacagcagaggcagcagagtgaacggcctgcccagccccacccacagcgcccactgcagcttctacagaaccagaaccctgcagaccctgagcagcgagaagaaggccaagaaggtgagattctacagaaacggcgacagatacttcaagggcatcgtgtacgccatcagccccgacagattcagaagcttcgaggccctgctggccgacctgaccagaaccctgagcgacaacgtgaacctgccccagggcgtgagaaccatctacaccatcgacggcctgaagaagatcagcagcctggaccagctggtggagggcgagagctacgtgtgcggcagcatcgagcccttcaagaagctggagtacaccaagaacgtgaaccccaactggagcgtgaacgtgaagaccaccagcgccagcagagccgtgagcagcctggccaccgccaagggcagccccagcgaggtgagagagaacaaggacttcatcagacccaagctggtgaccatcatcagaagcggcgtgaagcccagaaaggccgtgagaatcctgctgaacaagaagaccgcccacagcttcgagcaggtgctgaccgacatcaccgacgccatcaagctggacagcggcgtggtgaagagactgtacaccctggacggcaagcaggtgatgtgcctgcaggacttcttcggcgacgacgacatcttcatcgcctgcggccccgagaagttcagataccaggacgacttcctgctggacgagagcgagtgcagagtggtgaagagcaccagctacaccaagatcgccagcagcagcagaagaagcaccaccaagagccccggccccagcagaagaagcaagagccccgccagcaccagcagcgtgaacggcacccccggcagccagctgagcacccccagaagcggcaagagccccagccccagccccaccagccccggcagcctgagaaagcagagaagcagccagcacggcggcagcagcaccagcctggccagcaccaaggtgtgcagcagcatggacgagaacgacggccccggcgaggaggtgagcgaggagggcttccagatccccgccaccatcaccgagagatacaaggtgggcagaaccatcggcgacggcaacttcgccgtggtgaaggagtgcgtggagagaagcaccgccagagagtacgccctgaagatcatcaagaagagcaagtgcagaggcaaggagcacatgatccagaacgaggtgagcatcctgagaagagtgaagcaccccaacatcgtgctgctgatcgaggagatggacgtgcccaccgagctgtacctggtgatggagctggtgaagggcggcgacctgttcgacgccatcaccagcaccaacaagtacaccgagagagacgccagcggcatgctgtacaacctggccagcgccatcaagtacctgcacagcctgaacatcgtgcacagagacatcaagcccgagaacctgctggtgtacgagcaccaggacggcagcaagagcctgaagctgggcgacttcggcctggccaccatcgtggacggccccctgtacaccgtgtgcggcacccccacctacgtggcccccgagatcatcgccgagaccggctacggcctgaaggtggacatctgggccgccggcgtgatcacctacatcctgctgtgcggcttcccccccttcagaggcagcggcgacgaccaggaggtgctgttcgaccagatcctgatgggccaggtggacttccccagcccctactgggacaacgtgagcgacagcgccaaggagctgatcaccatgatgctgctggtggacgtggaccagagattcagcgccgtgcaggtgctggagcacccctgggtgaacgacgacggcctgcccgagaacgagcaccagctgagcgtggccggcaagatcaagaagcacttcaacaccggccccaagcccaacagcaccgccgccggcgtgagcgtgatcgccaccaccgccctggacaaggagagacaggtgttcagaagaagaagaaaccaggacgtgagaagcagatacaaggcccagcccgccccccccgagctgaacagcgagagcgaggactacagccccagcagcagcgagaccgtgagaagccccaacagccccttctag

SEQ ID NO: 293099 - DNA, 5629 bp, Artificial Sequence
  derived and/or modified sequence
gcacatccctgcactagtggccgcaaccgaggcgccgcgctccagcagctgctgccgcccagcccggccccgccgccgccccccagccctgcagccccgcagccccggccgcgcccagcccggcgaggacagcaccaggaggcggcccccagcgcggccacaaagacccccggcggcgtctctccgcggaccggtcctacttgaagtccatcatgtccttcggcagagacatggagctggagcacttcgacgagcgggataaggcgcagagatacagccgagggtcgcgggtgaacggcctgccgagcccgacgcacagcgcccactgcagcttctaccgcacccgcacgctgcagacgctcagctccgagaagaaggccaagaaagttcgtttctatcgaaacggagatcgatacttcaaagggattgtgtatgccatctccccagaccggttccgatcttttgaggccctgctggctgatttgacccgaactctgtcggataacgtgaatttgccccagggagtgagaacaatctacaccattgatgggctcaagaagatttccagcctggaccaactggtggaaggagagagttatgtatgtggctccatagagcccttcaagaaactggagtacaccaagaatgtgaaccccaactggtcggtgaacgtcaagaccacctcggcttctcgggcagtgtcttcactggccactgccaaaggaagcccttcagaggtgcgagagaataaggatttcattcggcccaagctggtcaccatcatcagaagtggcgtgaagccacggaaagctgtcaggattctgctgaacaagaaaacggctcattcctttgagcaggtcctcaccgatatcaccgatgccatcaagctggactcgggagtggtgaaacgcctgtacacgttggatgggaaacaggtgatgtgccttcaggacttttttggtgatgatgacatttttattgcatgtggaccggagaagttccgttaccaggatgatttcttgctagatgaaagtgaatgtcgagtggtaaagtccacttcttacaccaaaatagcttcatcatcccgcaggagcaccaccaagagcccaggaccgtccaggcgtagcaagtcccctgcctccaccagctcagttaatggaacccctggtagtcagctctctactccgcgctcaggcaagtcgccaagcccatcacccaccagcccaggaagcctgcggaagcagaggagctctcagcatggcggctcctctacgtcacttgcgtccaccaaagtctgcagctcgatggatgagaacgatggccctggagaagaagtgtcggaggaaggcttccagattccagctacaataacagaacgatataaagtcggaagaacaataggagatggaaattttgctgttgtcaaggaatgtgtagaaagatcgactgctagagagtatgctctgaaaattatcaagaaaagcaaatgtcgaggcaaagagcacatgatccagaatgaagtgtctattttaagaagagtgaagcatcccaatatcgttcttctgattgaggagatggatgtgccaactgaactgtatcttgtcatggaattagtaaaggggggagacctttttgatgccattacttccactaacaaatacaccgagagagacgccagtgggatgctgtacaacctagccagcgccatcaaatacctgcatagcctgaacatcgtccaccgtgatatcaagccagagaacctgctggtgtatgagcaccaagatggcagcaaatcactgaagctgggtgactttggactggccaccattgtagacggccccctgtacacagtctgtggcaccccaacatacgtggctccagaaatcattgcagagactggatacggcctcaaggtggacatctgggcagcaggtgtaatcacttatatcctgctgtgtggtttccctccattccgtggaagtggtgatgaccaggaggtgctttttgatcagattttgatggggcaggtggactttccttctccatactgggataatgtttccgattctgcaaaggagctcattaccatgatgctgttggtcgatgtagatcagcgattttctgctgttcaagtacttgagcatccctgggttaatgatgatggcctcccagaaaatgaacatcagctgtcagtagctggaaagataaagaagcatttcaacacaggccccaagccgaatagcacagcagctggagtttctgtcatagcaaccaccgctcttgataaggagaggcaggttttccgacgaagacgcaaccaggatgtgaggagccggtacaaggcgcagccagctcctcccgaactcaactcggaatcggaagactactccccaagctcctccgagactgttcgctcccctaactcgcccttttaataagacccttttactcaaagtcctagcttaaccctttgagactctgagatttttttcccccaaatttgtgtaaaacagtttcatctgatctatctagcgctcaatgcttgaatggcagaactgaaagtgttttcaggtatctttgtagcggtttccctttactgaataagatgacacgtggtgattgtgaagatggtaatttgctgctaatagagtcctcaaagggttaaggccaatttgcaatttttttttaaacttagaagcaatgaatgttttcatcagtcaagctaggatctgcagtatgtaatatagcacttgttaaccctctgagtgcatagaattttattgagaattcttgtttgggaatttttcaggcctttggatgtatacacacatgtttcttgattttactgcagatcaaggggtgttgttagatgctgaaatgtccagaaaagaaggacatttagaatgatatcttgtttgtccttttctgtgggtttagaacgtggcaggtttataacttcgacacacgcacggttctttcttcttcacaatcctattcagaaacagattttttttttcattagagatatgactgtcagttgcagtgagttctgcatcccaagtggagggaattgggtttgtggcaaagagcttgacccaggaaatagatggtgccccccaaattgtctccacatgaagatgtactgatgacgccccagaaatgctgcttccatatcagctgctgctagcgccagcgcagactctcagggagtcaccacagcttgtcttgtgcttggtgagtgagggtctctctactcagtgtcagacatctacaggaaagaaacaactggtggaaaagagcaataaattgcccggtgctctgcagggctggaatttcaaacagaaagagggaataagatcctgtgatttttctcacctgcttttccacgcactgtggtcatcactgtgcaatctacatctagtatgaaatccacacataggagagctggggcacaaggggactggaggcagttgctttgcaagatggctgaggagaaagcacactgggaacacaatccagaatgttctaacaataagttttcagtgaataaaccactggcaagacaattccatgtgcacctttaggttacctatatagtctcctaggaagatcaggatgaaagacctagatgatacccctgaggataaaacctccatcccctaaaatgattttttttaaataccactgtctttagctgtccaggaggtcagagtgttttttctgtctttgggccaagtcctgtctgagacctgtattttcactcttgttaccaaatctatctccctagtgcagtgtctccaggcctgagtttcttctggaacagattccattttagaatggggattcacaggttctgtgcatcaccacagtgctcagagaggattctcctggggtgtcttagaggcaggtgcccaactcaaatgtattcccaaggtttgctgggctctgggatccacgagacaaccagagagggatatctcatgaaatttgcatctggtggctgaacagtacctatgttctctgttttgaatatactttaatacctgagagtcttaaaatttgtgaacaacgtttctatagtcctttattttcaaatgcacattgatcttcacttgctgcatttttactcttcaaccctgaaactatggtctacattaatatggatttttaaatcacatgtcattacttttgcaacaccatcaccaaaattttttgctcttttacatttaggttcatctctgtggtctgtgttgtcctgacatgtaaaaagcatatcgtttattgaggtttttttcccccccttttagagcatccggaagtgataacacgcaaaatcacaaagtagcataaatcagtaaattagttgagttgtttttgggggggaggtgggggtagggggcacagaacaccagaaagagtgttggtgtgtaggtagattccatattaatgaggaacactgaactagttggaaattactgctttctctagaaatataaagcaaagcactattccaaggctatggagtagctctacagcctggcctcaactctaaaagtgtgaagaatgcaatgggcagagacctacctgcagtggactgtcattttcctttctttctctgaattactgctttttctgtgggcattaactatattgctacagcatctagtgtactgagcctgcggtgcatggctcaggccttttcccatcgacgtctagggggactctggaccgtgtgaagctagggggtgtttctcagcacactgcagaagggcagctcagaagaatgcagggcccattcagcatggggatcccagcacatcactgtagaatttgagtgatctatgctgaataaacagtggaatgtgaccagtcaagtagaaatcttgagtaatcagatggaatgcaatctttctaacattaagctaccaagatcctgaatgtcagagatgtactcagagggttaacagacaagcacaaggcatgctgactacattggtgtatccagattgctttgcttttagccagtgctttctaatttttttctcgacattcttgggatagttcaagtttgaaataattaagtggtggtgttctttaaggaatttctataaccaaattgatcttatttttgatttcacttatcatagaacaaatatgtatcattatggcagtgtatctatgtaattatcaatttaatcatcaccaccggtgtttccatattttttcccaagtatttaatatagctctcttatggtggtggcctggtgatggggaccgtctttcttttactgacacatgaccaatcatatggtattttcaagggaattttaagattcatcttttcagtttgatagtagactagttaaggaagaactctttcattacttgcatcgtgtaaatcatctctgtagacatgtgttcatattaatgaacacattttttctcaacattgtagcagaaatcattttattcgtcatgatcaatgaatatgtgatttgctccagatcgttagaaggaaaagtaagatttcagtcatcaaaaatgtttttaccgtagccctcatctaacttacacgtggtgcatattaaaataagcagagaaaaaaaaatgtgaataaactactgaaaac

SEQ ID NO: 293100 - protein, 242 aa, Artificial Sequence
  derived and/or modified sequence
MTDHSIKECQKSLDFVLGWFAKPVFIDGDYPESMKNNLSSILPDFTESEKKFIKGTADFFALCFGPTLSFQLLDPHMKFRQLESPNLRQLLSWIDLEFNHPQIFIVENGWFVSGTTKRDDAKYMYYLKKFIMETLKAIKLDGVDVIGYTAWSLMDGFEWHRGYSIRRGLFYVDFLSQDKMLLPKSSALFYQKLIEKNGFPPLPENQPLEGTFPCDFAWGVVDNYIQVSQLTKPISSLTKPYH

SEQ ID NO: 293101 - DNA, 726 bp, Artificial Sequence
  derived and/or modified sequence
atgaccgaccacagcatcaaggagtgccagaagagcctggacttcgtgctgggctggttcgccaagcccgtgttcatcgacggcgactaccccgagagcatgaagaacaacctgagcagcatcctgcccgacttcaccgagagcgagaagaagttcatcaagggcaccgccgacttcttcgccctgtgcttcggccccaccctgagcttccagctgctggacccccacatgaagttccgccagctggagagccccaacctgcgccagctgctgagctggatcgacctggagttcaaccacccccagatcttcatcgtggagaacggctggttcgtgagcggcaccaccaagcgcgacgacgccaagtacatgtactacctgaagaagttcatcatggagaccctgaaggccatcaagctggacggcgtggacgtgatcggctacaccgcctggagcctgatggacggcttcgagtggcaccgcggctacagcatccgccgcggcctgttctacgtggacttcctgagccaggacaagatgctgctgcccaagagcagcgccctgttctaccagaagctgatcgagaagaacggcttcccccccctgcccgagaaccagcccctggagggcaccttcccctgcgacttcgcctggggcgtggtggacaactacatccaggtgagccagctgaccaagcccatcagcagcctgaccaagccctaccac

SEQ ID NO: 293102 - DNA, 729 bp, Artificial Sequence
  derived and/or modified sequence
atgaccgaccacagcatcaaggagtgccagaagagcctggacttcgtgctgggctggttcgccaagcccgtgttcatcgacggcgactaccccgagagcatgaagaacaacctgagcagcatcctgcccgacttcaccgagagcgagaagaagttcatcaagggcaccgccgacttcttcgccctgtgcttcggccccaccctgagcttccagctgctggacccccacatgaagttcagacagctggagagccccaacctgagacagctgctgagctggatcgacctggagttcaaccacccccagatcttcatcgtggagaacggctggttcgtgagcggcaccaccaagagagacgacgccaagtacatgtactacctgaagaagttcatcatggagaccctgaaggccatcaagctggacggcgtggacgtgatcggctacaccgcctggagcctgatggacggcttcgagtggcacagaggctacagcatcagaagaggcctgttctacgtggacttcctgagccaggacaagatgctgctgcccaagagcagcgccctgttctaccagaagctgatcgagaagaacggcttcccccccctgcccgagaaccagcccctggagggcaccttcccctgcgacttcgcctggggcgtggtggacaactacatccaggtgagccagctgaccaagcccatcagcagcctgaccaagccctaccactag

SEQ ID NO: 293103 - DNA, 729 bp, Artificial Sequence
  derived and/or modified sequence
atgactgaccactccattaaggaatgtcagaaatctctggactttgtactggggtggtttgctaagcccgtgttcatcgacggtgactacccagagagcatgaagaataacctaagcagcattcttcccgacttcaccgagtctgagaagaagtttatcaaaggcaccgccgattttttcgccctctgcttcggccccacactctcttttcagttattggacccccatatgaagttccgccagctagagtctccaaacctccgccagttactctcctggattgacctggaatttaatcacccacagatcttcatcgtggagaacgggtggttcgttagtgggaccactaagcgtgacgacgcaaaatacatgtattacctgaagaagttcattatggagaccctgaaagctataaagctcgacggggtggatgtcataggttacaccgcctggagccttatggacggcttcgagtggcaccggggttacagcatccgacgaggcctgttctatgtggatttcctgtctcaggataaaatgttgctgcctaaaagtagtgccttattctaccagaaacttatcgaaaagaacggctttccacccctacctgaaaaccaacccctggaaggcacgttcccctgtgacttcgcatggggcgtggtggataattatatccaggtgtcacagctcactaagccgattagctcgctgactaaaccctaccactag

SEQ ID NO: 293104 - DNA, 729 bp, Artificial Sequence
  derived and/or modified sequence
atgacagaccacagcatcaaggagtgccagaagagcctggactttgtgctgggctggtttgccaagcctgtgttcattgatggagactacccagagagcatgaagaacaacctgagcagcatcctgcctgacttcacagagagcgagaagaagttcatcaagggcacagctgacttctttgccctgtgcttcggccccaccctgtccttccagctgctggacccccacatgaagttccggcagctggagagccccaacctgcggcagctgctgtcctggattgacctggagttcaaccacccccagatcttcatcgtggagaatggctggtttgtgtctggcaccaccaagagagatgatgccaagtacatgtactacctgaagaagttcatcatggagaccctgaaggccatcaagctggatggagtggatgtgattggctacacagcctggagcctgatggatggctttgagtggcaccggggctacagcatccggcggggcctcttctacgtggacttcctgagccaggacaagatgctgctgcccaagagcagcgccctcttctaccagaagctgattgagaagaatggcttcccccccctgcctgagaaccagcccctggagggcaccttcccctgtgactttgcctggggcgtggtggacaactacatccaggtgtcccagctgaccaagcccatcagcagcctgaccaagccctaccactag

SEQ ID NO: 293105 - DNA, 729 bp, Artificial Sequence
  derived and/or modified sequence
atgaccgaccacagcatcaaggagtgccagaagagcctggacttcgtgctcggctggttcgcaaagcccgtctttatagatggtgactacccagaatccatgaagaacaacctgtcctccatcttgcccgactttacggagtccgagaagaagtttataaagggtactgctgattttttcgctctctgcttcgggcctaccctcagcttccagctcctggatcctcacatgaaatttagacagcttgagtctcctaatctgaggcagttgctctcatggatcgatctcgaattcaatcatccacagatttttatcgtggagaacggatggtttgtgtccggcacgaccaaacgagatgacgctaaatacatgtactacctaaagaaatttattatggagacactgaaggcaatcaagctggatggagtggatgtgatcgggtataccgcatggtccctaatggacgggtttgagtggcacagaggatattcaatcaggaggggcctgttttatgtcgactttctgtcccaagacaaaatgctgttgcccaagtccagcgccctcttttaccagaaattaatcgagaaaaatgggtttccccccctacccgagaatcagccacttgagggcacgttcccctgtgatttcgcttggggggtggtcgacaactacattcaagtcagccagcttacaaaacctatctcaagtttaaccaagccttaccactag

SEQ ID NO: 293106 - DNA, 729 bp, Artificial Sequence
  derived and/or modified sequence
atgaccgaccatagcatcaaggagtgtcaaaagtctctggactttgtcctcggttggtttgcaaaacccgtgttcatcgatggcgactatccagaatcaatgaaaaataacttaagctcgatcctgccagacttcactgaaagcgagaaaaagttcattaagggcactgcagatttctttgcgctgtgtttcggacctacacttagcttccaactgttagacccgcacatgaagtttaggcagttggagtctcccaacctgcgacaactgttgagctggatcgatctggagttcaaccacccccagattttcattgttgagaatgggtggtttgtctcagggacaactaagcgggacgatgctaagtacatgtattatctgaagaagtttataatggaaaccctcaaggcaataaagctggatggtgtggacgtcattgggtacactgcatggtccttgatggacggatttgagtggcatcggggttatagcattcggaggggtctgttttatgtggacttcctctcgcaggacaaaatgctgctccccaagtcatctgccttgttctaccagaaattgatcgagaagaatggatttccacctttacctgagaatcaaccgcttgaaggaacattcccgtgcgattttgcgtggggcgtggtagacaattacattcaggtgtctcaattaaccaagcccatctcttctttgacaaagccctaccactag

SEQ ID NO: 293107 - DNA, 1925 bp, Artificial Sequence
  derived and/or modified sequence
ccccgacgaagccgctccagggctgctctcagaggacgcgcggcaggcaaagagaatgaacctgagcgtccacgaaacgtcctgcacggctcccgggagctgggagaaacaggtgcctttctccgacgtccgcgggcgacgcctgccgcaccttgcccgctgccgcgcccctcccgggcacccctcgccctcggcgcccctgcccccgcccccagtgccagggcggaggcagtcccggctcgcaggctcatgccaaagtctggcatctctacaatacttctttccgtcccactcagggaggtcaggtgtccattgccctaagctctcactggatcaatcctcgaagaatgaccgaccacagcatcaaagaatgtcaaaaatctctggactttgtactaggttggtttgccaaacccgtatttattgatggtgactatcccgagagcatgaagaataacctttcatctattctgcctgattttactgaatctgagaaaaagttcatcaaaggaactgctgacttttttgctctttgctttggacccaccttgagttttcaacttttggaccctcacatgaagttccgccaattggaatctcccaacctgaggcaactgctttcctggattgaccttgaatttaaccatcctcaaatatttattgtggaaaatggctggtttgtctcagggaccaccaagagagatgatgccaaatatatgtattacctcaaaaagttcatcatggaaaccttaaaagccatcaagctggatggggtggatgtcatcgggtataccgcatggtccctcatggatggtttcgagtggcacagaggttacagcatcaggcgtggactcttctatgttgactttctaagccaggacaagatgttgttgccaaagtcttcagccttgttctaccaaaagctgatagagaaaaatggcttccctcctttacctgaaaatcagcccctagaagggacatttccctgtgactttgcttggggagttgttgacaactacattcaagtaagtcagctgacaaaaccaatcagcagtctcaccaagccctatcactagtagataccactctgtctcagtttaccgacctgaatgtttacctgtgggatgtccaccacagtaaaaggcttattaaagtggatggggttgtgaccaagaagaggaaatcctactgtgttgactttgctgccatccagccccagatcgctttactccaggaaatgcacgttacacattttcgcttctccctggactgggccctgattctccctctgggtaaccagtcccaggtgaaccacaccatcctgcagtactatcgctgcatggccagcgagcttgtccgtgtcaacatcaccccagtggtggccctgtggcagcctatggccccgaaccaaggactgccgcgcctcctggccaggcagggcgcctgggagaacccctacactgccctggcctttgcagagtatgcccgactgtgctttcaagagctcggccatcacgtcaagctttggataacgatgaatgagccgtatacaaggaatatgacatacagtgctggccacaaccttctgaaggcccatgccctggcttggcatgtgtacaatgaaaagtttaggcatgctcagaatgggaaaatatccatagccttgcaggctgattggatagaacctgcctgccctttctcccaaaaggacaaagaggtggctgagagagttttggaatttgacattggctggctggctgagcccattttcggctctggagattatccatgggtgatgagggactggctgaaccaaagaaacaattttcttcttccttatttcactgaagatgaaaaaaagctaatccagggtacctttgactttttggctttaagccattataccaccatccttgtagactcag

SEQ ID NO: 293108 - DNA, 1338 bp, Artificial Sequence
  derived and/or modified sequence
atgaatagacatctctgcgtctggctgttccggcatccgagtctgaacgggtacttgcagtgccacattcaactgcacagccatcagtttcgacagatccacctggatacacggcttcaagtgttccggcaaaatcgtaattgcatactgcacttgctctctaagaactggtctcgtcgatactgccatcaggacactaaaatgctgtggaagcacaaggccctgcaaaagtatatggagaacctgtctaaggagtatcagacactggagcagtgtctgcagcacatccccgtcaatgaagagaatcggcgctcactcaatcgtaggcacgcagagctagcacctttagccgccatttatcaggaaatccaggagactgagcaagcaatcgaggagcttgaaagtatgtgtaagtctctgaacaaacaggatgaaaagcagctacaagaattggcactggaagaaagacagaccattgaccagaagattaacatgttatacaatgaactgttccagagcctggtccccaaagaaaagtacgacaagaacgacgtgatcttggaggtgaccgccggtagaactactgggggcgacatatgtcagcagtttacccgcgagattttcgacatgtatcagaactattcttgttacaaacattggcagttcgagcttctcaactatacccccgccgattatggcggactacaccacgcagccgcgcgaatctctggtgacggagtgtataaacaccttaaatacgaagggggcatacatcgtgtccagagaatcccggaggtaggattgtcaagtagaatgcagcgaattcacaccggtaccatgtcagtaattgtgctcccccagcctgacgaggtagacgtgaagctggatcctaaggatctgagaattgacaccttcagggcaaaaggtgcaggtggtcagcatgtcaacaagactgattccgctgtccgcttggtccacattccaacgggcttagtggtggagtgccagcaagagagaagccagatcaagaataaggagatcgcgttccgggtgctgcgagctcgcttgtatcaacagataattgaaaaagacaagcgacaacagcaaagcgcacgcaagcttcaagtggggacaagggcccagtcggagaggatccgcacatacaatttcacacaagatcgtgttagcgaccacagaatcgcttacgaggtgcgcgatattaaagagttcttgtgcggaggcaagggtctcgaccagcttatacagcgcctgttacagtctgctgacgaggaggcaatagcagaactgctcgacgagcatttgaaatctgcgaagtag

SEQ ID NO: 293109 - DNA, 1338 bp, Artificial Sequence
  derived and/or modified sequence
atgaaccggcatctttgtgtgtggctctttaggcatcccagcctgaacggataccttcagtgccatatccaactgcattcccaccagtttcgacagatacacttggatacacgcctgcaggtgttcagacaaaaccgcaactgcatcctccacctcctttccaagaactggtcccgccggtattgtcatcaggacactaaaatgctgtggaaacacaaagctctccaaaaatacatggagaacttgagtaaggaataccagaccttggagcagtgtctccagcacatccctgtgaatgaggagaatcgtagatcgctgaataggcgacatgctgaactggcgccgttggccgctatttaccaagagattcaggagactgagcaggccatcgaagagctcgagagcatgtgcaagagcctgaataagcaggacgagaagcagctgcaggaactggctctggaagaacggcaaacaatcgaccagaagattaacatgctttataacgagttatttcagagcctggttcccaaggagaagtatgacaagaacgacgtgatactcgaggtcaccgccggtcgaacgacaggaggagacatttgtcagcagttcactcgagagatctttgacatgtaccaaaactactcatgctacaaacactggcagttcgaattacttaattatacaccagctgattatggagggctacaccacgcagccgctcgaatcagcggggacggggtttataaacacctgaagtatgaaggaggcatacatcgggttcagcgcattcccgaggtgggcttgagctcaaggatgcagcgaatacacacaggcacaatgagcgttatcgtccttcctcagcctgacgaggtggacgtgaaactggatcccaaggatctccgtattgacacgtttcgggccaaaggtgccggtggacagcacgtcaacaaaacagattctgctgtcagactcgtccacattccaactggcctggtcgtcgagtgtcagcaggaaagatcccagattaaaaacaaggagatagccttcagggttctgagagccagactgtatcagcaaatcattgaaaaggacaaaagacagcaacaatcagcccgcaaactgcaggtgggcactcgtgctcagagcgagcgaattcgaacttataacttcactcaggatagggtcagtgatcatcgaatcgcatacgaggttcgcgacattaaggaattcttgtgcggaggaaaagggctagaccaactcatacagaggctgctgcagtcagccgacgaggaggctatcgccgaactgcttgatgaacacctcaaaagcgctaagtag

SEQ ID NO: 293110 - DNA, 1338 bp, Artificial Sequence
  derived and/or modified sequence
atgaacagacacctgtgtgtgtggctgttccgccaccccagcctgaatggctacctgcagtgccacatccagctgcacagccaccagttccggcagatccacctggacacccggctgcaggtgttccggcagaacagaaactgcatcctgcacctgctgagcaagaactggagccgccgctactgccaccaggacaccaagatgctgtggaagcacaaggccctgcagaagtacatggagaacctgagcaaggagtaccagaccctggagcagtgcctgcagcacatccctgtgaatgaagaaaatagaagaagcctgaacagaagacatgctgagctggcccccctggccgccatctaccaggagatccaggagacagagcaggccatcgaggagctggagagcatgtgcaagagcctgaacaagcaggatgagaagcagctgcaggagctggccctggaggagcggcagaccatcgaccagaagatcaacatgctgtacaatgagctgttccagagcctggtgcccaaggagaagtatgacaagaatgatgtgatcctggaggtgacagctggccgcaccactggaggagacatctgccagcagttcacccgggagatctttgacatgtaccagaactacagctgctacaagcactggcagtttgagctgctgaactacaccccagctgactatggaggcctgcaccacgccgccgcccgcatctctggagatggagtgtacaagcacctgaagtatgaaggaggcatccaccgggtgcagagaattcctgaggtgggcctgagcagcaggatgcagaggatccacacaggcaccatgtctgtgattgtgctgccccagccagatgaggtggatgtgaagctggaccccaaggacctgagaattgacaccttccgggccaagggggccggcggccagcacgtgaacaagacagacagcgctgtgcggctggtgcacatccccaccggcctggtggtggagtgccagcaggagaggagccagatcaagaacaaggagatcgccttccgggtgctgcgggcccggctgtaccagcagatcatcgagaaggacaagaggcagcagcagagcgccaggaagctgcaggtgggcacccgggcccagagcgagcgcatccgcacctacaacttcacccaggacagagtgtctgaccaccgcatcgcctatgaggtgcgggacatcaaggagttcctgtgtggcggcaagggcctggaccagctgatccagaggctgctgcagagcgcagatgaggaggccatcgccgagctgctggatgagcacctgaagagcgccaagtag

SEQ ID NO: 293111 - DNA, 1338 bp, Artificial Sequence
  derived and/or modified sequence
atgaaccggcacctgtgcgtgtggctgttccggcaccccagcctgaacggatatttgcagtgccatattcagctgcattcccatcagttccgtcagatccacctggacacaaggctgcaggtctttagacagaaccggaactgcattctgcatctccttagcaaaaattggtcccggaggtattgtcaccaggacaccaaaatgttatggaaacacaaggcactacagaaatacatggaaaacttgagcaaagaatatcagactctcgaacagtgtctgcagcacatccctgtgaatgaagaaaaccgccgaagcctaaaccgacgacatgctgagctggctccactcgccgcgatttatcaggagatccaggagacagagcaggccattgaggagctggaatcaatgtgcaagagcctaaacaaacaggatgaaaagcagctgcaggaactggcacttgaggagaggcagaccatcgatcagaaaattaacatgttatacaacgaactattccaatcactggtcccaaaggaaaaatacgataagaacgacgttatcctagaagtgactgccggacgcaccacaggtggggatatctgtcagcagtttactcgagagatcttcgacatgtaccaaaactattcttgctacaaacattggcagttcgagctgctgaattacacaccagccgattacggaggacttcaccatgctgcggctcgtatatctggagatggtgtttataaacatctgaagtacgagggcgggattcatagggtgcagcggattcccgaggtgggcctgagctctcgtatgcaaagaattcatactggaacgatgagcgtgattgtcctaccgcagcccgacgaagtggacgtcaaactcgatccaaaggatctgcggattgatacattccgcgctaaaggcgccggtgggcagcacgtcaacaagacagactctgccgttaggctggtgcatatcccaactggcctggtagtggaatgccagcaggagaggagccaaattaagaataaggagattgctttcagagttcttagagcccgtctctaccagcagatcattgaaaaggacaagcggcagcagcaatctgcccgaaaactgcaggtgggaacaagggcacagagtgaacggattcgaacttacaatttcacccaagatagggtgtctgatcacagaattgcatacgaagtcagagacatcaaggagtttctgtgtggcggcaaaggcttagaccagctcattcagcggctcctgcagtctgccgacgaggaagctattgctgaattactcgatgaacaccttaagagcgctaagtag

SEQ ID NO: 293112 - DNA, 1338 bp, Artificial Sequence
  derived and/or modified sequence
atgaaccggcacctgtgcgtgtggctgttccggcaccccagcctgaacggttatctgcagtgccatatacagctccactcccatcagttcagacagattcatctggacacgaggcttcaggtcttcaggcagaatcgtaattgtatcttgcatcttctaagtaagaactggagtcggcggtactgccaccaggatactaaaatgctttggaagcataaggctttacagaagtatatggaaaatctgtctaaagagtaccaaaccctggaacagtgtttgcagcatatcccggtgaatgaagaaaatcggaggtctctgaacagacgccatgcagaattggcacccctggccgctatttaccaagagatacaggagacagagcaggctatcgaagaattagagagtatgtgcaagtcattaaataaacaggacgagaaacaattgcaggaactggcattagaggagaggcagaccatagaccagaagatcaatatgttgtacaatgagctcttccagtctttggtgcccaaggagaagtatgataagaatgacgtaatcctagaagttacagctggccgcacaactggtggggacatttgtcagcagttcacgcgagaaatctttgatatgtatcagaattattcatgttacaagcattggcagttcgagctgcttaattacacacccgcagattacgggggcctgcatcacgcggctgcacggattagcggcgatggtgtctataagcacctgaagtacgaggggggtattcaccgtgtgcagagaattcccgaagtgggtctcagcagcagaatgcagaggatccacacgggaactatgagtgttatcgtacttccccaaccggatgaggtcgatgtcaagctggacccgaaagatctgcgcatagatactttccgagcaaaaggagctggaggccaacacgtgaacaaaaccgattctgctgtcaggctggttcatattccgaccgggttagtagtggagtgtcagcaagaacgcagtcagatcaagaacaaggaaatcgcttttcgggtgctccgcgcaagactctatcaacaaatcatagagaaggacaaacgtcagcaacagtctgcacgcaagcttcaagtgggcacccgcgctcagtctgagagaattcgtacctacaactttacccaggacagggtgagcgatcaccggatagcctacgaagttcgcgacatcaaagaattcttatgcggaggcaaggggctcgaccaattgattcaaaggttattacaaagcgcggatgaggaggccattgccgaactgctcgatgaacacctcaagagcgccaagtag

SEQ ID NO: 293113 - DNA, 1338 bp, Artificial Sequence
  derived and/or modified sequence
atgaaccgtcatctatgcgtctggctgttccgccatccaagcttaaacggatacctccagtgtcatatccagttgcacagtcaccagtttcgccagatacatttagataccaggctgcaggtctttaggcagaaccggaactgtattttacatctgctgtcgaaaaattggtcacggagatattgccaccaggataccaagatgctctggaagcacaaggctctacagaaatacatggagaacctgtccaaggagtatcagacactagagcaatgtctccagcatattccagtgaacgaagaaaaccgaagatccctcaaccgtcgccatgcagagttagcacccttagcagccatctatcaagagatacaggagactgagcaggccatcgaagagttagaatccatgtgcaaatccctcaataagcaggacgagaaacaactgcaggagctcgctcttgaggaaagacaaacaatcgaccagaagataaacatgctgtacaacgaactcttccaatcgcttgtacctaaggagaagtacgacaagaacgacgtgatcttagaggttaccgccggaagaacgacggggggagatatttgccaacagtttacacgcgagatattcgacatgtaccagaactattcgtgttataaacactggcagtttgaacttctaaattacacacctgctgactacggtggactacaccacgcagcagcacgcatcagcggcgacggggtttacaaacatctgaaatacgaggggggtattcacagagtccagagaatcccggaagtgggcctgtcttcacggatgcaaagaattcacaccggaacaatgagtgtaatagtcttgccccagcctgacgaggtcgacgtaaagctcgaccctaaggacctgagaatcgacacattcagagcaaaaggcgctggtggtcagcatgtaaacaagaccgactctgccgtccgattggtgcacatccccacaggcttggtggtggagtgtcagcaggagcggtcgcaaattaagaataaggagatagctttccgagtgctgcgggcacgtctctaccaacaaatcatagagaaggataaacgtcagcaacaatctgcacggaaactgcaggttgggacccgcgctcagtccgagcgcatcaggacctacaattttactcaggaccgagtttcagatcatcgaatcgcgtacgaggtaagggacataaaggagttcctctgcggaggcaagggcctcgatcagctcattcagaggttactgcagagcgctgatgaggaggccatcgctgagcttctggacgaacacttgaaatccgctaagtag

SEQ ID NO: 293114 - DNA, 1338 bp, Artificial Sequence
  derived and/or modified sequence
atgaatagacacctgtgtgtatggctatttcgacacccttcactcaatggatatttgcagtgccatattcaactacattcccatcaattccgccaaatccacctcgataccagactgcaggtgttccggcagaacagaaactgcattctgcacctgctgagtaagaattggagccgaaggtattgtcatcaggacacgaaaatgctgtggaaacataaggctttgcagaagtacatggagaacctgtccaaggagtaccagaccctggaacagtgcctgcagcatattcctgtgaacgaagaaaacagacgttccctcaatcgccgacatgcggaactcgcgccactggctgctatatatcaagaaatccaagaaacagagcaagccattgaagaactcgagtcaatgtgtaagtcactgaataagcaggacgagaaacagctgcaggagctggcactcgaggaacgccagactatcgaccagaaaatcaacatgctctacaacgagctgttccagtcgctagtccctaaagagaagtatgataagaacgatgtgatcctggaggtgaccgccggtcgaactacggggggagatatatgccaacagttcacacgtgagatcttcgatatgtatcagaactactcctgttacaagcattggcaattcgagttgttgaattatacccccgcagactatggaggcttgcaccacgctgcagcaaggattagcggcgacggagtctataagcacctcaagtacgaagggggaatccatcgggttcagcgtattccagaggttggcctttctagccgcatgcaacgcattcataccggtaccatgtcggtgattgtgctgccccagcctgatgaggtggacgtgaagctggaccctaaggacctgcggatcgatacctttagagccaaaggcgcaggagggcagcacgtgaacaagactgattcagctgtgcgtctagtccatatacccacagggttagttgtggaatgccagcaggaacggagccagataaaaaacaaagagattgcattccgagtcttacgggcacgactttaccagcaaatcattgagaaagacaagcgccaacagcagtccgcaaggaagctgcaagttggtacccgcgcacaatcggagcgcatcaggacatacaatttcacacaagacagggtgtccgaccaccggatcgcctatgaggtccgcgacattaaggaatttctgtgcgggggaaaagggctagatcaactcatccaaagactgttgcagagcgctgacgaagaggccattgcagagctccttgacgaacaccttaagtcggccaagtag

SEQ ID NO: 293115 - DNA, 1338 bp, Artificial Sequence
  derived and/or modified sequence
atgaacagacacctgtgcgtgtggctgttcagacaccccagcctgaacggctacctgcagtgccacatccagctgcacagccaccagttcagacagatccacctggacaccagactgcaggtgttcagacagaacagaaactgcatcctgcacctgctgagcaagaactggagcagaagatactgccaccaggacaccaagatgctgtggaagcacaaggccctgcagaagtacatggagaacctgagcaaggagtaccagaccctggagcagtgcctgcagcacatccccgtgaacgaggagaacagaagaagcctgaacagaagacacgccgagctggcccccctggccgccatctaccaggagatccaggagaccgagcaggccatcgaggagctggagagcatgtgcaagagcctgaacaagcaggacgagaagcagctgcaggagctggccctggaggagagacagaccatcgaccagaagatcaacatgctgtacaacgagctgttccagagcctggtgcccaaggagaagtacgacaagaacgacgtgatcctggaggtgaccgccggcagaaccaccggcggcgacatctgccagcagttcaccagagagatcttcgacatgtaccagaactacagctgctacaagcactggcagttcgagctgctgaactacacccccgccgactacggcggcctgcaccacgccgccgccagaatcagcggcgacggcgtgtacaagcacctgaagtacgagggcggcatccacagagtgcagagaatccccgaggtgggcctgagcagcagaatgcagagaatccacaccggcaccatgagcgtgatcgtgctgccccagcccgacgaggtggacgtgaagctggaccccaaggacctgagaatcgacaccttcagagccaagggcgccggcggccagcacgtgaacaagaccgacagcgccgtgagactggtgcacatccccaccggcctggtggtggagtgccagcaggagagaagccagatcaagaacaaggagatcgccttcagagtgctgagagccagactgtaccagcagatcatcgagaaggacaagagacagcagcagagcgccagaaagctgcaggtgggcaccagagcccagagcgagagaatcagaacctacaacttcacccaggacagagtgagcgaccacagaatcgcctacgaggtgagagacatcaaggagttcctgtgcggcggcaagggcctggaccagctgatccagagactgctgcagagcgccgacgaggaggccatcgccgagctgctggacgagcacctgaagagcgccaagtag

SEQ ID NO: 293116 - protein, 462 aa, Artificial Sequence
  derived and/or modified sequence
MNKSPSAMQQQDGLDRNELLPLSPLSPTMEEEPLVVFLSGEDDPEKIEERKKSKELRSLWRKAIHQQILLLRMEKENQKLEGVPKSRRGEIWQFLALQYRLRHRLPNKQQPPDISYKELLKQLTAQQHAILVDLGRTFPTHPYFSVQLGPGQLSLFNLLKAYSLLDKEVGYCQGISFVAGVLLLHMSEEQAFEMLKFLMYDLGFRKQYRPDMMSLQIQMYQLSRLLHDYHRDLYNHLEENEISPSLYAAPWFLTLFASQFSLGFVARVFDIIFLQGTEVIFKVALSLLSSQETLIMECESFENIVEFLKNTLPDMNTSEMEKIITQVFEMDISKQLHAYEVEYHVLQDELQESSYSCEDSETLEKLERANSQLKRQNMDLLEKLQVAHTKIQALESNLENLLTRETKMKSLIRTLEQEKMAYQKTVEQLRKLLPADALVNCDLLLRDLNCNPNNKAKIGNKP

SEQ ID NO: 293117 - protein, 116 aa, Artificial Sequence
  derived and/or modified sequence
  misc_feature (1)..(1): Xaa can be any naturally occurring amino acid
XSELMDFFTISEVCLHQFQYMGKRYIARNQEGLGPIVHDRKSQTLPVSRNRTGMMHARLQQLGSLDNSLTFNHSYGHSDADVLHQSLLEANIATEVCLTALDTLSLFTLAFKNQLL

SEQ ID NO: 293118 - DNA, 73 bp, Artificial Sequence
  derived and/or modified sequence
agcaatttcagcaaagtctcaggatacaaaatcaatgtacaaattcacaagcattcttatggaccaacaacag

SEQ ID NO: 293119 - DNA, 351 bp, Artificial Sequence
  derived and/or modified sequence
tgaagcgagctgatggacttcttcaccatcagcgaggtgtgcctgcaccagttccagtacatgggcaagagatacatcgccagaaaccaggagggcctgggccccatcgtgcacgacagaaagagccagaccctgcccgtgagcagaaacagaaccggcatgatgcacgccagactgcagcagctgggcagcctggacaacagcctgaccttcaaccacagctacggccacagcgacgccgacgtgctgcaccagagcctgctggaggccaacatcgccaccgaggtgtgcctgaccgccctggacaccctgagcctgttcaccctggccttcaagaaccagctgctgtag

SEQ ID NO: 293120 - DNA, 348 bp, Artificial Sequence
  derived and/or modified sequence
catctgaacttatggatttttttacaatatctgaagtctgcctgcaccagttccagtacatggggaagcgatacatagccaggaaccaggaggggttgggacccatagttcatgatcgaaagtctcagacattgcctgtttcccgtaacagaacaggaatgatgcatgccagattgcagcagctgggcagcctggataactctctcacttttaaccacagctatggccactcggacgcagatgttctgcaccagtcattacttgaagccaacattgctactgaggtttgcctgacagctctggacacgctttctctatttacattggcgtttaagaaccagctcctgg

SEQ ID NO: 293121 - DNA, 351 bp, Artificial Sequence
  derived and/or modified sequence
tgatcagaattgatggacttcttcaccatcagcgaggtttgcctgcaccaattccagtatatgggcaagcgatacatcgcaagaaatcaagaaggcctgggccccatcgtacatgatagaaaaagccaaaccctccctgtgtccagaaacaggaccgggatgatgcatgcccgtctgcaacaactgggtagtttggataacagcttaaccttcaaccacagttatggccattcagatgccgatgtgctgcatcagtcactgctcgaggccaatatcgcgacagaggtttgcttaactgccctggatactctatccctgttcaccctggcatttaaaaaccagctcttgtag

SEQ ID NO: 293122 - DNA, 351 bp, Artificial Sequence
  derived and/or modified sequence
tgaagtgagctgatggacttcttcaccatcagcgaggtgtgcctgcaccagttccagtacatgggcaagcgctacatcgccaggaaccaggagggcctgggccccatcgtgcatgacaggaagagccagaccctgcctgtgtccaggaacagaacaggcatgatgcacgcccggctgcagcagctgggcagcctggacaacagcctgaccttcaaccacagctatggccacagtgatgctgatgtgctgcaccagagcctgctggaggccaacatcgccacagaggtgtgcctgacagccctggacaccctgagcctcttcaccctggccttcaagaaccagctgctgtag

SEQ ID NO: 293123 - DNA, 351 bp, Artificial Sequence
  derived and/or modified sequence
tgaagcgagctgatggacttcttcaccatcagcgaggtgtgcctgcatcaatttcagtacatggggaagaggtacatagcaaggaatcaggaggggcttgggcccattgtgcacgataggaaatcccagactctaccagtgtcaagaaatcggacgggaatgatgcacgctcgactgcaacaactgggtagcctggacaacagtctgaccttcaatcactcctacggacactccgacgcagatgttcttcaccagtccctgctggaggcaaacatagccactgaggtgtgccttacagcgctcgacactctgtcgctgttcacactcgctttcaaaaaccagctcctgtag

SEQ ID NO: 293124 - DNA, 351 bp, Artificial Sequence
  derived and/or modified sequence
taatcggaactgatggatttttttaccatctcagaagtatgcttacaccagtttcagtatatgggtaaaaggtatattgctcggaatcaggaggggctgggccctatcgtgcatgaccgcaaatcccagacattgcctgtgtctagaaaccggacaggaatgatgcatgctaggttacagcagttgggatctttggacaactcgttaacgttcaatcattcatacggacactccgatgccgatgttttgcaccagtccttactggaggcaaacatagccactgaagtgtgtctgacagccttggatacactctcactcttcactctggcctttaagaatcagctcctctag

SEQ ID NO: 293125 - protein, 390 aa, Artificial Sequence
  derived and/or modified sequence
  misc_feature (1)..(1): Xaa can be any naturally occurring amino acid
XQMKEHENDPEMLVDLQYSLAKSYASTPELRKTWLDSMARIHVKNGDLSEAAMCYVHVTALVAEYLTRKEAVQWEPPLLPHSHSACLRRSRGGVFRQGCTAFRVITPNIDEEASMMEDVGMQDVHFNEDVLMELLEQCADGLWKAERYELIADIYKLIIPIYEKRRDFERLAHLYDTLHRAYSKVTEVMHSGRRLLGTYFRVAFFGQGFFEDEDGKEYIYKEPKLTPLSEISQRLLKLYSDKFGSENVKMIQDSGKVNPKDLDSKYAYIQVTHVIPFFDEKELQERKTEFERSHNIRRFMFEMPFTQTGKRQGGVEEQCKRRTILTAIHCFPYVKKRIPVMYQHHTDLNPIEVAIDEMSKKVAELRQLCSSAEVDMIKLQLKLQGSVSVQ

SEQ ID NO: 293126 - DNA, 1173 bp, Artificial Sequence
  derived and/or modified sequence
tgacagatgaaggagcacgagaacgaccccgagatgctggtggacctgcagtacagcctggccaagagctacgccagcacccccgagctgagaaagacctggctggacagcatggccagaatccacgtgaagaacggcgacctgagcgaggccgccatgtgctacgtgcacgtgaccgccctggtggccgagtacctgaccagaaaggaggccgtgcagtgggagccccccctgctgccccacagccacagcgcctgcctgagaagaagcagaggcggcgtgttcagacagggctgcaccgccttcagagtgatcacccccaacatcgacgaggaggccagcatgatggaggacgtgggcatgcaggacgtgcacttcaacgaggacgtgctgatggagctgctggagcagtgcgccgacggcctgtggaaggccgagagatacgagctgatcgccgacatctacaagctgatcatccccatctacgagaagagaagagacttcgagagactggcccacctgtacgacaccctgcacagagcctacagcaaggtgaccgaggtgatgcacagcggcagaagactgctgggcacctacttcagagtggccttcttcggccagggcttcttcgaggacgaggacggcaaggagtacatctacaaggagcccaagctgacccccctgagcgagatcagccagagactgctgaagctgtacagcgacaagttcggcagcgagaacgtgaagatgatccaggacagcggcaaggtgaaccccaaggacctggacagcaagtacgcctacatccaggtgacccacgtgatccccttcttcgacgagaaggagctgcaggagagaaagaccgagttcgagagaagccacaacatcagaagattcatgttcgagatgcccttcacccagaccggcaagagacagggcggcgtggaggagcagtgcaagagaagaaccatcctgaccgccatccactgcttcccctacgtgaagaagagaatccccgtgatgtaccagcaccacaccgacctgaaccccatcgaggtggccatcgacgagatgagcaagaaggtggccgagctgagacagctgtgcagcagcgccgaggtggacatgatcaagctgcagctgaagctgcagggcagcgtgagcgtgcagtag

SEQ ID NO: 293127 - DNA, 1169 bp, Artificial Sequence
  derived and/or modified sequence
cccagatgaaggagcatgagaacgacccagagatgctggtggacctccagtacagcctggccaaatcctatgccagcacgcccgagctcaggaagacgtggctcgacagcatggccaggatccatgtcaaaaatggcgatctctcagaggcagcaatgtgctatgtccacgtaacagccctagtggcagaatatctcacacggaaagaagcagtccagtgggagccgccccttctcccccacagccatagcgcctgcctgaggaggagccggggaggcgtgtttagacaaggatgcaccgccttcagggtcattaccccaaacatcgacgaggaggcctccatgatggaagacgtggggatgcaggatgtccatttcaacgaggatgtgctgatggagctccttgagcagtgcgcagatggactctggaaagccgagcgctacgagctcatcgccgacatctacaaacttatcatccccatttatgagaagcggagggattttgagaggctggcccatctgtatgacacgctgcaccgggcctacagcaaagtgaccgaggtcatgcactcgggccgcaggcttctggggacctacttccgggtagccttcttcgggcagggattctttgaagatgaagatggaaaggagtatatttacaaggaacccaaactcacaccgctgtcggaaatttctcagagactccttaaactgtactcggataaatttggttctgaaaatgtcaaaatgatacaggattctggcaaggtcaaccctaaggatctggattctaagtatgcatacatccaggtgactcacgtcatccccttctttgacgaaaaagagttgcaagaaaggaaaacagagtttgagagatcccacaacatccgccgcttcatgtttgagatgccatttacgcagaccgggaagaggcagggcggggtggaagagcagtgcaaacggcgcaccatcctgacagccatacactgcttcccttatgtgaagaagcgcatccctgtcatgtaccagcaccacactgacctgaaccccatcgaggtggccattgacgagatgagtaagaaggtggcggagctccggcagctgtgctcctcggccgaggtggacatgatcaaactgcagctcaaactccagggcagcgtgagtgttcag

SEQ ID NO: 293128 - DNA, 1173 bp, Artificial Sequence
  derived and/or modified sequence
tagcagatgaaagagcacgagaacgaccccgagatgcttgtggatcttcagtactctctggccaagtcctatgcaagcacaccagaactccgcaagacatggttggactccatggctagaatccacgtgaagaacggtgacctgagtgaggctgccatgtgctacgtgcatgtcaccgctctggtagccgagtacttgactcgcaaggaggccgtgcaatgggagccccctctgctccctcactcccacagcgcctgtctgagaagatcacgtgggggagtcttccggcaaggctgcacagcattccgggtaatcacccctaacatcgatgaagaagccagtatgatggaggacgtgggcatgcaggatgtccatttcaatgaggatgtgctgatggaattactggagcaatgtgccgatggtttatggaaggcagaaaggtacgagcttatagccgatatatataaactgatcattccaatctatgagaaacgtcgagattttgaaagactggcccacctgtacgacaccctccatagagcttattctaaggtaacagaagtgatgcactcaggccgtaggcttctgggaacatactttagagtggctttctttggccagggctttttcgaagatgaagatggcaaggagtacatctacaaagaacccaagttgaccccgttaagcgagatctcccagaggctgctgaagttgtactccgacaagtttgggtcagaaaatgttaaaatgatacaggactcggggaaggtcaaccctaaggacctggactcaaaatacgcttacatccaggtgacacatgtaattcctttttttgatgaaaaagagctgcaagaacgaaaaaccgagtttgagcggtcacataacatcaggcggttcatgttcgaaatgcccttcactcaaacaggtaagcgtcaggggggtgtcgaggaacagtgtaagaggcgtacgatcttaaccgctattcactgtttcccttacgtgaagaagaggattccagtgatgtatcagcaccacaccgaccttaacccaatcgaggtggccattgatgagatgtctaagaaggtggctgaactccggcagctttgttcatccgcagaagtcgacatgattaaactccaattaaagctgcagggcagcgttagcgtccagtag

SEQ ID NO: 293129 - DNA, 1173 bp, Artificial Sequence
  derived and/or modified sequence
tgacagatgaaggagcatgaaaatgaccctgagatgctggtggacctgcagtacagcctggccaagagctatgccagcaccccagagctgaggaagacctggctggacagcatggcccgcatccacgtgaagaatggagacctgtctgaggccgccatgtgctacgtgcacgtgacagccctggtggccgagtacctgaccaggaaggaggccgtgcagtgggagccccccctgctgccccacagccacagcgcctgcctgcggcgcagccggggcggcgtcttccggcagggctgcacagccttccgggtcatcacccccaacattgatgaggaggcctccatgatggaggatgtgggcatgcaggatgtgcacttcaatgaagatgtgctgatggagctgctggagcagtgtgctgatggcctgtggaaggccgagagatatgagctgattgctgacatctacaagctgatcatccccatctatgagaagagaagagactttgagcggctggcccacctgtatgacaccctgcaccgggcctacagcaaggtgacagaggtgatgcacagcggccgccgcctgctgggcacctacttccgggtggccttcttcggccagggcttctttgaagatgaagatggcaaggagtacatctacaaggagcccaagctgacccccctgtctgagatcagccagaggctgctgaagctgtacagcgacaagtttggaagtgaaaatgtgaagatgatccaggacagcggcaaggtgaaccccaaggacctggacagcaaatatgcctacatccaggtgacccacgtgatccccttctttgatgagaaggagctgcaggagaggaagacagaatttgagaggagccacaacatccgccgcttcatgtttgagatgcccttcacccagacaggcaagaggcagggcggcgtggaggagcagtgcaagaggaggaccatcctgacagccatccactgcttcccctacgtgaagaagagaattcctgtgatgtaccagcaccacacagacctgaaccccatcgaggtggccattgatgagatgagcaagaaggtggccgagctgcggcagctgtgcagcagcgctgaggtggacatgatcaagctgcagctgaagctgcagggctctgtgtctgtgcagtag

SEQ ID NO: 293130 - DNA, 1173 bp, Artificial Sequence
  derived and/or modified sequence
tgacagatgaaggagcacgagaacgaccccgagatgctggtggaccttcagtactctctcgccaagtcatacgcatctactcccgagctgaggaaaacctggctggattcgatggcccggatacacgtgaaaaatggtgacctgtccgaggccgctatgtgctacgtgcacgtcactgccctggtcgcagaatacctgacccgtaaagaggccgttcagtgggagccccccctgctgccccatagccactccgcttgtttgcgccgcagcagaggcggtgtctttcggcagggctgtactgcttttcgggttatcacccctaatatcgacgaagaggcgtcgatgatggaggacgttggtatgcaggatgttcattttaatgaggacgtgctgatggaattactagagcagtgtgctgatgggctgtggaaggcggaaaggtacgagctgattgccgatatatacaagctgatcatacccatctacgaaaagagacgtgactttgaacgcctggcccatttatacgataccctgcacagggcatatagcaaagtcacagaggtgatgcactccggccgcaggctcctcggcacctacttccgcgtggccttcttcggacaaggcttttttgaagacgaggatggcaaagaatacatctacaaagaaccaaaactcacacctcttagcgagatcagccaacgactcttgaaactgtattctgataaattcggcagtgagaatgtaaaaatgatccaggacagtggcaaggtgaacccaaaagacttagattcaaaatatgcttatatccaggtgacgcacgttatccctttttttgacgagaaagaactgcaggagcggaaaacagagttcgagagaagtcataacatacgtcggttcatgttcgaaatgcccttcacgcaaaccgggaagcggcaagggggcgtagaggaacagtgcaaacgccgaacgattctcactgcgatccattgcttcccttacgtgaaaaagagaatacctgtgatgtatcagcatcacactgacctgaatcctattgaagtagcaattgatgagatgtccaaaaaagttgctgaacttaggcagttatgctcaagcgcggaggttgacatgataaaacttcagctgaagctccaggggagcgttagtgttcagtag

SEQ ID NO: 293131 - DNA, 1173 bp, Artificial Sequence
  derived and/or modified sequence
tgacagatgaaagaacacgaaaacgaccccgaaatgctagtggatctgcaatattctctggcgaagagttatgccagtacaccagagctaaggaagacctggctcgacagcatggctaggattcacgtgaagaacggcgatctctcagaggctgctatgtgctacgttcacgtcacagctctggtggcagaataccttactaggaaggaggccgtgcagtgggaaccgccactgctgccccactctcattccgcctgcctgagaaggagcagagggggtgtgtttcggcagggctgtaccgcatttcgcgttattacaccgaacatcgatgaggaggcatccatgatggaagacgtggggatgcaagacgtacatttcaatgaggatgtcttaatggagctgctggaacagtgtgctgacggactgtggaaggccgagcgctatgaactgattgcggacatttacaagctgatcattcccatatatgagaagaggcgcgactttgagcgcctggcccatctctacgacacactgcatcgggcttattcaaaggttaccgaagtcatgcactccgggaggcgcttgctcggaacatacttccgtgtagcattctttggccagggcttcttcgaggatgaggacgggaaagaatacatctacaaggagcccaagttgaccccactaagcgagattagccagcgactacttaagctgtattccgacaaatttggaagtgagaatgtgaaaatgatccaggactctggaaaggtcaatcccaaggatctggattccaaatatgcctacattcaggtaactcatgtgatcccctttttcgatgaaaaagaattgcaggagagaaagaccgagttcgaacgtagtcataacatcaggagattcatgttcgagatgccatttacacagaccggcaaacgtcagggtggcgttgaggagcaatgtaaaagacgtacaatattaaccgccattcattgcttcccgtatgttaaaaaacgaattccggttatgtatcagcatcacactgatttgaatccaattgaggtggccatcgacgaaatgagtaaaaaagtggctgaacttcgccagctctgtagctctgctgaggtggacatgattaagcttcagctgaagttgcagggaagtgtgtccgtccagtag

SEQ ID NO: 293132 - protein, 724 aa, Artificial Sequence
  derived and/or modified sequence
MHARLQQLGSLDNSLTFNHSYGHSDADVLHQSLLEANIATEVCLTALDTLSLFTLAFKNQLLADHGHNPLMKKVFDVYLCFLQKHQSETALKNVFTALRSLIYKFPSTFYEGRADMCAALCYEILKCCNSKLSSIRTEASQLLYFLMRNNFDYTGKKSFVRTHLQVIISVSQLIADVVGIGGTRFQQSLSIINNCANSDRLIKHTSFSSDVKDLTKRIRTVLMATAQMKEHENDPEMLVDLQYSLAKSYASTPELRKTWLDSMARIHVKNGDLSEAAMCYVHVTALVAEYLTRKGVFRQGCTAFRVITPNIDEEASMMEDVGMQDVHFNEDVLMELLEQCADGLWKAERYELIADIYKLIIPIYEKRRDFERLAHLYDTLHRAYSKVTEVMHSGRRLLGTYFRVAFFGQQYQFTDSETDVEGFFEDEDGKEYIYKEPKLTPLSEISQRLLKLYSDKFGSENVKMIQDSGKVNPKDLDSKYAYIQVTHVIPFFDEKELQERKTEFERSHNIRRFMFEMPFTQTGKRQGGVEEQCKRRTILTAIHCFPYVKKRIPVMYQHHTDLNPIEVAIDEMSKKVAELRQLCSSAEVDMIKLQLKLQGSVSVQVNAGPLAYARAFLDDTNTKRYPDNKVKLLKEVFRQFVEACGQALAVNERLIKEDQLEYQEEMKANYREMAKELSEIMHEQICPLEEKTSVLPNSLHIFNAISGTPTSTMVHGMTSSSSVV

SEQ ID NO: 293133 - protein, 669 aa, Artificial Sequence
  derived and/or modified sequence
  misc_feature (1)..(1): Xaa can be any naturally occurring amino acid
XFKNQLLADHGHNPLMKKVFDVYLCFLQKHQSETALKNVFTALRSLIYKFPSTFYEGRADMCAALCYEILKCCNSKLSSIRTEASQLLYFLMRNNFDYTGKKSFVRTHLQVIISVSQLIADVVGIGGTRFQQSLSIINNCANSDRLIKHTSFSSDVKDLTKRIRTVLMATAQMKEHENDPEMLVDLQYSLAKSYASTPELRKTWLDSMARIHVKNGDLSEAAMCYVHVTALVAEYLTRKGVFRQGCTAFRVITPNIDEEASMMEDVGMQDVHFNEDVLMELLEQCADGLWKAERYELIADIYKLIIPIYEKRRDFERLAHLYDTLHRAYSKVTEVMHSGRRLLGTYFRVAFFGQQYQFTDSETDVEGFFEDEDGKEYIYKEPKLTPLSEISQRLLKLYSDKFGSENVKMIQDSGKVNPKDLDSKYAYIQVTHVIPFFDEKELQERKTEFERSHNIRRFMFEMPFTQTGKRQGGVEEQCKRRTILTAIHCFPYVKKRIPVMYQHHTDLNPIEVAIDEMSKKVAELRQLCSSAEVDMIKLQLKLQGSVSVQVNAGPLAYARAFLDDTNTKRYPDNKVKLLKEVFRQFVEACGQALAVNERLIKEDQLEYQEEMKANYREMAKELSEIMHEQICPLEEKTSVLPNSLHIFNAISGTPTSTMVHGMTSSSSVV

SEQ ID NO: 293134 - DNA, 2175 bp, Artificial Sequence
  derived and/or modified sequence
atgcacgccagactgcagcagctgggcagcctggacaacagcctgaccttcaaccacagctacggccacagcgacgccgacgtgctgcaccagagcctgctggaggccaacatcgccaccgaggtgtgcctgaccgccctggacaccctgagcctgttcaccctggccttcaagaaccagctgctggccgaccacggccacaaccccctgatgaagaaggtgttcgacgtgtacctgtgcttcctgcagaagcaccagagcgagaccgccctgaagaacgtgttcaccgccctgagaagcctgatctacaagttccccagcaccttctacgagggcagagccgacatgtgcgccgccctgtgctacgagatcctgaagtgctgcaacagcaagctgagcagcatcagaaccgaggccagccagctgctgtacttcctgatgagaaacaacttcgactacaccggcaagaagagcttcgtgagaacccacctgcaggtgatcatcagcgtgagccagctgatcgccgacgtggtgggcatcggcggcaccagattccagcagagcctgagcatcatcaacaactgcgccaacagcgacagactgatcaagcacaccagcttcagcagcgacgtgaaggacctgaccaagagaatcagaaccgtgctgatggccaccgcccagatgaaggagcacgagaacgaccccgagatgctggtggacctgcagtacagcctggccaagagctacgccagcacccccgagctgagaaagacctggctggacagcatggccagaatccacgtgaagaacggcgacctgagcgaggccgccatgtgctacgtgcacgtgaccgccctggtggccgagtacctgaccagaaagggcgtgttcagacagggctgcaccgccttcagagtgatcacccccaacatcgacgaggaggccagcatgatggaggacgtgggcatgcaggacgtgcacttcaacgaggacgtgctgatggagctgctggagcagtgcgccgacggcctgtggaaggccgagagatacgagctgatcgccgacatctacaagctgatcatccccatctacgagaagagaagagacttcgagagactggcccacctgtacgacaccctgcacagagcctacagcaaggtgaccgaggtgatgcacagcggcagaagactgctgggcacctacttcagagtggccttcttcggccagcagtaccagttcaccgacagcgagaccgacgtggagggcttcttcgaggacgaggacggcaaggagtacatctacaaggagcccaagctgacccccctgagcgagatcagccagagactgctgaagctgtacagcgacaagttcggcagcgagaacgtgaagatgatccaggacagcggcaaggtgaaccccaaggacctggacagcaagtacgcctacatccaggtgacccacgtgatccccttcttcgacgagaaggagctgcaggagagaaagaccgagttcgagagaagccacaacatcagaagattcatgttcgagatgcccttcacccagaccggcaagagacagggcggcgtggaggagcagtgcaagagaagaaccatcctgaccgccatccactgcttcccctacgtgaagaagagaatccccgtgatgtaccagcaccacaccgacctgaaccccatcgaggtggccatcgacgagatgagcaagaaggtggccgagctgagacagctgtgcagcagcgccgaggtggacatgatcaagctgcagctgaagctgcagggcagcgtgagcgtgcaggtgaacgccggccccctggcctacgccagagccttcctggacgacaccaacaccaagagataccccgacaacaaggtgaagctgctgaaggaggtgttcagacagttcgtggaggcctgcggccaggccctggccgtgaacgagagactgatcaaggaggaccagctggagtaccaggaggagatgaaggccaactacagagagatggccaaggagctgagcgagatcatgcacgagcagatctgccccctggaggagaagaccagcgtgctgcccaacagcctgcacatcttcaacgccatcagcggcacccccaccagcaccatggtgcacggcatgaccagcagcagcagcgtggtgtag

SEQ ID NO: 293135 - DNA, 2010 bp, Artificial Sequence
  derived and/or modified sequence
tgattcaagaaccagctgctggccgaccacggccacaaccccctgatgaagaaggtgttcgacgtgtacctgtgcttcctgcagaagcaccagagcgagaccgccctgaagaacgtgttcaccgccctgagaagcctgatctacaagttccccagcaccttctacgagggcagagccgacatgtgcgccgccctgtgctacgagatcctgaagtgctgcaacagcaagctgagcagcatcagaaccgaggccagccagctgctgtacttcctgatgagaaacaacttcgactacaccggcaagaagagcttcgtgagaacccacctgcaggtgatcatcagcgtgagccagctgatcgccgacgtggtgggcatcggcggcaccagattccagcagagcctgagcatcatcaacaactgcgccaacagcgacagactgatcaagcacaccagcttcagcagcgacgtgaaggacctgaccaagagaatcagaaccgtgctgatggccaccgcccagatgaaggagcacgagaacgaccccgagatgctggtggacctgcagtacagcctggccaagagctacgccagcacccccgagctgagaaagacctggctggacagcatggccagaatccacgtgaagaacggcgacctgagcgaggccgccatgtgctacgtgcacgtgaccgccctggtggccgagtacctgaccagaaagggcgtgttcagacagggctgcaccgccttcagagtgatcacccccaacatcgacgaggaggccagcatgatggaggacgtgggcatgcaggacgtgcacttcaacgaggacgtgctgatggagctgctggagcagtgcgccgacggcctgtggaaggccgagagatacgagctgatcgccgacatctacaagctgatcatccccatctacgagaagagaagagacttcgagagactggcccacctgtacgacaccctgcacagagcctacagcaaggtgaccgaggtgatgcacagcggcagaagactgctgggcacctacttcagagtggccttcttcggccagcagtaccagttcaccgacagcgagaccgacgtggagggcttcttcgaggacgaggacggcaaggagtacatctacaaggagcccaagctgacccccctgagcgagatcagccagagactgctgaagctgtacagcgacaagttcggcagcgagaacgtgaagatgatccaggacagcggcaaggtgaaccccaaggacctggacagcaagtacgcctacatccaggtgacccacgtgatccccttcttcgacgagaaggagctgcaggagagaaagaccgagttcgagagaagccacaacatcagaagattcatgttcgagatgcccttcacccagaccggcaagagacagggcggcgtggaggagcagtgcaagagaagaaccatcctgaccgccatccactgcttcccctacgtgaagaagagaatccccgtgatgtaccagcaccacaccgacctgaaccccatcgaggtggccatcgacgagatgagcaagaaggtggccgagctgagacagctgtgcagcagcgccgaggtggacatgatcaagctgcagctgaagctgcagggcagcgtgagcgtgcaggtgaacgccggccccctggcctacgccagagccttcctggacgacaccaacaccaagagataccccgacaacaaggtgaagctgctgaaggaggtgttcagacagttcgtggaggcctgcggccaggccctggccgtgaacgagagactgatcaaggaggaccagctggagtaccaggaggagatgaaggccaactacagagagatggccaaggagctgagcgagatcatgcacgagcagatctgccccctggaggagaagaccagcgtgctgcccaacagcctgcacatcttcaacgccatcagcggcacccccaccagcaccatggtgcacggcatgaccagcagcagcagcgtggtgtag

SEQ ID NO: 293136 - DNA, 3147 bp, Artificial Sequence
  derived and/or modified sequence
ttttaagaaccagctcctggccgaccatggacataatcctctcatgaaaaaagtttttgatgtctacctgtgttttcttcaaaaacatcagtctgaaacggctttaaaaaatgtcttcactgccttaaggtccttaatttataagtttccctcaacattctatgaagggagagcggacatgtgtgcggctctgtgttacgagattctcaagtgctgtaactccaagctgagctccatcaggacggaggcctcccagctgctctacttcctgatgaggaacaactttgattacactggaaagaagtcctttgtccggacacatttgcaagtcatcatatctgtcagccagctgatagcagacgttgttggcattgggggaaccagattccagcagtccctgtccatcatcaacaactgtgccaacagtgaccggcttattaagcacaccagcttctcctctgatgtgaaggacttaaccaaaaggatacgcacggtgctaatggccaccgcccagatgaaggagcatgagaacgacccagagatgctggtggacctccagtacagcctggccaaatcctatgccagcacgcccgagctcaggaagacgtggctcgacagcatggccaggatccatgtcaaaaatggcgatctctcagaggcagcaatgtgctatgtccacgtaacagccctagtggcagaatatctcacacggaaaggcgtgtttagacaaggatgcaccgccttcagggtcattaccccaaacatcgacgaggaggcctccatgatggaagacgtggggatgcaggatgtccatttcaacgaggatgtgctgatggagctccttgagcagtgcgcagatggactctggaaagccgagcgctacgagctcatcgccgacatctacaaacttatcatccccatttatgagaagcggagggattttgagaggctggcccatctgtatgacacgctgcaccgggcctacagcaaagtgaccgaggtcatgcactcgggccgcaggcttctggggacctacttccgggtagccttcttcgggcagcaataccagtttacagacagtgaaacagatgtggagggattctttgaagatgaagatggaaaggagtatatttacaaggaacccaaactcacaccgctgtcggaaatttctcagagactccttaaactgtactcggataaatttggttctgaaaatgtcaaaatgatacaggattctggcaaggtcaaccctaaggatctggattctaagtatgcatacatccaggtgactcacgtcatccccttctttgacgaaaaagagttgcaagaaaggaaaacagagtttgagagatcccacaacatccgccgcttcatgtttgagatgccatttacgcagaccgggaagaggcagggcggggtggaagagcagtgcaaacggcgcaccatcctgacagccatacactgcttcccttatgtgaagaagcgcatccctgtcatgtaccagcaccacactgacctgaaccccatcgaggtggccattgacgagatgagtaagaaggtggcggagctccggcagctgtgctcctcggccgaggtggacatgatcaaactgcagctcaaactccagggcagcgtgagtgttcaggtcaatgctggcccactagcatatgcgcgagctttcttagatgatacaaacacaaagcgatatcctgacaataaagtgaagctgcttaaggaagttttcaggcaatttgtggaagcttgcggtcaagccttagcggtaaacgaacgtctgattaaagaagaccagctcgagtatcaggaagaaatgaaagccaactacagggaaatggcgaaggagctttctgaaatcatgcatgagcagatctgccccctggaggagaagacgagcgtcttaccgaattcccttcacatcttcaacgccatcagtgggactccaacaagcacaatggttcacgggatgaccagctcgtcttcggtcgtgtgattacatctcatggcccgtgtgtggggacttgctttgtcatttgcaaactcaggatgctttccaaagccaatcactggggagaccgagcacagggaggaccaaggggaaggggagagaaaggaaataaagaacaacgttatttcttaacagactttctataggagttgtaagaaggtgcacatatttttttaaatctcactggcaatattcaaagttttcattgtgtcttaacaaaggtgtggtagacactcttgagctggacttagattttattcttccttgcagagtagtgttagaatagatggcctacagaaaaaaaaggttctgggatctacatggcagggagggctgcactgacattgatgcctgggggaccttttgcctcgaggctgagctggaaaatcttgaaaatattttttttttcctgtggcacattcaggttgaatacaagaactatttttgtgactagtttttgatgacctaagggaactgaccattgtaatttttgtaccagtgaaccaggagatttagtgcttttatattcatttccttgcatttaagaaaatatgaaagcttaaggaattatgtgagcttaaaactagtcaagcagtttagaaccaaaggcctatattaataaccgcaactatgctgaaaagtacaaagtagtacagtatattgttatgtacatatcattgttaatacagtcctggcattctgtacatatatgtattacatttctacatttttaatactcacatgggcttatgcattaagtttaattgtgataaatttgtgctgttccagtatatgcaatacactttaatgttttattcttgtacataaaaatgtgcaatatggagatgtatacagtctttactatattaggtttataaacagttttaagaatttcatccttttgccaaaatggtggagtatgtaattggtaaatcataaatcctgtggtgaatggtggtgtactttaaagctgtcaccatgttatattttcttttaagactttaatttagtaattttatatttgggaaaataaaggtttttaattttatttaactggaatcactgccctgctgtaattaaacattctgtaccacatctgtattaaaaagacattgctgaccatt

SEQ ID NO: 293137 - DNA, 2175 bp, Artificial Sequence
  derived and/or modified sequence
atgcatgcgaggctacagcagttgggatctctggacaactctctcaccttcaatcatagttatggacactctgacgccgatgttttacaccagagtctgttagaagccaacattgccaccgaggtgtgtttgaccgccctcgacacgctgagcctctttaccctggctttcaagaaccagctgctggcagaccacggtcataaccctctcatgaagaaggtgttcgatgtctatctttgcttcctccagaaacaccagtctgaaactgctcttaagaacgtattcactgccctgcggagtctcatttacaagttcccttcgactttctatgaggggagagcagatatgtgcgccgccctgtgctacgaaattctgaagtgttgcaacagcaagctctctagcatcaggactgaggcctcgcagcttctctactttctcatgcgtaacaacttcgactacacagggaagaagtcttttgtgcgaactcacctgcaggtgatcatctccgtctctcaactcattgcagatgtagtggggatcggcggtacccggtttcagcagtccttatccatcatcaacaattgtgccaatagtgaccgtctgattaagcatacatcttttagttctgatgtgaaggacctgaccaaaaggataaggaccgttttgatggcaacagcccagatgaaggagcacgagaacgaccccgaaatgctggtcgacctgcagtactcactcgcaaagtcctacgcttctacaccagaactaaggaagacatggctcgactccatggccaggattcacgtcaagaatggagacctctcagaggcagcaatgtgctacgtccacgtgaccgcacttgtggcagaatacctgacccgaaagggggttttccgccagggctgcacagccttccgtgtaattactcctaatatagatgaagaagcatcaatgatggaggacgttggtatgcaagacgtgcattttaatgaagatgtattgatggaactgctcgagcagtgtgccgatgggctctggaaggctgaaagatacgaactaattgcggatatctacaaactgataatccccatttacgagaaaaggagagatttcgaacgattggcccacctgtacgataccctccatcgagcctactctaaagtgacagaggttatgcattccgggcgcaggttgcttggtacatatttcagggttgcattcttcggccagcagtaccagtttacagactccgagaccgacgtggaaggatttttcgaagatgaggacggcaaggaatacatttataaagaacctaagctcacacccctgagcgaaatcagtcaacgacttttgaagttgtattcagacaaatttgggagtgagaatgtgaaaatgatccaggattcaggcaaggtgaaccccaaagatctggacagcaagtacgcctatatacaggttacccatgtgattccgttctttgatgagaaagaactccaggagagaaaaacggagttcgagcggagccataatattagacgcttcatgtttgagatgccctttacccagacgggcaagcgccagggtggggtggaagaacagtgcaaacgccggaccatcctgactgccattcattgctttccttatgttaaaaagcgtatccccgtgatgtaccagcaccacaccgacctgaacccgatagaagttgctatcgatgagatgtcaaagaaagtggctgagttgaggcagctctgtagcagtgcagaagttgacatgatcaagctccagctcaaactgcaaggctctgtctcagtgcaggtcaacgctgggccgctcgcatatgccagagcctttttggatgacaccaacaccaaaagatacccagataataaggtgaaactgctgaaggaagtcttccgccagtttgtcgaggcttgtgggcaagcactggcagtgaacgagagactcattaaagaagaccagttggagtatcaggaagagatgaaggcgaactaccgagagatggccaaggaattgtctgaaattatgcatgaacaaatctgtcccctggaagaaaaaacctctgtactccctaattctctgcacattttcaacgccatttccggcactcccacctcaactatggtacatgggatgacctctagctcaagcgttgtgtag

SEQ ID NO: 293138 - DNA, 2010 bp, Artificial Sequence
  derived and/or modified sequence
tagtttaaaaaccagctcctcgccgaccatggccacaatcctctgatgaagaaagtcttcgacgtatatctgtgtttcctgcagaagcaccagtccgaaacagcccttaaaaatgttttcactgccttgcgctccctgatctataagttcccttccacattctatgaaggcagggctgacatgtgtgccgccctatgttacgagattctgaagtgctgcaattctaaattgtcttccatccggaccgaagcaagtcagctactatattttctgatgagaaacaactttgactatacaggcaaaaaaagttttgtccggacacacctccaggtaatcatctctgtatctcagctgatcgcagatgtggttggaattgggggtaccagatttcagcagtctcttagcattatcaataactgtgcaaattccgatcggctgattaaacacacgtccttttctagcgatgtgaaagacctaaccaagcgcataagaacagtgctgatggccactgcccagatgaaggaacatgaaaatgatcctgagatgttagtcgacctgcagtactctctggcgaagagctacgctagcacacctgagttgcgtaaaacttggctggatagtatggccaggattcacgttaaaaacggagacctgagcgaggcagccatgtgctacgtccacgtgactgccctggtggcggagtaccttacccgcaagggagtgtttagacaaggatgcacagcattccgcgtgatcacccctaacattgatgaggaagcttctatgatggaggatgtcgggatgcaggatgtccattttaatgaagacgtcctaatggaactgctggagcaatgtgctgacggcttgtggaaagcagagcgttacgagctaatagccgatatatacaagctgattatccctatctatgaaaaaagacgcgattttgagcggctggcacacctgtacgatacacttcacagggcttacagcaaagtgacagaggtgatgcacagtggccgccggcttctaggaacttattttcgtgtggcttttttcgggcagcagtaccaattcaccgactccgaaacggatgtcgaagggttcttcgaggacgaggacggaaaggaatacatctacaaggagccaaaattgacccctctctctgagatctctcagcgtctcctgaaactatacagcgacaagttcgggtcagaaaacgtgaagatgatccaagactccggaaaggttaaccctaaagatttagacagtaagtacgcctacattcaggtcacacacgttatacccttctttgatgagaaagaactgcaagagcggaagacagagttcgaaagatcacacaacatcaggcgatttatgtttgaaatgccgtttacccagacaggcaaacggcaggggggtgttgaggagcagtgtaagcggaggactattctcacggccatacactgtttcccctatgtgaagaagagaattcctgttatgtaccagcaccacacggacttaaatccaatcgaggtagccattgacgagatgtctaagaaagtggccgagttgcgccagctgtgttccagtgctgaggttgacatgatcaaattgcagctcaagctgcaaggctcagtttcggtccaggttaatgctggcccccttgcctacgctcgagcgtttctggatgatactaacacaaaacgctaccccgataacaaggtaaagctgttgaaagaagtgtttaggcagtttgtggaggcatgtggccaggctctagcagtaaatgaaagattgatcaaggaggaccagttggagtatcaggaagagatgaaggcgaattaccgcgagatggcgaaggagctgagtgagattatgcacgagcagatctgccctctagaggagaaaacaagcgttctgcccaatagcttacacattttcaatgctatctccggtactccaacttcaactatggtgcatgggatgaccagcagctcatctgtggtgtag

SEQ ID NO: 293139 - DNA, 2175 bp, Artificial Sequence
  derived and/or modified sequence
atgcacgcccggctgcagcagctgggcagcctggacaacagcctgaccttcaaccacagctatggccacagtgatgctgatgtgctgcaccagagcctgctggaggccaacatcgccacagaggtgtgcctgacagccctggacaccctgagcctcttcaccctggccttcaagaaccagctgctggccgaccacggccacaaccccctgatgaagaaggtgtttgatgtgtacctgtgcttcctgcagaagcaccagagcgagacagccctgaagaatgtgttcaccgccctgcggagcctcatctacaagttccccagcaccttctatgagggccgggctgacatgtgtgccgccctgtgctatgagatcctgaagtgctgcaacagcaagctgagcagcatcagaacagaggccagccagctgctgtacttcctgatgaggaacaactttgactacaccgggaagaagagctttgtgaggacccacctgcaggtgatcatctctgtgtcccagctgattgctgatgtggtgggcatcggcggcacccgcttccagcagagcctgagcatcatcaacaactgtgccaacagcgacaggctcatcaagcacaccagcttcagcagtgatgtgaaggacctgaccaagaggatcagaacagtgctgatggccacagcccagatgaaggagcatgaaaatgaccctgagatgctggtggacctgcagtacagcctggccaagagctatgccagcaccccagagctgaggaagacctggctggacagcatggcccgcatccacgtgaagaatggagacctgtctgaggccgccatgtgctacgtgcacgtgacagccctggtggccgagtacctgaccaggaagggcgtcttccggcagggctgcacagccttccgggtcatcacccccaacattgatgaggaggcctccatgatggaggatgtgggcatgcaggatgtgcacttcaatgaagatgtgctgatggagctgctggagcagtgtgctgatggcctgtggaaggccgagagatatgagctgattgctgacatctacaagctgatcatccccatctatgagaagagaagagactttgagcggctggcccacctgtatgacaccctgcaccgggcctacagcaaggtgacagaggtgatgcacagcggccgccgcctgctgggcacctacttccgggtggccttcttcggccagcagtaccagttcacagacagcgagacagatgtggagggcttctttgaagatgaagatggcaaggagtacatctacaaggagcccaagctgacccccctgtctgagatcagccagaggctgctgaagctgtacagcgacaagtttggaagtgaaaatgtgaagatgatccaggacagcggcaaggtgaaccccaaggacctggacagcaaatatgcctacatccaggtgacccacgtgatccccttctttgatgagaaggagctgcaggagaggaagacagaatttgagaggagccacaacatccgccgcttcatgtttgagatgcccttcacccagacaggcaagaggcagggcggcgtggaggagcagtgcaagaggaggaccatcctgacagccatccactgcttcccctacgtgaagaagagaattcctgtgatgtaccagcaccacacagacctgaaccccatcgaggtggccattgatgagatgagcaagaaggtggccgagctgcggcagctgtgcagcagcgctgaggtggacatgatcaagctgcagctgaagctgcagggctctgtgtctgtgcaggtgaatgccggccccctggcctatgcccgggccttcctggatgacaccaacaccaagcgctacccagacaacaaggtgaagctgctgaaggaggtgttccggcagtttgtggaggcctgtggccaggccctggccgtgaatgaaagactcatcaaggaggaccagctggagtaccaggaggagatgaaggccaactaccgggagatggccaaggagctgtctgagatcatgcatgagcagatctgccccctggaggagaagacctctgtgctgcccaacagcctgcacatcttcaatgccatcagcggcacccccaccagcaccatggtgcacggcatgaccagcagcagctctgtggtgtag

SEQ ID NO: 293140 - DNA, 2010 bp, Artificial Sequence
  derived and/or modified sequence
tgattcaagaaccagctgctggccgaccacggccacaaccccctgatgaagaaggtgtttgatgtgtacctgtgcttcctgcagaagcaccagagcgagacagccctgaagaatgtgttcaccgccctgcggagcctcatctacaagttccccagcaccttctatgagggccgggctgacatgtgtgccgccctgtgctatgagatcctgaagtgctgcaacagcaagctgagcagcatcagaacagaggccagccagctgctgtacttcctgatgaggaacaactttgactacacaggcaagaagagctttgtgaggacccacctgcaggtgatcatctctgtgtcccagctgattgctgatgtggtgggcattggaggcacccgcttccagcagagcctgagcatcatcaacaactgtgccaacagcgacaggctcatcaagcacaccagcttcagcagtgatgtgaaggacctgaccaagaggatcagaacagtgctgatggccacagcccagatgaaggagcatgaaaatgaccctgagatgctggtggacctgcagtacagcctggccaagagctatgccagcaccccagagctgaggaagacctggctggacagcatggcccgcatccacgtgaagaatggagacctgtctgaggccgccatgtgctacgtgcacgtgacagccctggtggccgagtacctgaccaggaaaggagtcttccggcagggctgcacagccttccgggtcatcacccccaacattgatgaggaggcctccatgatggaggatgtgggcatgcaggatgtgcacttcaatgaagatgtgctgatggagctgctggagcagtgtgctgatggcctgtggaaggccgagagatatgagctgattgctgacatctacaagctgatcatccccatctatgagaagaggcgggactttgagcggctggcccacctgtatgacaccctgcaccgggcctacagcaaggtgacagaggtgatgcacagcggccggcggctgctgggcacctacttccgggtggccttcttcggccagcagtaccagttcacagattctgaaacagatgtggagggcttctttgaagatgaagatggcaaggagtacatctacaaggagcccaagctgacccccctgtctgagatcagccagaggctgctgaagctgtacagcgacaagtttggaagtgaaaatgtgaagatgatccaggacagcggcaaggtgaaccccaaggacctggacagcaaatatgcctacatccaggtgacccacgtgatccccttctttgatgagaaggagctgcaggagaggaagacagaatttgagaggagccacaacatccgccgcttcatgtttgagatgcccttcacccagacaggcaagaggcagggcggcgtggaggagcagtgcaagaggaggaccatcctgacagccatccactgcttcccctacgtgaagaagagaattcctgtgatgtaccagcaccacacagacctgaaccccatcgaggtggccattgatgagatgagcaagaaggtggccgagctgcggcagctgtgcagcagcgctgaggtggacatgatcaagctgcagctgaagctgcagggctctgtgtctgtgcaggtgaatgccggccccctggcctatgcccgggccttcctggatgacaccaacaccaagcgctacccagacaacaaggtgaagctgctgaaggaggtgttccggcagtttgtggaggcctgtggccaggccctggccgtgaatgaaagactcatcaaggaggaccagctggagtaccaggaggagatgaaggccaactaccgggagatggccaaggagctgtctgagatcatgcatgagcagatctgccccctggaggagaagacctctgtgctgcccaacagcctgcacatcttcaatgccatcagcggcacccccaccagcaccatggtgcacggcatgaccagcagcagctctgtggtgtag

SEQ ID NO: 293141 - DNA, 2175 bp, Artificial Sequence
  derived and/or modified sequence
atgcacgcccggctgcagcagctgggcagcctggacaacagcctgacgttcaaccactcttacggtcactctgatgctgatgtcctccaccagtcactgcttgaagcgaatatcgcgactgaggtttgcctcacagctttggatactttgtcactgttcactctggcttttaagaatcagctgcttgctgatcatgggcacaatccactcatgaagaaagtctttgacgtgtacctgtgctttctgcagaagcatcagtctgagacagcactcaagaacgtttttacggctcttcggtcactaatctataaattccctagcacgttctatgaaggtcgcgcagatatgtgtgccgccctctgttatgaaatcctgaaatgttgcaattctaagctcagcagtataagaaccgaggcaagtcagctcctgtattttttaatgaggaacaatttcgattacactggaaaaaaatctttcgtcagaacacacctgcaggtgattatcagcgtgtcacagctgatcgccgacgtcgtcggtatcggaggcactcggtttcagcagtccctgtctatcatcaacaattgcgccaactccgacagactgattaaacacacatctttctcttcagacgtcaaagatctcacaaaacgtattcggacggtgctgatggccaccgcacagatgaaagagcatgagaatgaccccgagatgttagttgacctgcaatatagcctggcgaaatcttatgcatcaacgcctgagcttagaaaaacatggctggatagcatggccagaattcacgtcaagaacggggacttaagcgaagctgccatgtgctacgtccacgtcacagcattagtggctgagtatctaacaagaaagggcgtatttcgtcagggatgtacagcgtttagggtaatcacccccaatattgatgaagaagcctctatgatggaagatgtgggtatgcaggatgtacacttcaatgaagacgttcttatggaattactcgagcaatgtgctgatggcctgtggaaagccgagcgctatgaactgattgccgatatctacaagctgatcatcccaatctacgagaagcggcgtgattttgaacgtctggcgcacctgtatgacacgctgcatagagcctactcaaaagttaccgaggtgatgcattctggccgccgcttattgggtacttactttcgtgtggccttcttcggtcagcaataccagttcaccgactctgagaccgatgtggagggatttttcgaggacgaagatggaaaggaatacatatacaaagagcccaagcttacgccattgagcgaaattagccagagactgcttaaattgtactcagacaagtttggcagcgagaacgtgaagatgattcaggacagcggtaaggtgaaccctaaggacctcgactctaagtacgcctatattcaggtcacgcacgttatcccattctttgacgagaaggagctgcaagagcgtaagactgagttcgaacgctcgcacaatataagacgtttcatgttcgagatgccgttcacccagaccggcaagagacagggcggggtagaggagcaatgcaaacggcgcacgattttaaccgcaatccactgctttccatacgtcaaaaagcgcattcccgtgatgtaccaacaccacactgacctaaaccctattgaggtagccatcgatgagatgtcaaagaaagttgctgaattgcgccagttgtgttcttcggccgaggtagatatgattaaactccagttgaaactccagggctccgtctcagtgcaggttaacgccggaccactggcatacgctcgagctttcctcgacgatacaaacaccaagagatacccagacaataaagtgaagctgctgaaggaagtctttcgccagttcgtcgaggcatgcggtcaagctctcgcggtgaacgaaagactcatcaaggaagatcaattggaataccaggaagaaatgaaggctaactacagagagatggctaaggaactctcagaaatcatgcatgagcagatctgccctctggaagagaagactagcgtgctgcccaatagcctgcacatattcaacgcaataagtggcacccccacatcgacaatggtgcatgggatgactagttctagttccgtggtctag

SEQ ID NO: 293142 - DNA, 2010 bp, Artificial Sequence
  derived and/or modified sequence
tgattcaagaaccagctgctggccgaccacggccacaaccccctgatgaagaaagtctttgacgtctacctatgctttctgcagaagcaccagtccgaaaccgcactcaaaaatgtgttcactgccctccgctccttaatctacaagtttccgtcgacattttacgaaggaagagcagacatgtgcgccgcactgtgttacgaaattttaaaatgctgtaattcaaaactttcatctatcaggacggaggcatcacaacttctgtatttcctgatgagaaataatttcgattacaccgggaagaaaagcttcgtaaggactcatctccaggtgataatcagtgtgtcgcagctcatcgcagatgtcgtgggaattggaggaaccagattccagcagtctctgagcattatcaataactgcgctaactctgacaggctcattaagcacacaagcttctcatctgatgtaaaggatttgacgaagcggatccgcactgtgctcatggcaactgcacagatgaaggaacacgagaatgaccccgagatgctggttgacctgcagtactctctcgctaagtcttacgcatccacacctgagctgcgaaagacctggctagatagcatggccagaatccacgtgaagaatggcgacctatccgaggccgctatgtgttacgtgcacgtcactgcgctagtcgccgaatatttgacccgaaagggcgtgtttcgtcagggctgcacagcatttcgggtcatcaccccgaacatcgacgaagaagcctccatgatggaggacgtgggcatgcaagacgtgcattttaatgaagacgttctgatggagctgcttgagcagtgcgccgatgggctctggaaagcagagaggtatgaattaattgccgacatttacaagctgattatccctatttacgagaaaaggagagacttcgagaggctagcgcacctgtatgacacactgcaccgggcctattctaaggttaccgaagtcatgcacagtgggcgtcggctgctgggcacatattttagggtggcattctttgggcaacagtaccagttcacagactcagaaactgatgtggaaggcttcttcgaggacgaagatggcaaggaatacatctacaaggagcctaagctcacacccttgagcgaaatatctcaacgccttctcaagctctactccgacaagttcgggagcgaaaacgtcaagatgattcaggacagtggcaaagtcaatcctaaggatctggattctaagtacgcctatattcaggtgacacatgtaatcccgttcttcgacgagaaggagctgcaggagagaaaaaccgagtttgagaggtctcataatatcaggaggttcatgttcgagatgccattcacccagaccggcaagcgccaaggtggcgtggaagagcaatgtaagcgccgaactattctcacagccatccactgcttcccctatgtcaagaagagaatcccagtgatgtatcagcatcacaccgacctgaaccctatagaagtcgccattgatgaaatgtccaagaaagtggcagagctgaggcagctatgctcctccgctgaagtggacatgatcaaactccagttaaagctgcagggctcagtatctgttcaggttaacgcaggccctctcgcttacgccagagccttcctggatgatacaaacactaaacgttatcctgataacaaagtcaaactacttaaggaggtgttcaggcagttcgtagaagcctgcggccaggccttggccgtaaacgagcgcctcataaaagaggatcaacttgagtatcaagaagagatgaaggccaattatcgggaaatggctaaggagcttagcgagatcatgcatgagcaaatctgtcccctggaagagaagacctcagtccttcctaattccctacacatcttcaacgccatctcaggcacaccaacttctaccatggtgcacggcatgacatcatcatcatctgtggtgtag

SEQ ID NO: 293143 - DNA, 2175 bp, Artificial Sequence
  derived and/or modified sequence
atgcatgccagactgcaacagctggggtcactggacaattctcttactttcaaccacagctacggccacagcgacgccgacgtgttgcaccagagccttctggaggctaatatagcaacagaagtgtgtcttacagcccttgacacactgagtctgttcacacttgcttttaaaaaccagctgctggcggatcatggtcacaaccccctgatgaagaaggtcttcgacgtctacttgtgtttcctgcaaaagcaccagtctgagaccgcgctgaagaatgtgtttacagccctccgctctctgatatacaagtttcctagcaccttctatgaagggagagccgacatgtgtgccgctttgtgttatgagatacttaagtgctgtaattcaaaattatcctcaattaggaccgaggcatcccagctactgtactttcttatgcggaacaactttgattacactgggaaaaagtcgttcgtacgcacccatttgcaggtcatcattagcgtgagtcagctgatagcggatgtggtgggcatcggtggcacccgctttcagcagtcactcagcataatcaacaattgtgccaactccgatcggctgattaaacacacatccttctccagcgatgtgaaggaccttaccaagaggatcaggaccgttttgatggcgaccgcacagatgaaggagcacgagaatgaccccgaaatgttggttgacttacagtatagtttggcaaagtcatatgcctccacccctgagctgcgtaaaacgtggttggactccatggctcgcatccacgtcaagaatggagatctgagcgaagcagccatgtgctacgtccacgtgaccgccttggtagccgagtatctgacacgcaagggagtgtttagacagggctgcaccgcttttagagtgatcactccaaatatagatgaagaagccagcatgatggaggatgtcggcatgcaggatgtccacttcaacgaagacgttttgatggagctgctggaacaatgtgcagatgggctctggaaagcagaaagatatgagcttatagccgatatctataaactgatcattcccatctacgaaaaaaggagggattttgagaggctcgctcatctttacgacacgcttcaccgcgcttattcaaaggtgacagaggtgatgcactcggggaggaggctgctgggtacctacttccgtgttgccttctttggccagcagtaccagttcactgattcagagaccgatgtggagggcttcttcgaagacgaggacggaaaggagtacatttataaagagcccaaactcactccactcagcgagatctctcagaggctcctcaaactttatagtgacaagtttggcagcgagaacgtcaagatgatccaggactccggaaaggtgaacccaaaggatctggattccaagtatgcatacattcaggtgacccatgtgatccccttcttcgatgagaaggaattacaggagcggaaaaccgagttcgagcgcagccacaacatccgcagatttatgttcgagatgccatttacgcagactgggaaacggcagggcggtgtggaggaacagtgcaaaagaagaaccatcctaactgctattcattgtttcccttacgtgaagaagcgaatccctgtgatgtaccaacatcatacagatttgaatcctattgaagtcgccattgacgaaatgagcaagaaggtggccgaactcaggcagttgtgctcttccgctgaagtggacatgataaaattacagctgaagctgcagggcagcgttagtgtgcaagtgaatgctggaccgcttgcctacgctcgtgcgtttctggacgacaccaatactaagaggtatccggacaataaagtcaagctcttaaaggaggtgtttcgccaattcgtcgaggcttgcggccaggcattagcagtcaatgaaaggctgatcaaagaagatcagctagagtatcaggaagagatgaaggctaattatcgagagatggcaaaggaactgagtgagatcatgcacgagcaaatttgccctttggaagagaaaacgtctgtactgcccaactctctgcacatcttcaacgccatttcagggactcctacttccaccatggtgcacggcatgacctcgagtagctccgtggtttag

SEQ ID NO: 293144 - DNA, 2010 bp, Artificial Sequence
  derived and/or modified sequence
tgattcaagaatcagttgcttgctgaccatggtcacaaccctcttatgaagaaggtgttcgatgtctatctgtgcttcctccagaagcaccagagtgagacagcactgaaaaacgtcttcacagccttaagatccttgatatataaatttcctagcaccttctatgaaggtcgcgctgacatgtgtgccgcactttgctacgaaatcctgaagtgctgtaattcgaaactgtccagcattcgtaccgaggctagccagctcttatattttcttatgcgaaacaatttcgattatacaggtaaaaaaagttttgtgcgaacccatctgcaagtgatcattagcgtctctcaactcatagccgacgtagtgggcatagggggaacgcgcttccagcagagcctgtccataatcaacaactgtgcaaattccgataggttgatcaagcacacgtctttctcctctgatgtcaaggatctgactaaaagaatccggaccgtgctcatggccactgcccagatgaaggagcacgagaacgatccagaaatgctggtcgaccttcagtacagtctcgccaagtcttatgcctcaacacctgaactgagaaagacatggttagattccatggcgaggatccatgtgaaaaatggcgatttgagcgaggcggcaatgtgttatgtgcacgtgacggccttagtggctgagtatctgactcgaaaaggggtcttccgccaggggtgtacagctttccgtgtcatcacacccaacattgatgaagaggccagcatgatggaagacgtgggtatgcaggacgtgcatttcaatgaagacgtgctgatggagttgctcgaacaatgtgccgacggcctgtggaaagccgagcgctacgagctgatcgcagatatttataagctgattatccccatctatgaaaaaagaagagatttcgagaggctggcccacttgtacgataccctgcatcgtgcctacagcaaagtgaccgaggtcatgcacagcggtaggagactgttggggacatacttcagggtagcttttttcggacagcagtatcaattcaccgatagcgagacggacgttgaggggtttttcgaggacgaagacggcaaagagtacatctataaggagcccaagctcactcccctgtcagagatctctcagcgcctgctgaagttgtactccgataaattcgggagcgaaaacgtaaaaatgatacaggattccggcaaagtaaaccccaaggacttggattcaaagtatgcttacatccaagttacccacgttattcctttctttgatgaaaaggagctccaggagcgaaagacagaatttgaaagatcccacaacattcgcagatttatgttcgagatgccctttacgcagacaggaaaacgccaaggtggtgtggaggaacaatgtaaaagacgcaccattctgaccgcgatccattgcttcccttatgtgaagaaacggatcccggttatgtaccaacaccacacagacctgaatcctatagaggttgccatcgatgagatgtccaaaaaagtcgccgagctcagacaactgtgttcaagcgccgaggtcgacatgatcaagctccagctcaagttacaaggcagtgtgagtgttcaggtcaacgctggtccactcgcctacgcccgtgcctttctggacgacaccaacaccaaacgttaccctgataacaaagttaagctacttaaggaggttttccggcaattcgtcgaagcgtgtgggcaggctctggccgtgaacgagcgcctgattaaggaggaccagctggaatatcaggaggaaatgaaggcaaattatagagagatggcaaaagagctatctgagatcatgcatgagcaaatttgccccctggaagagaagacatcagtgctgccaaactctctgcacatctttaacgcgatcagtgggacccctacgtctactatggtccacggcatgacctcttcatccagcgtggtatag

SEQ ID NO: 293145 - protein, 2093 aa, Artificial Sequence
  derived and/or modified sequence
MSQPPLLPASAETRKFTRALSKPGTAAELRQSVSEVVRGSVLLAKPKLIEPLDYENVIVQKKTQILNDCLREMLLFPYDDFQTAILRRQGRYICSTVPAKAEEEAQSLFVTECIKTYNSDWHLVNYKYEDYSGEFRQLPNKVVKLDKLPVHVYEVDEEVDKDEDAASLGSQKGGITKHGWLYKGNMNSAISVTMRSFKRRFFHLIQLGDGSYNLNFYKDEKISKEPKGSIFLDSCMGVVQNNKVRRFAFELKMQDKSSYLLAADSEVEMEEWITILNKILQLNFEAAMQEKRNGDSHEDDEQSKLEGSGSGLDSYLPELAKSAREAEIKLKSESRVKLFYLDPDAQKLDFSSAEPEVKSFEEKFGKRILVKCNDLSFNLQCCVAENEEGPTTNVEPFFVTLSLFDIKYNRKISADFHVDLNHFSVRQMLATTSPALMNGSGQSPSVLKGILHEAAMQYPKQGIFSVTCPHPDIFLVARIEKVLQGSITHCAEPYMKSSDSSKVAQKVLKNAKQACQRLGQYRMPFAWAARTLFKDASGNLDKNARFSAIYRQDSNKLSNDDMLKLLADFRKPEKMAKLPVILGNLDITIDNVSSDFPNYVNSSYIPTKQFETCSKTPITFEVEEFVPCIPKHTQPYTIYTNHLYVYPKYLKYDSQKSFAKARNIAICIEFKDSDEEDSQPLKCIYGRPGGPVFTRSAFAAVLHHHQNPEFYDEIKIELPTQLHEKHHLLLTFFHVSCDNSSKGSTKKRDVVETQVGYSWLPLLKDGRVVTSEQHIPVSANLPSGYLGYQELGMGRHYGPEIKWVDGGKPLLKISTHLVSTVYTQDQHLHNFFQYCQKTESGAQALGNELVKYLKSLHAMEGHVMIAFLPTILNQLFRVLTRATQEEVAVNVTRVIIHVVAQCHEEGLESHLRSYVKYAYKAEPYVASEYKTVHEELTKSMTTILKPSADFLTSNKLLKYSWFFFDVLIKSMAQHLIENSKVKLLRNQRFPASYHHAVETVVNMLMPHITQKFRDNPEASKNANHSLAVFIKRCFTFMDRGFVFKQINNYISCFAPGDPKTLFEYKFEFLRVVCNHEHYIPLNLPMPFGKGRIQRYQDLQLDYSLTDEFCRNHFLVGLLLREVGTALQEFREVRLIAISVLKNLLIKHSFDDRYASRSHQARIATLYLPLFGLLIENVQRINVRDVSPFPVNAGMTVKDESLALPAVNPLVTPQKGSTLDNSLHKDLLGAISGIASPYTTSTPNINSVRNADSRGSLISTDSGNSLPERNSEKSNSLDKHQQSSTLGNSVVRCDKLDQSEIKSLLMCFLYILKSMSDDALFTYWNKASTSELMDFFTISEVCLHQFQYMGKRYIARTGMMHARLQQLGSLDNSLTFNHSYGHSDADVLHQSLLEANIATEVCLTALDTLSLFTLAFKNQLLADHGHNPLMKKVFDVYLCFLQKHQSETALKNVFTALRSLIYKFPSTFYEGRADMCAALCYEILKCCNSKLSSIRTEASQLLYFLMRNNFDYTGKKSFVRTHLQVIISVSQLIADVVGIGGTRFQQSLSIINNCANSDRLIKHTSFSSDVKDLTKRIRTVLMATAQMKEHENDPEMLVDLQYSLAKSYASTPELRKTWLDSMARIHVKNGDLSEAAMCYVHVTALVAEYLTRKEAVQWEPPLLPHSHSACLRRSRGGVFRQGCTAFRVITPNIDEEASMMEDVGMQDVHFNEDVLMELLEQCADGLWKAERYELIADIYKLIIPIYEKRRDFERLAHLYDTLHRAYSKVTEVMHSGRRLLGTYFRVAFFGQGFFEDEDGKEYIYKEPKLTPLSEISQRLLKLYSDKFGSENVKMIQDSGKVNPKDLDSKYAYIQVTHVIPFFDEKELQERKTEFERSHNIRRFMFEMPFTQTGKRQGGVEEQCKRRTILTAIHCFPYVKKRIPVMYQHHTDLNPIEVAIDEMSKKVAELRQLCSSAEVDMIKLQLKLQGSVSVQVNAGPLAYARAFLDDTNTKRYPDNKVKLLKEVFRQFVEACGQALAVNERLIKEDQLEYQEEMKANYREMAKELSEIMHEQICPLEEKTSVLPNSLHIFNAISGTPTSTMVHGMTSSSSVV

SEQ ID NO: 293146 - protein, 2102 aa, Artificial Sequence
  derived and/or modified sequence
MSQPPLLPASAETRKFTRALSKPGTAAELRQSVSEVVRGSVLLAKPKLIEPLDYENVIVQKKTQILNDCLREMLLFPYDDFQTAILRRQGRYICSTVPAKAEEEAQSLFVTECIKTYNSDWHLVNYKYEDYSGEFRQLPNKVVKLDKLPVHVYEVDEEVDKDEDAASLGSQKGGITKHGWLYKGNMNSAISVTMRSFKRRFFHLIQLGDGSYNLNFYKDEKISKEPKGSIFLDSCMGVVQNNKVRRFAFELKMQDKSSYLLAADSEVEMEEWITILNKILQLNFEAAMQEKRNGDSHEDDEQSKLEGSGSGLDSYLPELAKSAREAEIKLKSESRVKLFYLDPDAQKLDFSSAEPEVKSFEEKFGKRILVKCNDLSFNLQCCVAENEEGPTTNVEPFFVTLSLFDIKYNRKISADFHVDLNHFSVRQMLATTSPALMNGSGQSPSVLKGILHEAAMQYPKQGIFSVTCPHPDIFLVARIEKVLQGSITHCAEPYMKSSDSSKVAQKVLKNAKQACQRLGQYRMPFAWAARTLFKDASGNLDKNARFSAIYRQDSNKLSNDDMLKLLADFRKPEKMAKLPVILGNLDITIDNVSSDFPNYVNSSYIPTKQFETCSKTPITFEVEEFVPCIPKHTQPYTIYTNHLYVYPKYLKYDSQKSFAKARNIAICIEFKDSDEEDSQPLKCIYGRPGGPVFTRSAFAAVLHHHQNPEFYDEIKIELPTQLHEKHHLLLTFFHVSCDNSSKGSTKKRDVVETQVGYSWLPLLKDGRVVTSEQHIPVSANLPSGYLGYQELGMGRHYGPEIKWVDGGKPLLKISTHLVSTVYTQDQHLHNFFQYCQKTESGAQALGNELVKYLKSLHAMEGHVMIAFLPTILNQLFRVLTRATQEEVAVNVTRVIIHVVAQCHEEGLESHLRSYVKYAYKAEPYVASEYKTVHEELTKSMTTILKPSADFLTSNKLLKYSWFFFDVLIKSMAQHLIENSKVKLLRNQRFPASYHHAVETVVNMLMPHITQKFRDNPEASKNANHSLAVFIKRCFTFMDRGFVFKQINNYISCFAPGDPKTLFEYKFEFLRVVCNHEHYIPLNLPMPFGKGRIQRYQDLQLDYSLTDEFCRNHFLVGLLLREVGTALQEFREVRLIAISVLKNLLIKHSFDDRYASRSHQARIATLYLPLFGLLIENVQRINVRDVSPFPVNAGMTVKDESLALPAVNPLVTPQKGSTLDNSLHKDLLGAISGIASPYTTSTPNINSVRNADSRGSLISTDSGNSLPERNSEKSNSLDKHQQSSTLGNSVVRCDKLDQSEIKSLLMCFLYILKSMSDDALFTYWNKASTSELMDFFTISEVCLHQFQYMGKRYIARTGMMHARLQQLGSLDNSLTFNHSYGHSDADVLHQSLLEANIATEVCLTALDTLSLFTLAFKNQLLADHGHNPLMKKVFDVYLCFLQKHQSETALKNVFTALRSLIYKFPSTFYEGRADMCAALCYEILKCCNSKLSSIRTEASQLLYFLMRNNFDYTGKKSFVRTHLQVIISVSQLIADVVGIGGTRFQQSLSIINNCANSDRLIKHTSFSSDVKDLTKRIRTVLMATAQMKEHENDPEMLVDLQYSLAKSYASTPELRKTWLDSMARIHVKNGDLSEAAMCYVHVTALVAEYLTRKEAVQWEPPLLPHSHSACLRRSRGGVFRQGCTAFRVITPNIDEEASMMEDVGMQDVHFNEDVLMELLEQCADGLWKAERYELIADIYKLIIPIYEKRRDFERLAHLYDTLHRAYSKVTEVMHSGRRLLGTYFRVAFFGQAAQYQFTDSETDVEGFFEDEDGKEYIYKEPKLTPLSEISQRLLKLYSDKFGSENVKMIQDSGKVNPKDLDSKYAYIQVTHVIPFFDEKELQERKTEFERSHNIRRFMFEMPFTQTGKRQGGVEEQCKRRTILTAIHCFPYVKKRIPVMYQHHTDLNPIEVAIDEMSKKVAELRQLCSSAEVDMIKLQLKLQGSVSVQVNAGPLAYARAFLDDTNTKRYPDNKVKLLKEVFRQFVEACGQALAVNERLIKEDQLEYQEEMKANYREMAKELSEIMHEQVRRSAPWRRRRASYRIPFTSSTPSVGLQQAQWFTG

SEQ ID NO: 293147 - protein, 2094 aa, Artificial Sequence
  derived and/or modified sequence
MSQPPLLPASAETRKFTRALSKPGTAAELRQSVSEVVRGSVLLAKPKLIEPLDYENVIVQKKTQILNDCLREMLLFPYDDFQTAILRRQGRYICSTVPAKAEEEAQSLFVTECIKTYNSDWHLVNYKYEDYSGEFRQLPNKVVKLDKLPVHVYEVDEEVDKDEDAASLGSQKGGITKHGWLYKGNMNSAISVTMRSFKRRFFHLIQLGDGSYNLNFYKDEKISKEPKGSIFLDSCMGVVQNNKVRRFAFELKMQDKSSYLLAADSEVEMEEWITILNKILQLNFEAAMQEKRNGDSHEDDEQSKLEGSGSGLDSYLPELAKSAREAEIKLKSESRVKLFYLDPDAQKLDFSSAEPEVKSFEEKFGKRILVKCNDLSFNLQCCVAENEEGPTTNVEPFFVTLSLFDIKYNRKISADFHVDLNHFSVRQMLATTSPALMNGSGQSPSVLKGILHEAAMQYPKQGIFSVTCPHPDIFLVARIEKVLQGSITHCAEPYMKSSDSSKVAQKVLKNAKQACQRLGQYRMPFAWAARTLFKDASGNLDKNARFSAIYRQDSNKLSNDDMLKLLADFRKPEKMAKLPVILGNLDITIDNVSSDFPNYVNSSYIPTKQFETCSKTPITFEVEEFVPCIPKHTQPYTIYTNHLYVYPKYLKYDSQKSFAKARNIAICIEFKDSDEEDSQPLKCIYGRPGGPVFTRSAFAAVLHHHQNPEFYDEIKIELPTQLHEKHHLLLTFFHVSCDNSSKGSTKKRDVVETQVGYSWLPLLKDGRVVTSEQHIPVSANLPSGYLGYQELGMGRHYGPEIKWVDGGKPLLKISTHLVSTVYTQDQHLHNFFQYCQKTESGAQALGNELVKYLKSLHAMEGHVMIAFLPTILNQLFRVLTRATQEEVAVNVTRVIIHVVAQCHEEGLESHLRSYVKYAYKAEPYVASEYKTVHEELTKSMTTILKPSADFLTSNKLLKYSWFFFDVLIKSMAQHLIENSKVKLLRNQRFPASYHHAVETVVNMLMPHITQKFRDNPEASKNANHSLAVFIKRCFTFMDRGFVFKQINNYISCFAPGDPKTLFEYKFEFLRVVCNHEHYIPLNLPMPFGKGRIQRYQDLQLDYSLTDEFCRNHFLVGLLLREVGTALQEFREVRLIAISVLKNLLIKHSFDDRYASRSHQARIATLYLPLFGLLIENVQRINVRDVSPFPVNAGMTVKDESLALPAVNPLVTPQKGSTLDNSLHKDLLGAISGIASPYTTSTPNINSVRNADSRGSLISTDSGNSLPERNSEKSNSLDKHQQSSTLGNSVVRCDKLDQSEIKSLLMCFLYILKSMSDDALFTYWNKASTSELMDFFTISEVCLHQFQYMGKRYIASVRKISSVLGISVDNGYGHSDADVLHQSLLEANIATEVCLTALDTLSLFTLAFKNQLLADHGHNPLMKKVFDVYLCFLQKHQSETALKNVFTALRSLIYKFPSTFYEGRADMCAALCYEILKCCNSKLSSIRTEASQLLYFLMRNNFDYTGKKSFVRTHLQVIISVSQLIADVVGIGGTRFQQSLSIINNCANSDRLIKHTSFSSDVKDLTKRIRTVLMATAQMKEHENDPEMLVDLQYSLAKSYASTPELRKTWLDSMARIHVKNGDLSEAAMCYVHVTALVAEYLTRKEAVQWEPPLLPHSHSACLRRSRGGVFRQGCTAFRVITPNIDEEASMMEDVGMQDVHFNEDVLMELLEQCADGLWKAERYELIADIYKLIIPIYEKRRDFERLAHLYDTLHRAYSKVTEVMHSGRRLLGTYFRVAFFGQAAQYQFTDSETDVEGFFEDEDGKEYIYKEPKLTPLSEISQRLLKLYSDKFGSENVKMIQDSGKVNPKDLDSKYAYIQVTHVIPFFDEKELQERKTEFERSHNIRRFMFEMPFTQTGKRQGGVEEQCKRRTILTAIHCFPYVKKRIPVMYQHHTDLNPIEVAIDEMSKKVAELRQLCSSAEVDMIKLQLKLQGSVSVQVNAGPLAYARAFLDDTNTKRYPDNKVKLLKEVFRQFVEACGQALAVNERLIKEDQLEYQEEMKANYREMAKELSEIMHEQVRRSAPWRRRRASYRIPFTSSTPSVGLQQAQWFTG

SEQ ID NO: 293148 - DNA, 6282 bp, Artificial Sequence
  derived and/or modified sequence
atgagccagccccccctgctgcccgccagcgccgagaccagaaagttcaccagagccctgagcaagcccggcaccgccgccgagctgagacagagcgtgagcgaggtggtgagaggcagcgtgctgctggccaagcccaagctgatcgagcccctggactacgagaacgtgatcgtgcagaagaagacccagatcctgaacgactgcctgagagagatgctgctgttcccctacgacgacttccagaccgccatcctgagaagacagggcagatacatctgcagcaccgtgcccgccaaggccgaggaggaggcccagagcctgttcgtgaccgagtgcatcaagacctacaacagcgactggcacctggtgaactacaagtacgaggactacagcggcgagttcagacagctgcccaacaaggtggtgaagctggacaagctgcccgtgcacgtgtacgaggtggacgaggaggtggacaaggacgaggacgccgccagcctgggcagccagaagggcggcatcaccaagcacggctggctgtacaagggcaacatgaacagcgccatcagcgtgaccatgagaagcttcaagagaagattcttccacctgatccagctgggcgacggcagctacaacctgaacttctacaaggacgagaagatcagcaaggagcccaagggcagcatcttcctggacagctgcatgggcgtggtgcagaacaacaaggtgagaagattcgccttcgagctgaagatgcaggacaagagcagctacctgctggccgccgacagcgaggtggagatggaggagtggatcaccatcctgaacaagatcctgcagctgaacttcgaggccgccatgcaggagaagagaaacggcgacagccacgaggacgacgagcagagcaagctggagggcagcggcagcggcctggacagctacctgcccgagctggccaagagcgccagagaggccgagatcaagctgaagagcgagagcagagtgaagctgttctacctggaccccgacgcccagaagctggacttcagcagcgccgagcccgaggtgaagagcttcgaggagaagttcggcaagagaatcctggtgaagtgcaacgacctgagcttcaacctgcagtgctgcgtggccgagaacgaggagggccccaccaccaacgtggagcccttcttcgtgaccctgagcctgttcgacatcaagtacaacagaaagatcagcgccgacttccacgtggacctgaaccacttcagcgtgagacagatgctggccaccaccagccccgccctgatgaacggcagcggccagagccccagcgtgctgaagggcatcctgcacgaggccgccatgcagtaccccaagcagggcatcttcagcgtgacctgcccccaccccgacatcttcctggtggccagaatcgagaaggtgctgcagggcagcatcacccactgcgccgagccctacatgaagagcagcgacagcagcaaggtggcccagaaggtgctgaagaacgccaagcaggcctgccagagactgggccagtacagaatgcccttcgcctgggccgccagaaccctgttcaaggacgccagcggcaacctggacaagaacgccagattcagcgccatctacagacaggacagcaacaagctgagcaacgacgacatgctgaagctgctggccgacttcagaaagcccgagaagatggccaagctgcccgtgatcctgggcaacctggacatcaccatcgacaacgtgagcagcgacttccccaactacgtgaacagcagctacatccccaccaagcagttcgagacctgcagcaagacccccatcaccttcgaggtggaggagttcgtgccctgcatccccaagcacacccagccctacaccatctacaccaaccacctgtacgtgtaccccaagtacctgaagtacgacagccagaagagcttcgccaaggccagaaacatcgccatctgcatcgagttcaaggacagcgacgaggaggacagccagcccctgaagtgcatctacggcagacccggcggccccgtgttcaccagaagcgccttcgccgccgtgctgcaccaccaccagaaccccgagttctacgacgagatcaagatcgagctgcccacccagctgcacgagaagcaccacctgctgctgaccttcttccacgtgagctgcgacaacagcagcaagggcagcaccaagaagagagacgtggtggagacccaggtgggctacagctggctgcccctgctgaaggacggcagagtggtgaccagcgagcagcacatccccgtgagcgccaacctgcccagcggctacctgggctaccaggagctgggcatgggcagacactacggccccgagatcaagtgggtggacggcggcaagcccctgctgaagatcagcacccacctggtgagcaccgtgtacacccaggaccagcacctgcacaacttcttccagtactgccagaagaccgagagcggcgcccaggccctgggcaacgagctggtgaagtacctgaagagcctgcacgccatggagggccacgtgatgatcgccttcctgcccaccatcctgaaccagctgttcagagtgctgaccagagccacccaggaggaggtggccgtgaacgtgaccagagtgatcatccacgtggtggcccagtgccacgaggagggcctggagagccacctgagaagctacgtgaagtacgcctacaaggccgagccctacgtggccagcgagtacaagaccgtgcacgaggagctgaccaagagcatgaccaccatcctgaagcccagcgccgacttcctgaccagcaacaagctgctgaagtacagctggttcttcttcgacgtgctgatcaagagcatggcccagcacctgatcgagaacagcaaggtgaagctgctgagaaaccagagattccccgccagctaccaccacgccgtggagaccgtggtgaacatgctgatgccccacatcacccagaagttcagagacaaccccgaggccagcaagaacgccaaccacagcctggccgtgttcatcaagagatgcttcaccttcatggacagaggcttcgtgttcaagcagatcaacaactacatcagctgcttcgcccccggcgaccccaagaccctgttcgagtacaagttcgagttcctgagagtggtgtgcaaccacgagcactacatccccctgaacctgcccatgcccttcggcaagggcagaatccagagataccaggacctgcagctggactacagcctgaccgacgagttctgcagaaaccacttcctggtgggcctgctgctgagagaggtgggcaccgccctgcaggagttcagagaggtgagactgatcgccatcagcgtgctgaagaacctgctgatcaagcacagcttcgacgacagatacgccagcagaagccaccaggccagaatcgccaccctgtacctgcccctgttcggcctgctgatcgagaacgtgcagagaatcaacgtgagagacgtgagccccttccccgtgaacgccggcatgaccgtgaaggacgagagcctggccctgcccgccgtgaaccccctggtgaccccccagaagggcagcaccctggacaacagcctgcacaaggacctgctgggcgccatcagcggcatcgccagcccctacaccaccagcacccccaacatcaacagcgtgagaaacgccgacagcagaggcagcctgatcagcaccgacagcggcaacagcctgcccgagagaaacagcgagaagagcaacagcctggacaagcaccagcagagcagcaccctgggcaacagcgtggtgagatgcgacaagctggaccagagcgagatcaagagcctgctgatgtgcttcctgtacatcctgaagagcatgagcgacgacgccctgttcacctactggaacaaggccagcaccagcgagctgatggacttcttcaccatcagcgaggtgtgcctgcaccagttccagtacatgggcaagagatacatcgccagaaccggcatgatgcacgccagactgcagcagctgggcagcctggacaacagcctgaccttcaaccacagctacggccacagcgacgccgacgtgctgcaccagagcctgctggaggccaacatcgccaccgaggtgtgcctgaccgccctggacaccctgagcctgttcaccctggccttcaagaaccagctgctggccgaccacggccacaaccccctgatgaagaaggtgttcgacgtgtacctgtgcttcctgcagaagcaccagagcgagaccgccctgaagaacgtgttcaccgccctgagaagcctgatctacaagttccccagcaccttctacgagggcagagccgacatgtgcgccgccctgtgctacgagatcctgaagtgctgcaacagcaagctgagcagcatcagaaccgaggccagccagctgctgtacttcctgatgagaaacaacttcgactacaccggcaagaagagcttcgtgagaacccacctgcaggtgatcatcagcgtgagccagctgatcgccgacgtggtgggcatcggcggcaccagattccagcagagcctgagcatcatcaacaactgcgccaacagcgacagactgatcaagcacaccagcttcagcagcgacgtgaaggacctgaccaagagaatcagaaccgtgctgatggccaccgcccagatgaaggagcacgagaacgaccccgagatgctggtggacctgcagtacagcctggccaagagctacgccagcacccccgagctgagaaagacctggctggacagcatggccagaatccacgtgaagaacggcgacctgagcgaggccgccatgtgctacgtgcacgtgaccgccctggtggccgagtacctgaccagaaaggaggccgtgcagtgggagccccccctgctgccccacagccacagcgcctgcctgagaagaagcagaggcggcgtgttcagacagggctgcaccgccttcagagtgatcacccccaacatcgacgaggaggccagcatgatggaggacgtgggcatgcaggacgtgcacttcaacgaggacgtgctgatggagctgctggagcagtgcgccgacggcctgtggaaggccgagagatacgagctgatcgccgacatctacaagctgatcatccccatctacgagaagagaagagacttcgagagactggcccacctgtacgacaccctgcacagagcctacagcaaggtgaccgaggtgatgcacagcggcagaagactgctgggcacctacttcagagtggccttcttcggccagggcttcttcgaggacgaggacggcaaggagtacatctacaaggagcccaagctgacccccctgagcgagatcagccagagactgctgaagctgtacagcgacaagttcggcagcgagaacgtgaagatgatccaggacagcggcaaggtgaaccccaaggacctggacagcaagtacgcctacatccaggtgacccacgtgatccccttcttcgacgagaaggagctgcaggagagaaagaccgagttcgagagaagccacaacatcagaagattcatgttcgagatgcccttcacccagaccggcaagagacagggcggcgtggaggagcagtgcaagagaagaaccatcctgaccgccatccactgcttcccctacgtgaagaagagaatccccgtgatgtaccagcaccacaccgacctgaaccccatcgaggtggccatcgacgagatgagcaagaaggtggccgagctgagacagctgtgcagcagcgccgaggtggacatgatcaagctgcagctgaagctgcagggcagcgtgagcgtgcaggtgaacgccggccccctggcctacgccagagccttcctggacgacaccaacaccaagagataccccgacaacaaggtgaagctgctgaaggaggtgttcagacagttcgtggaggcctgcggccaggccctggccgtgaacgagagactgatcaaggaggaccagctggagtaccaggaggagatgaaggccaactacagagagatggccaaggagctgagcgagatcatgcacgagcagatctgccccctggaggagaagaccagcgtgctgcccaacagcctgcacatcttcaacgccatcagcggcacccccaccagcaccatggtgcacggcatgaccagcagcagcagcgtggtgtag

SEQ ID NO: 293149 - DNA, 6309 bp, Artificial Sequence
  derived and/or modified sequence
atgagccagccccccctgctgcccgccagcgccgagaccagaaagttcaccagagccctgagcaagcccggcaccgccgccgagctgagacagagcgtgagcgaggtggtgagaggcagcgtgctgctggccaagcccaagctgatcgagcccctggactacgagaacgtgatcgtgcagaagaagacccagatcctgaacgactgcctgagagagatgctgctgttcccctacgacgacttccagaccgccatcctgagaagacagggcagatacatctgcagcaccgtgcccgccaaggccgaggaggaggcccagagcctgttcgtgaccgagtgcatcaagacctacaacagcgactggcacctggtgaactacaagtacgaggactacagcggcgagttcagacagctgcccaacaaggtggtgaagctggacaagctgcccgtgcacgtgtacgaggtggacgaggaggtggacaaggacgaggacgccgccagcctgggcagccagaagggcggcatcaccaagcacggctggctgtacaagggcaacatgaacagcgccatcagcgtgaccatgagaagcttcaagagaagattcttccacctgatccagctgggcgacggcagctacaacctgaacttctacaaggacgagaagatcagcaaggagcccaagggcagcatcttcctggacagctgcatgggcgtggtgcagaacaacaaggtgagaagattcgccttcgagctgaagatgcaggacaagagcagctacctgctggccgccgacagcgaggtggagatggaggagtggatcaccatcctgaacaagatcctgcagctgaacttcgaggccgccatgcaggagaagagaaacggcgacagccacgaggacgacgagcagagcaagctggagggcagcggcagcggcctggacagctacctgcccgagctggccaagagcgccagagaggccgagatcaagctgaagagcgagagcagagtgaagctgttctacctggaccccgacgcccagaagctggacttcagcagcgccgagcccgaggtgaagagcttcgaggagaagttcggcaagagaatcctggtgaagtgcaacgacctgagcttcaacctgcagtgctgcgtggccgagaacgaggagggccccaccaccaacgtggagcccttcttcgtgaccctgagcctgttcgacatcaagtacaacagaaagatcagcgccgacttccacgtggacctgaaccacttcagcgtgagacagatgctggccaccaccagccccgccctgatgaacggcagcggccagagccccagcgtgctgaagggcatcctgcacgaggccgccatgcagtaccccaagcagggcatcttcagcgtgacctgcccccaccccgacatcttcctggtggccagaatcgagaaggtgctgcagggcagcatcacccactgcgccgagccctacatgaagagcagcgacagcagcaaggtggcccagaaggtgctgaagaacgccaagcaggcctgccagagactgggccagtacagaatgcccttcgcctgggccgccagaaccctgttcaaggacgccagcggcaacctggacaagaacgccagattcagcgccatctacagacaggacagcaacaagctgagcaacgacgacatgctgaagctgctggccgacttcagaaagcccgagaagatggccaagctgcccgtgatcctgggcaacctggacatcaccatcgacaacgtgagcagcgacttccccaactacgtgaacagcagctacatccccaccaagcagttcgagacctgcagcaagacccccatcaccttcgaggtggaggagttcgtgccctgcatccccaagcacacccagccctacaccatctacaccaaccacctgtacgtgtaccccaagtacctgaagtacgacagccagaagagcttcgccaaggccagaaacatcgccatctgcatcgagttcaaggacagcgacgaggaggacagccagcccctgaagtgcatctacggcagacccggcggccccgtgttcaccagaagcgccttcgccgccgtgctgcaccaccaccagaaccccgagttctacgacgagatcaagatcgagctgcccacccagctgcacgagaagcaccacctgctgctgaccttcttccacgtgagctgcgacaacagcagcaagggcagcaccaagaagagagacgtggtggagacccaggtgggctacagctggctgcccctgctgaaggacggcagagtggtgaccagcgagcagcacatccccgtgagcgccaacctgcccagcggctacctgggctaccaggagctgggcatgggcagacactacggccccgagatcaagtgggtggacggcggcaagcccctgctgaagatcagcacccacctggtgagcaccgtgtacacccaggaccagcacctgcacaacttcttccagtactgccagaagaccgagagcggcgcccaggccctgggcaacgagctggtgaagtacctgaagagcctgcacgccatggagggccacgtgatgatcgccttcctgcccaccatcctgaaccagctgttcagagtgctgaccagagccacccaggaggaggtggccgtgaacgtgaccagagtgatcatccacgtggtggcccagtgccacgaggagggcctggagagccacctgagaagctacgtgaagtacgcctacaaggccgagccctacgtggccagcgagtacaagaccgtgcacgaggagctgaccaagagcatgaccaccatcctgaagcccagcgccgacttcctgaccagcaacaagctgctgaagtacagctggttcttcttcgacgtgctgatcaagagcatggcccagcacctgatcgagaacagcaaggtgaagctgctgagaaaccagagattccccgccagctaccaccacgccgtggagaccgtggtgaacatgctgatgccccacatcacccagaagttcagagacaaccccgaggccagcaagaacgccaaccacagcctggccgtgttcatcaagagatgcttcaccttcatggacagaggcttcgtgttcaagcagatcaacaactacatcagctgcttcgcccccggcgaccccaagaccctgttcgagtacaagttcgagttcctgagagtggtgtgcaaccacgagcactacatccccctgaacctgcccatgcccttcggcaagggcagaatccagagataccaggacctgcagctggactacagcctgaccgacgagttctgcagaaaccacttcctggtgggcctgctgctgagagaggtgggcaccgccctgcaggagttcagagaggtgagactgatcgccatcagcgtgctgaagaacctgctgatcaagcacagcttcgacgacagatacgccagcagaagccaccaggccagaatcgccaccctgtacctgcccctgttcggcctgctgatcgagaacgtgcagagaatcaacgtgagagacgtgagccccttccccgtgaacgccggcatgaccgtgaaggacgagagcctggccctgcccgccgtgaaccccctggtgaccccccagaagggcagcaccctggacaacagcctgcacaaggacctgctgggcgccatcagcggcatcgccagcccctacaccaccagcacccccaacatcaacagcgtgagaaacgccgacagcagaggcagcctgatcagcaccgacagcggcaacagcctgcccgagagaaacagcgagaagagcaacagcctggacaagcaccagcagagcagcaccctgggcaacagcgtggtgagatgcgacaagctggaccagagcgagatcaagagcctgctgatgtgcttcctgtacatcctgaagagcatgagcgacgacgccctgttcacctactggaacaaggccagcaccagcgagctgatggacttcttcaccatcagcgaggtgtgcctgcaccagttccagtacatgggcaagagatacatcgccagaaccggcatgatgcacgccagactgcagcagctgggcagcctggacaacagcctgaccttcaaccacagctacggccacagcgacgccgacgtgctgcaccagagcctgctggaggccaacatcgccaccgaggtgtgcctgaccgccctggacaccctgagcctgttcaccctggccttcaagaaccagctgctggccgaccacggccacaaccccctgatgaagaaggtgttcgacgtgtacctgtgcttcctgcagaagcaccagagcgagaccgccctgaagaacgtgttcaccgccctgagaagcctgatctacaagttccccagcaccttctacgagggcagagccgacatgtgcgccgccctgtgctacgagatcctgaagtgctgcaacagcaagctgagcagcatcagaaccgaggccagccagctgctgtacttcctgatgagaaacaacttcgactacaccggcaagaagagcttcgtgagaacccacctgcaggtgatcatcagcgtgagccagctgatcgccgacgtggtgggcatcggcggcaccagattccagcagagcctgagcatcatcaacaactgcgccaacagcgacagactgatcaagcacaccagcttcagcagcgacgtgaaggacctgaccaagagaatcagaaccgtgctgatggccaccgcccagatgaaggagcacgagaacgaccccgagatgctggtggacctgcagtacagcctggccaagagctacgccagcacccccgagctgagaaagacctggctggacagcatggccagaatccacgtgaagaacggcgacctgagcgaggccgccatgtgctacgtgcacgtgaccgccctggtggccgagtacctgaccagaaaggaggccgtgcagtgggagccccccctgctgccccacagccacagcgcctgcctgagaagaagcagaggcggcgtgttcagacagggctgcaccgccttcagagtgatcacccccaacatcgacgaggaggccagcatgatggaggacgtgggcatgcaggacgtgcacttcaacgaggacgtgctgatggagctgctggagcagtgcgccgacggcctgtggaaggccgagagatacgagctgatcgccgacatctacaagctgatcatccccatctacgagaagagaagagacttcgagagactggcccacctgtacgacaccctgcacagagcctacagcaaggtgaccgaggtgatgcacagcggcagaagactgctgggcacctacttcagagtggccttcttcggccaggccgcccagtaccagttcaccgacagcgagaccgacgtggagggcttcttcgaggacgaggacggcaaggagtacatctacaaggagcccaagctgacccccctgagcgagatcagccagagactgctgaagctgtacagcgacaagttcggcagcgagaacgtgaagatgatccaggacagcggcaaggtgaaccccaaggacctggacagcaagtacgcctacatccaggtgacccacgtgatccccttcttcgacgagaaggagctgcaggagagaaagaccgagttcgagagaagccacaacatcagaagattcatgttcgagatgcccttcacccagaccggcaagagacagggcggcgtggaggagcagtgcaagagaagaaccatcctgaccgccatccactgcttcccctacgtgaagaagagaatccccgtgatgtaccagcaccacaccgacctgaaccccatcgaggtggccatcgacgagatgagcaagaaggtggccgagctgagacagctgtgcagcagcgccgaggtggacatgatcaagctgcagctgaagctgcagggcagcgtgagcgtgcaggtgaacgccggccccctggcctacgccagagccttcctggacgacaccaacaccaagagataccccgacaacaaggtgaagctgctgaaggaggtgttcagacagttcgtggaggcctgcggccaggccctggccgtgaacgagagactgatcaaggaggaccagctggagtaccaggaggagatgaaggccaactacagagagatggccaaggagctgagcgagatcatgcacgagcaggtgagaagaagcgccccctggagaagaagaagagccagctacagaatccccttcaccagcagcacccccagcgtgggcctgcagcaggcccagtggttcaccggctag

SEQ ID NO: 293150 - DNA, 6285 bp, Artificial Sequence
  derived and/or modified sequence
atgagccagccccccctgctgcccgccagcgccgagaccagaaagttcaccagagccctgagcaagcccggcaccgccgccgagctgagacagagcgtgagcgaggtggtgagaggcagcgtgctgctggccaagcccaagctgatcgagcccctggactacgagaacgtgatcgtgcagaagaagacccagatcctgaacgactgcctgagagagatgctgctgttcccctacgacgacttccagaccgccatcctgagaagacagggcagatacatctgcagcaccgtgcccgccaaggccgaggaggaggcccagagcctgttcgtgaccgagtgcatcaagacctacaacagcgactggcacctggtgaactacaagtacgaggactacagcggcgagttcagacagctgcccaacaaggtggtgaagctggacaagctgcccgtgcacgtgtacgaggtggacgaggaggtggacaaggacgaggacgccgccagcctgggcagccagaagggcggcatcaccaagcacggctggctgtacaagggcaacatgaacagcgccatcagcgtgaccatgagaagcttcaagagaagattcttccacctgatccagctgggcgacggcagctacaacctgaacttctacaaggacgagaagatcagcaaggagcccaagggcagcatcttcctggacagctgcatgggcgtggtgcagaacaacaaggtgagaagattcgccttcgagctgaagatgcaggacaagagcagctacctgctggccgccgacagcgaggtggagatggaggagtggatcaccatcctgaacaagatcctgcagctgaacttcgaggccgccatgcaggagaagagaaacggcgacagccacgaggacgacgagcagagcaagctggagggcagcggcagcggcctggacagctacctgcccgagctggccaagagcgccagagaggccgagatcaagctgaagagcgagagcagagtgaagctgttctacctggaccccgacgcccagaagctggacttcagcagcgccgagcccgaggtgaagagcttcgaggagaagttcggcaagagaatcctggtgaagtgcaacgacctgagcttcaacctgcagtgctgcgtggccgagaacgaggagggccccaccaccaacgtggagcccttcttcgtgaccctgagcctgttcgacatcaagtacaacagaaagatcagcgccgacttccacgtggacctgaaccacttcagcgtgagacagatgctggccaccaccagccccgccctgatgaacggcagcggccagagccccagcgtgctgaagggcatcctgcacgaggccgccatgcagtaccccaagcagggcatcttcagcgtgacctgcccccaccccgacatcttcctggtggccagaatcgagaaggtgctgcagggcagcatcacccactgcgccgagccctacatgaagagcagcgacagcagcaaggtggcccagaaggtgctgaagaacgccaagcaggcctgccagagactgggccagtacagaatgcccttcgcctgggccgccagaaccctgttcaaggacgccagcggcaacctggacaagaacgccagattcagcgccatctacagacaggacagcaacaagctgagcaacgacgacatgctgaagctgctggccgacttcagaaagcccgagaagatggccaagctgcccgtgatcctgggcaacctggacatcaccatcgacaacgtgagcagcgacttccccaactacgtgaacagcagctacatccccaccaagcagttcgagacctgcagcaagacccccatcaccttcgaggtggaggagttcgtgccctgcatccccaagcacacccagccctacaccatctacaccaaccacctgtacgtgtaccccaagtacctgaagtacgacagccagaagagcttcgccaaggccagaaacatcgccatctgcatcgagttcaaggacagcgacgaggaggacagccagcccctgaagtgcatctacggcagacccggcggccccgtgttcaccagaagcgccttcgccgccgtgctgcaccaccaccagaaccccgagttctacgacgagatcaagatcgagctgcccacccagctgcacgagaagcaccacctgctgctgaccttcttccacgtgagctgcgacaacagcagcaagggcagcaccaagaagagagacgtggtggagacccaggtgggctacagctggctgcccctgctgaaggacggcagagtggtgaccagcgagcagcacatccccgtgagcgccaacctgcccagcggctacctgggctaccaggagctgggcatgggcagacactacggccccgagatcaagtgggtggacggcggcaagcccctgctgaagatcagcacccacctggtgagcaccgtgtacacccaggaccagcacctgcacaacttcttccagtactgccagaagaccgagagcggcgcccaggccctgggcaacgagctggtgaagtacctgaagagcctgcacgccatggagggccacgtgatgatcgccttcctgcccaccatcctgaaccagctgttcagagtgctgaccagagccacccaggaggaggtggccgtgaacgtgaccagagtgatcatccacgtggtggcccagtgccacgaggagggcctggagagccacctgagaagctacgtgaagtacgcctacaaggccgagccctacgtggccagcgagtacaagaccgtgcacgaggagctgaccaagagcatgaccaccatcctgaagcccagcgccgacttcctgaccagcaacaagctgctgaagtacagctggttcttcttcgacgtgctgatcaagagcatggcccagcacctgatcgagaacagcaaggtgaagctgctgagaaaccagagattccccgccagctaccaccacgccgtggagaccgtggtgaacatgctgatgccccacatcacccagaagttcagagacaaccccgaggccagcaagaacgccaaccacagcctggccgtgttcatcaagagatgcttcaccttcatggacagaggcttcgtgttcaagcagatcaacaactacatcagctgcttcgcccccggcgaccccaagaccctgttcgagtacaagttcgagttcctgagagtggtgtgcaaccacgagcactacatccccctgaacctgcccatgcccttcggcaagggcagaatccagagataccaggacctgcagctggactacagcctgaccgacgagttctgcagaaaccacttcctggtgggcctgctgctgagagaggtgggcaccgccctgcaggagttcagagaggtgagactgatcgccatcagcgtgctgaagaacctgctgatcaagcacagcttcgacgacagatacgccagcagaagccaccaggccagaatcgccaccctgtacctgcccctgttcggcctgctgatcgagaacgtgcagagaatcaacgtgagagacgtgagccccttccccgtgaacgccggcatgaccgtgaaggacgagagcctggccctgcccgccgtgaaccccctggtgaccccccagaagggcagcaccctggacaacagcctgcacaaggacctgctgggcgccatcagcggcatcgccagcccctacaccaccagcacccccaacatcaacagcgtgagaaacgccgacagcagaggcagcctgatcagcaccgacagcggcaacagcctgcccgagagaaacagcgagaagagcaacagcctggacaagcaccagcagagcagcaccctgggcaacagcgtggtgagatgcgacaagctggaccagagcgagatcaagagcctgctgatgtgcttcctgtacatcctgaagagcatgagcgacgacgccctgttcacctactggaacaaggccagcaccagcgagctgatggacttcttcaccatcagcgaggtgtgcctgcaccagttccagtacatgggcaagagatacatcgccagcgtgagaaagatcagcagcgtgctgggcatcagcgtggacaacggctacggccacagcgacgccgacgtgctgcaccagagcctgctggaggccaacatcgccaccgaggtgtgcctgaccgccctggacaccctgagcctgttcaccctggccttcaagaaccagctgctggccgaccacggccacaaccccctgatgaagaaggtgttcgacgtgtacctgtgcttcctgcagaagcaccagagcgagaccgccctgaagaacgtgttcaccgccctgagaagcctgatctacaagttccccagcaccttctacgagggcagagccgacatgtgcgccgccctgtgctacgagatcctgaagtgctgcaacagcaagctgagcagcatcagaaccgaggccagccagctgctgtacttcctgatgagaaacaacttcgactacaccggcaagaagagcttcgtgagaacccacctgcaggtgatcatcagcgtgagccagctgatcgccgacgtggtgggcatcggcggcaccagattccagcagagcctgagcatcatcaacaactgcgccaacagcgacagactgatcaagcacaccagcttcagcagcgacgtgaaggacctgaccaagagaatcagaaccgtgctgatggccaccgcccagatgaaggagcacgagaacgaccccgagatgctggtggacctgcagtacagcctggccaagagctacgccagcacccccgagctgagaaagacctggctggacagcatggccagaatccacgtgaagaacggcgacctgagcgaggccgccatgtgctacgtgcacgtgaccgccctggtggccgagtacctgaccagaaaggaggccgtgcagtgggagccccccctgctgccccacagccacagcgcctgcctgagaagaagcagaggcggcgtgttcagacagggctgcaccgccttcagagtgatcacccccaacatcgacgaggaggccagcatgatggaggacgtgggcatgcaggacgtgcacttcaacgaggacgtgctgatggagctgctggagcagtgcgccgacggcctgtggaaggccgagagatacgagctgatcgccgacatctacaagctgatcatccccatctacgagaagagaagagacttcgagagactggcccacctgtacgacaccctgcacagagcctacagcaaggtgaccgaggtgatgcacagcggcagaagactgctgggcacctacttcagagtggccttcttcggccaggccgcccagtaccagttcaccgacagcgagaccgacgtggagggcttcttcgaggacgaggacggcaaggagtacatctacaaggagcccaagctgacccccctgagcgagatcagccagagactgctgaagctgtacagcgacaagttcggcagcgagaacgtgaagatgatccaggacagcggcaaggtgaaccccaaggacctggacagcaagtacgcctacatccaggtgacccacgtgatccccttcttcgacgagaaggagctgcaggagagaaagaccgagttcgagagaagccacaacatcagaagattcatgttcgagatgcccttcacccagaccggcaagagacagggcggcgtggaggagcagtgcaagagaagaaccatcctgaccgccatccactgcttcccctacgtgaagaagagaatccccgtgatgtaccagcaccacaccgacctgaaccccatcgaggtggccatcgacgagatgagcaagaaggtggccgagctgagacagctgtgcagcagcgccgaggtggacatgatcaagctgcagctgaagctgcagggcagcgtgagcgtgcaggtgaacgccggccccctggcctacgccagagccttcctggacgacaccaacaccaagagataccccgacaacaaggtgaagctgctgaaggaggtgttcagacagttcgtggaggcctgcggccaggccctggccgtgaacgagagactgatcaaggaggaccagctggagtaccaggaggagatgaaggccaactacagagagatggccaaggagctgagcgagatcatgcacgagcaggtgagaagaagcgccccctggagaagaagaagagccagctacagaatccccttcaccagcagcacccccagcgtgggcctgcagcaggcccagtggttcaccggctag

SEQ ID NO: 293151 - DNA, 6337 bp, Artificial Sequence
  derived and/or modified sequence
gcggccgggccgggccgcgggagcaggcggaggcggaggcggcgggggcaggaggatgtcgcagccgccgctgctccccgcctcggcggagactcggaagttcacccgggcgctgagtaagccgggcacggcggccgagctgcggcagagcgtgtctgaggtggtgcgcggctccgtgctcctggcaaagccaaagctaattgagccactcgactatgaaaatgtcatcgtccagaagaagactcagatcctgaacgactgtttacgggagatgctgctcttcccttacgatgactttcagacggccatcctgagacgacagggtcgatacatatgctcaacagtgcctgcgaaggcggaagaggaagcacagagcttgtttgttacagagtgcatcaaaacctataactctgactggcatcttgtgaactataaatatgaagattactcaggagagtttcgacagcttccgaacaaagtggtcaagttggataaacttccagttcatgtctatgaagttgacgaggaggtcgacaaagatgaggatgctgcctcccttggttcccagaagggtgggatcaccaagcatggctggctgtacaaaggcaacatgaacagtgccatcagcgtgaccatgaggtcatttaagagacgatttttccacctgattcaacttggcgatggatcctataatttgaatttttataaagatgaaaagatctccaaagaaccaaaaggatcaatatttctggattcctgtatgggtgtcgttcagaacaacaaagtcaggcgttttgcttttgagctcaagatgcaggacaaaagtagttatctcttggcagcagacagtgaagtggaaatggaagaatggatcacaattctaaataagatcctccagctcaactttgaagctgcaatgcaagaaaagcgaaatggcgactctcacgaagatgatgaacaaagcaaattggaaggttctggttccggtttagatagctacctgccggaacttgccaagagtgcaagagaagcagaaatcaaactgaaaagtgaaagcagagtcaaacttttttatttggacccagatgcccagaagcttgacttctcatcagctgagccagaagtgaagtcatttgaagagaagtttggaaaaaggatccttgtcaagtgcaatgatttatctttcaatttgcaatgctgtgttgccgaaaatgaagaaggacccactacaaatgttgaacctttctttgttactctatccctgtttgacataaaatacaaccggaagatttctgccgatttccacgtagacctgaaccatttctcagtgaggcaaatgctcgccaccacgtccccggcgctgatgaatggcagtgggcagagcccatctgtcctcaagggcatccttcatgaagccgccatgcagtatccgaagcagggaatattttcagtcacttgtcctcatccagatatatttcttgtggccagaattgaaaaagtccttcaggggagcatcacacattgcgctgagccatatatgaaaagttcagactcttctaaggtggcccagaaggtgctgaagaatgccaagcaggcatgccaaagactaggacagtatagaatgccatttgcttgggcagcaaggacattgtttaaggatgcatctggaaatcttgacaaaaatgccagattttctgccatctacaggcaagacagcaataagctatccaatgatgacatgctcaagttacttgcagactttcggaaacctgagaagatggctaagctcccagtgattttaggcaatctagacattacaattgataatgtttcctcagacttccctaattatgttaattcatcatacattcccacaaaacaatttgaaacctgcagtaaaactcccatcacgtttgaagtggaggaatttgtgccctgcataccaaaacacactcagccttacaccatctacaccaatcacctttacgtttatcctaagtacttgaaatacgacagtcagaagtcttttgccaaggctagaaatattgcgatttgcattgaattcaaagattcagatgaggaagactctcagccccttaagtgcatttatggcagacctggtgggccagttttcacaagaagcgcctttgctgcagttttacaccatcaccaaaacccagaattttatgatgagattaaaatagagttgcccactcagctgcatgaaaagcaccacctgttgctcacattcttccatgtcagctgtgacaactcaagtaaaggaagcacgaagaagagggatgtcgttgaaacccaagttggctactcctggcttcccctcctgaaagacggaagggtggtgacaagcgagcagcacatcccggtctcggcgaaccttccttcgggctatcttggctaccaggagcttgggatgggcaggcattatggtccggaaattaaatgggtagatggaggcaagccactgctgaaaatttccactcatctggtttctacagtgtatactcaggatcagcatttacataattttttccagtactgtcagaaaaccgaatctggagcccaagccttaggaaacgaacttgtaaagtaccttaagagtctgcatgcgatggaaggccacgtgatgatcgccttcttgcccactatcctaaaccagctgttccgagtcctcaccagagccacacaggaagaagtcgcggttaacgtgactcgggtcattattcatgtggttgcccagtgccatgaggaaggattggagagccacttgaggtcatatgttaagtacgcgtataaggctgagccatatgttgcctctgaatacaagacagtgcatgaagaactgaccaaatccatgaccacgattctcaagccttctgccgatttcctcaccagcaacaaactactgaagtactcatggtttttctttgatgtactgatcaaatctatggctcagcatttgatagagaactccaaagttaagttgctgcgaaaccagagatttcctgcatcctatcatcatgcagtggaaaccgttgtaaatatgctgatgccacacatcactcagaagtttcgagataatccagaggcatctaagaacgcgaatcatagccttgctgtcttcatcaagagatgtttcaccttcatggacaggggctttgtcttcaagcagatcaacaactacattagctgttttgctcctggagacccaaagaccctctttgaatacaagtttgaatttctccgtgtagtgtgcaaccatgaacattatattccgttgaacttaccaatgccatttggaaaaggcaggattcaaagataccaagacctccagcttgactactcattaacagatgagttctgcagaaaccacttcttggtgggactgttactgagggaggtggggacagccctccaggagttccgggaggtccgtctgatcgccatcagtgtgctcaagaacctgctgataaagcattcttttgatgacagatatgcttcaaggagccatcaggcaaggatagccaccctctacctgcctctgtttggtctgctgattgaaaacgtccagcggatcaatgtgagggatgtgtcacccttccctgtgaacgcgggcatgactgtgaaggatgaatccctggctctaccagctgtgaatccgctggtgacgccgcagaagggaagcaccctggacaacagcctgcacaaggacctgctgggcgccatctccggcattgcttctccatatacaacctcaactccaaacatcaacagtgtgagaaatgctgattcgagaggatctctcataagcacagattcgggtaacagccttccagaaaggaatagtgagaagagcaattccctggataagcaccaacaaagtagcacattgggaaattccgtggttcgctgtgataaacttgaccagtctgagattaagagcctactgatgtgtttcctctacatcttaaagagcatgtctgatgatgctttgtttacatattggaacaaggcttcaacatctgaacttatggatttttttacaatatctgaagtctgcctgcaccagttccagtacatggggaagcgatacatagccagaacaggaatgatgcatgccagattgcagcagctgggcagcctggataactctctcacttttaaccacagctatggccactcggacgcagatgttctgcaccagtcattacttgaagccaacattgctactgaggtttgcctgacagctctggacacgctttctctatttacattggcgtttaagaaccagctcctggccgaccatggacataatcctctcatgaaaaaagtttttgatgtctacctgtgttttcttcaaaaacatcagtctgaaacggctttaaaaaatgtcttcactgccttaaggtccttaatttataagtttccctcaacattctatgaagggagagcggacatgtgtgcggctctgtgttacgagattctcaagtgctgtaactccaagctgagctccatcaggacggaggcctcccagctgctctacttcctgatgaggaacaactttgattacactggaaagaagtcctttgtccggacacatttgcaagtcatcatatctgtcagccagctgatagcagacgttgttggcattgggggaaccagattccagcagtccctgtccatcatcaacaactgtgccaacagtgaccggcttattaagcacaccagcttctcctctgatgtgaaggacttaaccaaaaggatacgcacggtgctaatggccaccgcccagatgaaggagcatgagaacgacccagagatgctggtggacctccagtacagcctggccaaatcctatgccagcacgcccgagctcaggaagacgtggctcgacagcatggccaggatccatgtcaaaaatggcgatctctcagaggcagcaatgtgctatgtccacgtaacagccctagtggcagaatatctcacacggaaagaagcagtccagtgggagccgccccttctcccccacagccatagcgcctgcctgaggaggagccggggaggcgtgtttagacaaggatgcaccgccttcagggtcattaccccaaacatcgacgaggaggcctccatgatggaagacgtggggatgcaggatgtccatttcaacgaggatgtgctgatggagctccttgagcagtgcgcagatggactctggaaagccgagcgctacgagctcatcgccgacatctacaaacttatcatccccatttatgagaagcggagggattttgagaggctggcccatctgtatgacacgctgcaccgggcctacagcaaagtgaccgaggtcatgcactcgggccgcaggcttctggggacctacttccgggtagccttcttcgggcagggattctttgaagatgaagatggaaaggagtatatttacaaggaacccaaactcacaccgctgtcggaaatttctcagagactccttaaactgtactcggataaatttggttctgaaaatgtcaaaatgatacaggattctggcaaggtcaaccctaaggatctggattctaagtatgcatacatccaggtgactcacgtcatccccttctttgacgaaaaagagttgcaagaaaggaaaacagagtttgagagatcccacaacatccgccgcttcatgtttgagatgccatttacgcagaccgggaagaggcagggcggggtggaagagcagtgcaaacggcgcaccatcctgacagccatacactgcttcccttatgtgaagaagcgcatccctgtcatgtaccagcaccacactgacctgaaccccatcgaggtggccattgacgagatgagtaagaaggtggcggagctccggcagctgtgctcctcggccgaggtggacatgatcaaactgcagctcaaactccagggcagcgtgagtgttcaggtcaatgctggcccactagcatatgcgcgagctttcttagatgatacaaacacaaagcgatatcctgacaataaagtgaagctgcttaaggaagttttcaggcaatttgtggaagcttgcggtcaagccttagcggtaaacgaacgtctgattaaagaagaccagctcgagtatcaggaagaaatgaaagccaactacagggaaatggcgaaggagctttctgaaatcatgcatgagcagatctgccccctggaggagaagacgagcgtcttaccgaattcccttcacatcttcaacgccatcagtgggactccaacaagcacaatggttcacgggatgaccagctcgtcttcggtcgtgtga

SEQ ID NO: 293152 - DNA, 7526 bp, Artificial Sequence
  derived and/or modified sequence
gcggccgggccgggccgcgggagcaggcggaggcggaggcggcgggggcaggaggatgtcgcagccgccgctgctccccgcctcggcggagactcggaagttcacccgggcgctgagtaagccgggcacggcggccgagctgcggcagagcgtgtctgaggtggtgcgcggctccgtgctcctggcaaagccaaagctaattgagccactcgactatgaaaatgtcatcgtccagaagaagactcagatcctgaacgactgtttacgggagatgctgctcttcccttacgatgactttcagacggccatcctgagacgacagggtcgatacatatgctcaacagtgcctgcgaaggcggaagaggaagcacagagcttgtttgttacagagtgcatcaaaacctataactctgactggcatcttgtgaactataaatatgaagattactcaggagagtttcgacagcttccgaacaaagtggtcaagttggataaacttccagttcatgtctatgaagttgacgaggaggtcgacaaagatgaggatgctgcctcccttggttcccagaagggtgggatcaccaagcatggctggctgtacaaaggcaacatgaacagtgccatcagcgtgaccatgaggtcatttaagagacgatttttccacctgattcaacttggcgatggatcctataatttgaatttttataaagatgaaaagatctccaaagaaccaaaaggatcaatatttctggattcctgtatgggtgtcgttcagaacaacaaagtcaggcgttttgcttttgagctcaagatgcaggacaaaagtagttatctcttggcagcagacagtgaagtggaaatggaagaatggatcacaattctaaataagatcctccagctcaactttgaagctgcaatgcaagaaaagcgaaatggcgactctcacgaagatgatgaacaaagcaaattggaaggttctggttccggtttagatagctacctgccggaacttgccaagagtgcaagagaagcagaaatcaaactgaaaagtgaaagcagagtcaaacttttttatttggacccagatgcccagaagcttgacttctcatcagctgagccagaagtgaagtcatttgaagagaagtttggaaaaaggatccttgtcaagtgcaatgatttatctttcaatttgcaatgctgtgttgccgaaaatgaagaaggacccactacaaatgttgaacctttctttgttactctatccctgtttgacataaaatacaaccggaagatttctgccgatttccacgtagacctgaaccatttctcagtgaggcaaatgctcgccaccacgtccccggcgctgatgaatggcagtgggcagagcccatctgtcctcaagggcatccttcatgaagccgccatgcagtatccgaagcagggaatattttcagtcacttgtcctcatccagatatatttcttgtggccagaattgaaaaagtccttcaggggagcatcacacattgcgctgagccatatatgaaaagttcagactcttctaaggtggcccagaaggtgctgaagaatgccaagcaggcatgccaaagactaggacagtatagaatgccatttgcttgggcagcaaggacattgtttaaggatgcatctggaaatcttgacaaaaatgccagattttctgccatctacaggcaagacagcaataagctatccaatgatgacatgctcaagttacttgcagactttcggaaacctgagaagatggctaagctcccagtgattttaggcaatctagacattacaattgataatgtttcctcagacttccctaattatgttaattcatcatacattcccacaaaacaatttgaaacctgcagtaaaactcccatcacgtttgaagtggaggaatttgtgccctgcataccaaaacacactcagccttacaccatctacaccaatcacctttacgtttatcctaagtacttgaaatacgacagtcagaagtcttttgccaaggctagaaatattgcgatttgcattgaattcaaagattcagatgaggaagactctcagccccttaagtgcatttatggcagacctggtgggccagttttcacaagaagcgcctttgctgcagttttacaccatcaccaaaacccagaattttatgatgagattaaaatagagttgcccactcagctgcatgaaaagcaccacctgttgctcacattcttccatgtcagctgtgacaactcaagtaaaggaagcacgaagaagagggatgtcgttgaaacccaagttggctactcctggcttcccctcctgaaagacggaagggtggtgacaagcgagcagcacatcccggtctcggcgaaccttccttcgggctatcttggctaccaggagcttgggatgggcaggcattatggtccggaaattaaatgggtagatggaggcaagccactgctgaaaatttccactcatctggtttctacagtgtatactcaggatcagcatttacataattttttccagtactgtcagaaaaccgaatctggagcccaagccttaggaaacgaacttgtaaagtaccttaagagtctgcatgcgatggaaggccacgtgatgatcgccttcttgcccactatcctaaaccagctgttccgagtcctcaccagagccacacaggaagaagtcgcggttaacgtgactcgggtcattattcatgtggttgcccagtgccatgaggaaggattggagagccacttgaggtcatatgttaagtacgcgtataaggctgagccatatgttgcctctgaatacaagacagtgcatgaagaactgaccaaatccatgaccacgattctcaagccttctgccgatttcctcaccagcaacaaactactgaagtactcatggtttttctttgatgtactgatcaaatctatggctcagcatttgatagagaactccaaagttaagttgctgcgaaaccagagatttcctgcatcctatcatcatgcagtggaaaccgttgtaaatatgctgatgccacacatcactcagaagtttcgagataatccagaggcatctaagaacgcgaatcatagccttgctgtcttcatcaagagatgtttcaccttcatggacaggggctttgtcttcaagcagatcaacaactacattagctgttttgctcctggagacccaaagaccctctttgaatacaagtttgaatttctccgtgtagtgtgcaaccatgaacattatattccgttgaacttaccaatgccatttggaaaaggcaggattcaaagataccaagacctccagcttgactactcattaacagatgagttctgcagaaaccacttcttggtgggactgttactgagggaggtggggacagccctccaggagttccgggaggtccgtctgatcgccatcagtgtgctcaagaacctgctgataaagcattcttttgatgacagatatgcttcaaggagccatcaggcaaggatagccaccctctacctgcctctgtttggtctgctgattgaaaacgtccagcggatcaatgtgagggatgtgtcacccttccctgtgaacgcgggcatgactgtgaaggatgaatccctggctctaccagctgtgaatccgctggtgacgccgcagaagggaagcaccctggacaacagcctgcacaaggacctgctgggcgccatctccggcattgcttctccatatacaacctcaactccaaacatcaacagtgtgagaaatgctgattcgagaggatctctcataagcacagattcgggtaacagccttccagaaaggaatagtgagaagagcaattccctggataagcaccaacaaagtagcacattgggaaattccgtggttcgctgtgataaacttgaccagtctgagattaagagcctactgatgtgtttcctctacatcttaaagagcatgtctgatgatgctttgtttacatattggaacaaggcttcaacatctgaacttatggatttttttacaatatctgaagtctgcctgcaccagttccagtacatggggaagcgatacatagccagaacaggaatgatgcatgccagattgcagcagctgggcagcctggataactctctcacttttaaccacagctatggccactcggacgcagatgttctgcaccagtcattacttgaagccaacattgctactgaggtttgcctgacagctctggacacgctttctctatttacattggcgtttaagaaccagctcctggccgaccatggacataatcctctcatgaaaaaagtttttgatgtctacctgtgttttcttcaaaaacatcagtctgaaacggctttaaaaaatgtcttcactgccttaaggtccttaatttataagtttccctcaacattctatgaagggagagcggacatgtgtgcggctctgtgttacgagattctcaagtgctgtaactccaagctgagctccatcaggacggaggcctcccagctgctctacttcctgatgaggaacaactttgattacactggaaagaagtcctttgtccggacacatttgcaagtcatcatatctgtcagccagctgatagcagacgttgttggcattgggggaaccagattccagcagtccctgtccatcatcaacaactgtgccaacagtgaccggcttattaagcacaccagcttctcctctgatgtgaaggacttaaccaaaaggatacgcacggtgctaatggccaccgcccagatgaaggagcatgagaacgacccagagatgctggtggacctccagtacagcctggccaaatcctatgccagcacgcccgagctcaggaagacgtggctcgacagcatggccaggatccatgtcaaaaatggcgatctctcagaggcagcaatgtgctatgtccacgtaacagccctagtggcagaatatctcacacggaaagaagcagtccagtgggagccgccccttctcccccacagccatagcgcctgcctgaggaggagccggggaggcgtgtttagacaaggatgcaccgccttcagggtcattaccccaaacatcgacgaggaggcctccatgatggaagacgtggggatgcaggatgtccatttcaacgaggatgtgctgatggagctccttgagcagtgcgcagatggactctggaaagccgagcgctacgagctcatcgccgacatctacaaacttatcatccccatttatgagaagcggagggattttgagaggctggcccatctgtatgacacgctgcaccgggcctacagcaaagtgaccgaggtcatgcactcgggccgcaggcttctggggacctacttccgggtagccttcttcgggcaggcagcgcaataccagtttacagacagtgaaacagatgtggagggattctttgaagatgaagatggaaaggagtatatttacaaggaacccaaactcacaccgctgtcggaaatttctcagagactccttaaactgtactcggataaatttggttctgaaaatgtcaaaatgatacaggattctggcaaggtcaaccctaaggatctggattctaagtatgcatacatccaggtgactcacgtcatccccttctttgacgaaaaagagttgcaagaaaggaaaacagagtttgagagatcccacaacatccgccgcttcatgtttgagatgccatttacgcagaccgggaagaggcagggcggggtggaagagcagtgcaaacggcgcaccatcctgacagccatacactgcttcccttatgtgaagaagcgcatccctgtcatgtaccagcaccacactgacctgaaccccatcgaggtggccattgacgagatgagtaagaaggtggcggagctccggcagctgtgctcctcggccgaggtggacatgatcaaactgcagctcaaactccagggcagcgtgagtgttcaggtcaatgctggcccactagcatatgcgcgagctttcttagatgatacaaacacaaagcgatatcctgacaataaagtgaagctgcttaaggaagttttcaggcaatttgtggaagcttgcggtcaagccttagcggtaaacgaacgtctgattaaagaagaccagctcgagtatcaggaagaaatgaaagccaactacagggaaatggcgaaggagctttctgaaatcatgcatgagcaggtgagaagatctgccccctggaggagaagacgagcgtcttaccgaattcccttcacatcttcaacgccatcagtgggactccaacaagcacaatggttcacgggatgaccagctcgtcttcggtcgtgtgattacatctcatggcccgtgtgtggggacttgctttgtcatttgcaaactcaggatgctttccaaagccaatcactggggagaccgagcacagggaggaccaaggggaaggggagagaaaggaaataaagaacaacgttatttcttaacagactttctataggagttgtaagaaggtgcacatatttttttaaatctcactggcaatattcaaagttttcattgtgtcttaacaaaggtgtggtagacactcttgagctggacttagattttattcttccttgcagagtagtgttagaatagatggcctacagaaaaaaaaggttctgggatctacatggcagggagggctgcactgacattgatgcctgggggaccttttgcctcgaggctgagctggaaaatcttgaaaatattttttttttcctgtggcacattcaggttgaatacaagaactatttttgtgactagtttttgatgacctaagggaactgaccattgtaatttttgtaccagtgaaccaggagatttagtgcttttatattcatttccttgcatttaagaaaatatgaaagcttaaggaattatgtgagcttaaaactagtcaagcagtttagaaccaaaggcctatattaataaccgcaactatgctgaaaagtacaaagtagtacagtatattgttatgtacatatcattgttaatacagtcctggcattctgtacatatatgtattacatttctacatttttaatactcacatgggcttatgcattaagtttaattgtgataaatttgtgctgttccagtatatgcaatacactttaatgttttattcttgtacataaaaatgtgcaatatggagatgtatacagtctttactatattaggtttataaacagttttaagaatttcatccttttgccaaaatggtggagtatgtaattggtaaatcataaatcctgtggtgaatggtggtgtactttaaagctgtcaccatgttatattttcttttaagactttaatttagtaattttatatttgggaaaataaaggtttttaattttatttaactggaatcactgccctgctgtaattaaacattctgtaccacatctgtattaaaaagacattgctgaccatt

SEQ ID NO: 293153 - DNA, 7502 bp, Artificial Sequence
  derived and/or modified sequence
gcggccgggccgggccgcgggagcaggcggaggcggaggcggcgggggcaggaggatgtcgcagccgccgctgctccccgcctcggcggagactcggaagttcacccgggcgctgagtaagccgggcacggcggccgagctgcggcagagcgtgtctgaggtggtgcgcggctccgtgctcctggcaaagccaaagctaattgagccactcgactatgaaaatgtcatcgtccagaagaagactcagatcctgaacgactgtttacgggagatgctgctcttcccttacgatgactttcagacggccatcctgagacgacagggtcgatacatatgctcaacagtgcctgcgaaggcggaagaggaagcacagagcttgtttgttacagagtgcatcaaaacctataactctgactggcatcttgtgaactataaatatgaagattactcaggagagtttcgacagcttccgaacaaagtggtcaagttggataaacttccagttcatgtctatgaagttgacgaggaggtcgacaaagatgaggatgctgcctcccttggttcccagaagggtgggatcaccaagcatggctggctgtacaaaggcaacatgaacagtgccatcagcgtgaccatgaggtcatttaagagacgatttttccacctgattcaacttggcgatggatcctataatttgaatttttataaagatgaaaagatctccaaagaaccaaaaggatcaatatttctggattcctgtatgggtgtcgttcagaacaacaaagtcaggcgttttgcttttgagctcaagatgcaggacaaaagtagttatctcttggcagcagacagtgaagtggaaatggaagaatggatcacaattctaaataagatcctccagctcaactttgaagctgcaatgcaagaaaagcgaaatggcgactctcacgaagatgatgaacaaagcaaattggaaggttctggttccggtttagatagctacctgccggaacttgccaagagtgcaagagaagcagaaatcaaactgaaaagtgaaagcagagtcaaacttttttatttggacccagatgcccagaagcttgacttctcatcagctgagccagaagtgaagtcatttgaagagaagtttggaaaaaggatccttgtcaagtgcaatgatttatctttcaatttgcaatgctgtgttgccgaaaatgaagaaggacccactacaaatgttgaacctttctttgttactctatccctgtttgacataaaatacaaccggaagatttctgccgatttccacgtagacctgaaccatttctcagtgaggcaaatgctcgccaccacgtccccggcgctgatgaatggcagtgggcagagcccatctgtcctcaagggcatccttcatgaagccgccatgcagtatccgaagcagggaatattttcagtcacttgtcctcatccagatatatttcttgtggccagaattgaaaaagtccttcaggggagcatcacacattgcgctgagccatatatgaaaagttcagactcttctaaggtggcccagaaggtgctgaagaatgccaagcaggcatgccaaagactaggacagtatagaatgccatttgcttgggcagcaaggacattgtttaaggatgcatctggaaatcttgacaaaaatgccagattttctgccatctacaggcaagacagcaataagctatccaatgatgacatgctcaagttacttgcagactttcggaaacctgagaagatggctaagctcccagtgattttaggcaatctagacattacaattgataatgtttcctcagacttccctaattatgttaattcatcatacattcccacaaaacaatttgaaacctgcagtaaaactcccatcacgtttgaagtggaggaatttgtgccctgcataccaaaacacactcagccttacaccatctacaccaatcacctttacgtttatcctaagtacttgaaatacgacagtcagaagtcttttgccaaggctagaaatattgcgatttgcattgaattcaaagattcagatgaggaagactctcagccccttaagtgcatttatggcagacctggtgggccagttttcacaagaagcgcctttgctgcagttttacaccatcaccaaaacccagaattttatgatgagattaaaatagagttgcccactcagctgcatgaaaagcaccacctgttgctcacattcttccatgtcagctgtgacaactcaagtaaaggaagcacgaagaagagggatgtcgttgaaacccaagttggctactcctggcttcccctcctgaaagacggaagggtggtgacaagcgagcagcacatcccggtctcggcgaaccttccttcgggctatcttggctaccaggagcttgggatgggcaggcattatggtccggaaattaaatgggtagatggaggcaagccactgctgaaaatttccactcatctggtttctacagtgtatactcaggatcagcatttacataattttttccagtactgtcagaaaaccgaatctggagcccaagccttaggaaacgaacttgtaaagtaccttaagagtctgcatgcgatggaaggccacgtgatgatcgccttcttgcccactatcctaaaccagctgttccgagtcctcaccagagccacacaggaagaagtcgcggttaacgtgactcgggtcattattcatgtggttgcccagtgccatgaggaaggattggagagccacttgaggtcatatgttaagtacgcgtataaggctgagccatatgttgcctctgaatacaagacagtgcatgaagaactgaccaaatccatgaccacgattctcaagccttctgccgatttcctcaccagcaacaaactactgaagtactcatggtttttctttgatgtactgatcaaatctatggctcagcatttgatagagaactccaaagttaagttgctgcgaaaccagagatttcctgcatcctatcatcatgcagtggaaaccgttgtaaatatgctgatgccacacatcactcagaagtttcgagataatccagaggcatctaagaacgcgaatcatagccttgctgtcttcatcaagagatgtttcaccttcatggacaggggctttgtcttcaagcagatcaacaactacattagctgttttgctcctggagacccaaagaccctctttgaatacaagtttgaatttctccgtgtagtgtgcaaccatgaacattatattccgttgaacttaccaatgccatttggaaaaggcaggattcaaagataccaagacctccagcttgactactcattaacagatgagttctgcagaaaccacttcttggtgggactgttactgagggaggtggggacagccctccaggagttccgggaggtccgtctgatcgccatcagtgtgctcaagaacctgctgataaagcattcttttgatgacagatatgcttcaaggagccatcaggcaaggatagccaccctctacctgcctctgtttggtctgctgattgaaaacgtccagcggatcaatgtgagggatgtgtcacccttccctgtgaacgcgggcatgactgtgaaggatgaatccctggctctaccagctgtgaatccgctggtgacgccgcagaagggaagcaccctggacaacagcctgcacaaggacctgctgggcgccatctccggcattgcttctccatatacaacctcaactccaaacatcaacagtgtgagaaatgctgattcgagaggatctctcataagcacagattcgggtaacagccttccagaaaggaatagtgagaagagcaattccctggataagcaccaacaaagtagcacattgggaaattccgtggttcgctgtgataaacttgaccagtctgagattaagagcctactgatgtgtttcctctacatcttaaagagcatgtctgatgatgctttgtttacatattggaacaaggcttcaacatctgaacttatggatttttttacaatatctgaagtctgcctgcaccagttccagtacatggggaagcgatacatagccagtgtgagaaagatatcaagtgtgcttggaatttctgtagacaatggctatggccactcggacgcagatgttctgcaccagtcattacttgaagccaacattgctactgaggtttgcctgacagctctggacacgctttctctatttacattggcgtttaagaaccagctcctggccgaccatggacataatcctctcatgaaaaaagtttttgatgtctacctgtgttttcttcaaaaacatcagtctgaaacggctttaaaaaatgtcttcactgccttaaggtccttaatttataagtttccctcaacattctatgaagggagagcggacatgtgtgcggctctgtgttacgagattctcaagtgctgtaactccaagctgagctccatcaggacggaggcctcccagctgctctacttcctgatgaggaacaactttgattacactggaaagaagtcctttgtccggacacatttgcaagtcatcatatctgtcagccagctgatagcagacgttgttggcattgggggaaccagattccagcagtccctgtccatcatcaacaactgtgccaacagtgaccggcttattaagcacaccagcttctcctctgatgtgaaggacttaaccaaaaggatacgcacggtgctaatggccaccgcccagatgaaggagcatgagaacgacccagagatgctggtggacctccagtacagcctggccaaatcctatgccagcacgcccgagctcaggaagacgtggctcgacagcatggccaggatccatgtcaaaaatggcgatctctcagaggcagcaatgtgctatgtccacgtaacagccctagtggcagaatatctcacacggaaagaagcagtccagtgggagccgccccttctcccccacagccatagcgcctgcctgaggaggagccggggaggcgtgtttagacaaggatgcaccgccttcagggtcattaccccaaacatcgacgaggaggcctccatgatggaagacgtggggatgcaggatgtccatttcaacgaggatgtgctgatggagctccttgagcagtgcgcagatggactctggaaagccgagcgctacgagctcatcgccgacatctacaaacttatcatccccatttatgagaagcggagggattttgagaggctggcccatctgtatgacacgctgcaccgggcctacagcaaagtgaccgaggtcatgcactcgggccgcaggcttctggggacctacttccgggtagccttcttcgggcaggcagcgcaataccagtttacagacagtgaaacagatgtggagggattctttgaagatgaagatggaaaggagtatatttacaaggaacccaaactcacaccgctgtcggaaatttctcagagactccttaaactgtactcggataaatttggttctgaaaatgtcaaaatgatacaggattctggcaaggtcaaccctaaggatctggattctaagtatgcatacatccaggtgactcacgtcatccccttctttgacgaaaaagagttgcaagaaaggaaaacagagtttgagagatcccacaacatccgccgcttcatgtttgagatgccatttacgcagaccgggaagaggcagggcggggtggaagagcagtgcaaacggcgcaccatcctgacagccatacactgcttcccttatgtgaagaagcgcatccctgtcatgtaccagcaccacactgacctgaaccccatcgaggtggccattgacgagatgagtaagaaggtggcggagctccggcagctgtgctcctcggccgaggtggacatgatcaaactgcagctcaaactccagggcagcgtgagtgttcaggtcaatgctggcccactagcatatgcgcgagctttcttagatgatacaaacacaaagcgatatcctgacaataaagtgaagctgcttaaggaagttttcaggcaatttgtggaagcttgcggtcaagccttagcggtaaacgaacgtctgattaaagaagaccagctcgagtatcaggaagaaatgaaagccaactacagggaaatggcgaaggagctttctgaaatcatgcatgagcaggtgagaagatctgccccctggaggagaagacgagcgtcttaccgaattcccttcacatcttcaacgccatcagtgggactccaacaagcacaatggttcacgggatgaccagctcgtcttcggtcgtgtgattacatctcatggcccgtgtgtggggacttgctttgtcatttgcaaactcaggatgctttccaaagccaatcactggggagaccgagcacagggaggaccaaggggaaggggagagaaaggaaataaagaacaacgttatttcttaacagactttctataggagttgtaagaaggtgcacatatttttttaaatctcactggcaatattcaaagttttcattgtgtcttaacaaaggtgtggtagacactcttgagctggacttagattttattcttccttgcagagtagtgttagaatagatggcctacagaaaaaaaaggttctgggatctacatggcagggagggctgcactgacattgatgcctgggggaccttttgcctcgaggctgagctggaaaatcttgaaaatattttttttttcctgtggcacattcaggttgaatacaagaactatttttgtgactagtttttgatgacctaagggaactgaccattgtaatttttgtaccagtgaaccaggagatttagtgcttttatattcatttccttgcatttaagaaaatatgaaagcttaaggaattatgtgagcttaaaactagtcaagcagtttagaaccaaaggcctatattaataaccgcaactatgctgaaaagtacaaagtagtacagtatattgttatgtacatatcattgttaatacagtcctggcattctgtacatatatgtattacatttctacatttttaatactcacatgggcttatgcattaagtttaattgtgataaatttgtgctgttccagtatatgcaatacactttaatgttttattcttgtacataaaaatgtgcaatatggagatgtatacagtctttactatattaggtttataaacagttttaagaatttcatccttttgccaaaatggtggagtatgtaattggtaaatcataaatcctgtggtgaatggtggtgtactttaaagctgtcaccatgttatattttcttttaagactttaatttagtaattttatatttgggaaaataaaggtttttaattttatttaactggaatcactgccctgctgtaattaaacattctgtaccacatctgtattaaaaagacattgctgaccatt

SEQ ID NO: 293154 - DNA, 6282 bp, Artificial Sequence
  derived and/or modified sequence
atgagccaacctccacttctgccagccagcgcagaaactcgtaaatttacaagagcgctctcaaagcctggaactgccgccgagctgagacaaagcgtctctgaggttgtaaggggaagcgtgctcctcgccaagcctaaactgattgaacctcttgattacgaaaacgtcattgttcaaaaaaaaacccagattctaaatgactgcctccgtgaaatgctccttttcccgtacgatgatttccaaaccgccatcctcagaagacaggggcgctacatctgcagtactgtccctgcgaaggccgaggaggaggcacagagcctgtttgtcaccgagtgtatcaagacctataatagcgactggcatctggtgaactataaatacgaggactactccggtgagttccgacagctgcccaataaagtggttaaactcgacaagcttccggtgcacgtgtacgaagtagatgaagaggtggacaaagatgaggatgcagctagcctagggagtcagaaaggaggtatcacaaaacatggatggttatacaaaggaaacatgaatagcgcaattagcgttacaatgagatcttttaaacggcgcttcttccacctcattcagctgggtgatgggtcatataacctcaacttctataaagacgagaagatttctaaagaaccaaagggctcaatcttcttagactcatgcatgggggttgttcaaaacaacaaagtcaggcgcttcgcgttcgaacttaagatgcaggataaatcaagttatctgctggcagcggactctgaggtcgaaatggaggaatggattactatcctgaataagatcttacagctgaactttgaggccgctatgcaggagaaaaggaacggcgacagtcacgaagacgacgagcagtcgaagctggaaggtagcggcagcggcctcgattcataccttcctgagctagctaagagcgcaagagaggcggagattaagcttaagagcgaatcccgtgtaaaactcttttacctggatcccgacgcacagaagctggacttcagctcagcagagcccgaagtaaaatcttttgaggagaaattcggaaaacgaatcctggttaagtgcaacgatctgagctttaatttgcagtgttgcgtggcagaaaacgaagaaggaccaacaaccaatgttgaacctttctttgtgacactttctctgttcgacatcaagtacaaccgcaaaattagcgctgatttccacgtagaccttaaccatttcagtgttaggcaaatgctagccaccacatcaccggctcttatgaacgggtctgggcagtccccatccgtgctcaagggcattctccatgaagctgccatgcaataccccaagcagggcatcttttcagtgacgtgcccacacccagacatcttcctggtcgcccgtatcgaaaaggttctccagggtagcattacacattgcgccgagccttatatgaaatcatcagacagcagtaaagtggctcagaaagtccttaagaacgcaaaacaggcgtgtcagagactgggccagtatagaatgccattcgcctgggccgcaaggaccctctttaaggacgcatccggcaatctcgataaaaacgccagattctcagcaatttaccgtcaggacagtaataagctaagcaacgatgacatgttgaaactgcttgcagacttcaggaagcctgaaaagatggccaagttacctgtgatacttggtaacctggatatcacgatagacaatgtcagctccgatttccccaactatgtaaacagcagttacattcccactaaacaatttgaaacatgcagcaagacccccatcacatttgaggtggaggaattcgtgccctgtattcccaaacatacccagccttataccatttatactaaccacctgtacgtgtacccaaagtacttaaagtatgactcccagaagtcattcgccaaggcgcgcaatattgctatctgcatcgaattcaaggattccgatgaggaggactcacaaccactgaagtgtatatacgggagacctgggggccctgtttttactcggtctgccttcgcagctgtactgcatcaccatcagaacccagaattctatgacgagatcaagattgagctacctacccaactccatgaaaagcatcacctgttactgacctttttccatgtctcctgtgataattctagcaaggggtcaacaaaaaagcgtgatgtggtggagacccaggttggatactcctggctgcccctgctgaaagatggcagagttgtcactagtgaacagcatatccctgtgagtgctaatctcccgagtgggtacctgggatatcaggaactggggatggggagacattacggccccgagatcaagtgggttgatgggggcaaacccttgcttaagattagtacccatttggtctccaccgtatatacccaggatcagcatcttcataattttttccagtattgtcagaaaactgagtctggggcccaggctttgggcaatgaattggtaaagtacttgaagagccttcatgcaatggagggtcacgtgatgattgcttttctgcccacaatactcaatcagctgttccgagtcctgacacgcgccacacaggaagaggtagccgtcaatgtgacaagggtaatcattcatgtcgtcgcccaatgccatgaggaaggattggagagtcatttgaggagctacgtgaaatacgcgtataaggcagagccctacgtggcttcagagtacaaaacggtccacgaagaactcaccaagagtatgacaaccatattaaagccatccgccgatttcctcaccagcaacaagttactcaagtactcctggtttttctttgacgtcctgattaagagtatggcccaacaccttatagaaaattctaaagtcaagctacttcggaatcagagattcccagcctcttatcaccacgccgtagagactgttgtcaatatgctgatgccccatataacacagaaattccgcgacaaccctgaagcttctaagaatgcgaaccacagcctggccgtgtttatcaagcgctgctttacgttcatggacagaggtttcgtgttcaagcagattaacaattacattagttgcttcgcccctggtgatccaaaaactctgttcgagtacaagtttgaatttttgagagttgtctgcaatcatgagcactatatccccctgaaccttccaatgccttttggtaagggaagaatacagcgctatcaagatttacagctcgactatagtctgacagatgagttttgtaggaaccactttttggtgggactgctgctgcgcgaagtaggaacagccctgcaggaattcagggaggtgcgacttatagctatcagcgttctcaaaaatctgttgattaaacactctttcgacgacagatatgcgtctcgatctcaccaagccaggatagccaccctgtaccttcctttgtttgggctgcttattgagaatgttcaacgcataaacgtgcgggacgtttcgcctttccccgtaaacgctgggatgactgtgaaagatgagtccctggcacttcccgccgttaatcctctggtaacaccacagaagggctcaaccttagataattctctacataaagacctgctcggcgccatctccggcattgctagcccatatacaacgtccacgcccaacataaattccgtgcgtaacgccgacagtcgcggtagtctaattagcacagatagtggaaatagcctccctgagcggaactctgagaagtcgaacagcctggataagcaccagcaatcttcgaccttgggcaactccgtcgtaaggtgtgataagctggatcagtctgagatcaagagcctgttgatgtgcttcctctacattctcaagtccatgtctgacgacgctctcttcacctattggaacaaggcttcaaccagtgaactgatggacttttttactatcagtgaggtgtgtcttcaccagtttcagtacatgggcaaacgatacattgcaaggacaggaatgatgcacgcgcgtctgcagcaactcgggtctttggataattctttaacattcaatcacagctacggccactcagatgctgacgtgctgcaccagagtctgctggaggcaaatatcgcaactgaggtgtgcctgacagccctggacaccctaagcctttttaccctagcatttaagaaccagctgcttgcggatcatggtcataaccctctaatgaaaaaagtttttgacgtgtacctgtgttttctgcagaagcatcagtcggaaacagccctgaagaacgtgttcacagctctgagatcactcatctataagttccccagtactttctacgagggcagagctgatatgtgcgcagcactatgttacgaaattttaaaatgttgtaactctaaactgtcctccatacggacggaggcctctcagctcctgtattttcttatgcgaaataacttcgattacaccggcaaaaagagcttcgtaagaacgcatctccaggtcattatatctgtgagccagctcatcgcagacgtcgtaggtataggtgggacgcgctttcagcagagcctgtcaatcatcaataactgcgctaactctgacaggctgataaaacacacaagcttttcctccgacgtgaaagacctgacgaaaagaatacgcactgtactaatggctactgcacaaatgaaggagcatgaaaatgatcctgaaatgttagtggatctccagtacagcctggccaagagttatgcctctacacccgagctgagaaaaacctggcttgactccatggctaggattcatgtgaagaacggggacttgagcgaggccgcaatgtgttacgtgcacgtgactgccctcgtagctgaatacctgaccagaaaggaggcagtgcagtgggaacctcccctgcttccccactcgcacagcgcctgtctgcggcgatcacgcggaggggtgttccgccagggatgcaccgcatttcgtgtcatcactcctaatattgatgaggaggcgagcatgatggaggacgttggcatgcaggatgttcatttcaatgaagatgtgctcatggagcttctagagcagtgtgctgacgggctgtggaaagcggaacgttatgagctgattgctgatatctacaagcttattattcccatatacgaaaaacgtcgggactttgagcggctggcacacctgtatgacactctgcacagggcatattcgaaagtgactgaggtcatgcactccggcaggcgactgcttggaacttactttcgggttgctttcttcggccagggattcttcgaggacgaggacggaaaggaatatatctataaagagcccaagctgactcccctgagtgaaatctctcagaggctgctcaaactttatagcgataagttcggttccgagaatgtcaaaatgatccaggattcggggaaagttaatccaaaagatctggacagcaaatacgcttatattcaagttacgcatgtcatcccattttttgacgaaaaggaactccaggaacggaaaacagagttcgagcgcagccacaatatcaggagatttatgtttgagatgcctttcactcagaccgggaagaggcaggggggggtggaggagcaatgcaagaggaggactattctgaccgccatacattgtttcccttatgtcaagaaacgcattccagtgatgtaccagcatcacaccgacctgaatcctattgaagtggctatcgatgagatgagcaaaaaagtggcggaattacgacagttgtgttcctctgctgaggtggacatgatcaaattgcaactgaaactgcaaggctccgttagcgttcaggtgaatgctgggcctcttgcttatgctcgcgcttttctcgatgacacaaatactaagagatatccagataataaagtgaaactccttaaggaggtttttaggcagttcgtggaagcttgcggccaggcgctagccgtcaacgagagactcattaaggaagaccagcttgaataccaagaggagatgaaagccaactatcgtgagatggcaaaagaactgtccgagatcatgcatgagcagatttgcccacttgaggaaaagacatcggtcctgcccaactcgctccatattttcaacgccattagcggaacaccgacaagcactatggtgcatgggatgacctcttcttccagtgttgtctag

SEQ ID NO: 293155 - DNA, 6309 bp, Artificial Sequence
  derived and/or modified sequence
atgagccagcccccccttttgcctgcctcagccgaaacgcgcaaatttacccgcgcgctgtcaaagcctggaacagcggccgagctgcgacagtccgtatccgaggtggttaggggctcagttctcctggccaagcccaaattaatagagcccctggactatgaaaatgttatagtgcaaaagaagacgcaaatcctgaatgattgtctgcgcgagatgctgctcttcccctacgatgacttccagaccgccatcctgaggcgacaaggcagatacatctgctcaaccgtgcccgccaaggctgaagaggaggcgcagagcttatttgtgactgagtgtatcaaaacctataactctgactggcatctggtgaactacaagtacgaggactactctggcgaatttcgtcagctgcccaacaaggtggttaagttggacaaactgcccgtacacgtgtacgaagttgacgaggaggttgacaaagacgaggatgcagcttccctgggaagccagaagggtggaataacaaaacatgggtggctttacaagggaaacatgaatagtgcgatctccgtcacaatgagatcattcaagcggcggttcttccatctgatacaactgggagacggcagctacaatctgaacttctacaaggatgaaaagatttcaaaagagccaaaaggatcaatattcctggactcttgcatgggggtggtgcagaataataaggtgcgccgattcgctttcgagttaaagatgcaggataagtctagctacctgctggcggccgacagcgaggtggaaatggaggagtggattaccatattgaataaaatcttgcagctgaatttcgaggctgctatgcaggagaaaaggaacggggactcccacgaagacgacgagcagtcaaaactcgaaggctctgggtctggactggattcttacctccctgagctcgcgaaaagcgcccgcgaggccgaaatcaaactgaaaagtgaatctagagtgaagctgttctatttggacccagacgctcagaagctggatttttcaagcgccgagcctgaggtgaagtcattcgaagagaaattcggcaaacggatcttggtaaagtgtaatgatctgagttttaacctgcagtgttgcgttgcagaaaatgaagagggcccaaccaccaatgttgagccctttttcgtcacgctgagtttgttcgacatcaagtataaccgaaagatttccgcagattttcacgtggatttaaaccatttttccgttagacagatgctagccacgacttcgccagctcttatgaacggaagcggtcaaagcccgtccgtattaaagggcatccttcatgaggccgctatgcagtatccaaagcaaggcatattcagcgtcacctgtccccatcctgatatttttctcgtggcaagaatcgagaaggtactgcagggaagcatcacacactgcgctgaaccttacatgaagtcctctgactcatctaaagtcgcacaaaaagtgctcaagaatgcgaagcaggcttgtcagcggcttggtcagtatcggatgccattcgcctgggcagcaaggaccttatttaaagatgccagcgggaacttggacaagaacgctcggtttagcgccatctatcgccaggattcgaacaagctctccaacgacgacatgctcaaactactggccgatttccgtaagcccgaaaagatggccaaattgcctgtgatcctgggcaatttggatatcaccatcgataatgtctccagcgatttcccgaattatgtcaactccagttatatccctactaaacaattcgagacttgtagcaaaacgccaatcaccttcgaggtggaagagtttgttccctgtattcctaagcatacccagccctatacaatatatacgaaccatctgtatgtgtatcctaagtatctcaagtacgactctcagaagagctttgcgaaggcgagaaatatagcgatatgcatcgaatttaaagactcagacgaagaagattcacagcccctgaagtgtatctacggacgccccggggggccagtttttacacgctccgcgtttgcagccgtgctccatcaccaccagaatccagaattctatgacgagattaagatcgagctccctacccaactccatgaaaaacaccacctgctgctgacattctttcacgtgtcatgtgacaacagctctaaagggtctaccaagaagagggatgtcgtcgagacacaggtgggttatagttggctacccttactgaaggatgggcgcgtcgttacctccgaacaacatattcctgtctctgctaatttgccaagtggctatttaggctatcaggagctgggcatggggcgacactatggtcccgaaatcaaatgggtggacgggggtaaaccactgctgaagatctccactcacttggtgagcacagtgtatactcaggaccagcacctccataacttcttccagtattgccaaaagaccgagtccggagcgcaagccctggggaacgagttagtgaaatacctcaagtcccttcatgccatggagggccacgtgatgatcgccttcctgccaacaatcctgaaccagctgtttcgggtattaacacgggccacacaggaggaggtagcagtaaacgtgactagagtcataatccatgtggttgcccaatgccatgaggagggtctcgagtcacatctccgctcatatgtgaagtatgcatacaaggccgagccatacgtggcctctgagtataagaccgtgcacgaagagttaacaaagagcatgactactattctcaaacctagcgccgattttttgaccagtaataagctgctcaaatatagctggttcttcttcgacgtgctgatcaagagcatggcccaacacttaatcgaaaatagcaaggttaagctcctgagaaaccagagatttcccgcatcatatcaccacgcagtcgagaccgtggtgaacatgctcatgccacacattacacagaagttcagggataaccctgaggcgagcaaaaatgctaatcactccctcgccgtgttcatcaaacggtgcttcacattcatggacagaggctttgtgtttaaacaaattaacaattatataagttgttttgccccaggggaccctaaaaccctgtttgagtacaaattcgagttcctgcgagtggtgtgcaatcacgagcactatattccgttgaatctgcccatgcctttcggtaagggcaggatacaaaggtaccaggacctccagctggactactccttaacagatgagttttgccgcaatcactttctcgtgggactgctgctgcgggaggtggggactgccttgcaggagttcagggaagttaggctgatcgctatttcagtgttgaagaatctgctcattaagcactcttttgacgaccggtacgccagcaggagccatcaggcccgaatcgccaccctgtacctgccactgtttggtctgctcattgagaacgtgcagagaattaatgtgcgagatgtgagccccttccctgtgaatgccgggatgactgtcaaggacgagagcttggccctccctgccgtgaacccactcgtcactccccagaaagggtcaacactagacaacagtcttcacaaggatctgctgggcgccatttcaggaatcgcgtctccctacacaacttcaaccccgaacattaactccgtgaggaatgcggactctcgcggcagtctgatttccacagacagtggcaatagtctccccgagcgcaattcggaaaagtccaacagcctggataaacaccaacagtcatcaacactggggaatagtgtagttaggtgcgacaaattggatcaatctgaaataaagtcactgctgatgtgtttcctgtacatactcaaatccatgagcgacgacgctctgtttacctattggaacaaggcatccacaagcgagctgatggactttttcacaatttcagaggtatgtcttcaccaattccaatacatgggcaaaagatacattgcaagaaccgggatgatgcatgcgcgtctgcaacaactgggctctctggataattctttaacgtttaaccattcgtacgggcattccgatgcagacgtcttgcaccagagcctgttagaagccaacatcgcaaccgaggtgtgtcttaccgcactggatacactgtcccttttcaccttagcattcaaaaaccagctgttagccgaccacggccataaccctctgatgaagaaggtatttgacgtctatttatgttttctccaaaaacaccagagcgaaaccgcccttaaaaatgtgtttacagccctaagaagcctgatctacaaattcccaagtacattttatgaaggacgggccgacatgtgtgccgcactgtgttatgagatcctgaaatgctgtaactctaagctgtcatccatacgcactgaagcatctcagctattgtatttcttgatgcgaaacaatttcgattacacagggaagaaatcatttgtcaggacccacctccaggtaataatatcagtgtcgcagttgattgcagatgtggttggaattggcggaacacggttccagcagtcactgtctattattaataactgcgcaaatagtgaccggttaattaagcacacatccttctcctcggatgtgaaggatttgactaaaaggattaggacggtacttatggccaccgcacaaatgaaggaacacgagaatgatccggagatgcttgtggatctacaatactcactcgctaaatcttatgcctccacccctgaactgagaaaaacctggttggactcgatggcacggatccacgtcaagaatggagacctttctgaggcagcaatgtgctatgtgcacgtaacagcacttgttgctgagtacttgactcgaaaggaagccgtccaatgggaaccacccctgctgccacattcgcattccgcctgcctgagacgctccagaggcggtgtattcagacaggggtgtaccgcctttagggttatcacgcctaacatcgatgaggaggcttccatgatggaggacgtggggatgcaggatgttcattttaacgaagatgtgcttatggaactgttggaacaatgcgccgatgggctctggaaggcggagcgatacgaattgattgctgatatttacaagctgattattccaatttacgaaaagcgcagggattttgaacgcctcgcccatctttacgacacactgcatcgtgcatacagcaaagttacagaggttatgcactctgggcgccgcttactgggcacatacttccgcgttgcattcttcggacaggctgcccaatatcagtttactgacagcgagacagatgtggagggcttctttgaagatgaagacggtaaagagtatatctacaaggagccaaaactcacccctctgtccgagatttctcaaagacttttgaagttatatagcgacaagttcggctcggagaatgtaaagatgatccaggactctgggaaggtcaatcccaaagatctggacagtaaatacgcttacatccaggttacccacgtgatcccattctttgatgagaaagaactgcaggaacgcaaaactgaattcgagagatcccataatatcagacgctttatgttcgagatgccatttactcagacaggcaaaaggcaaggtggagtggaagagcagtgtaaaagaaggacaattctaacagcaatccattgttttccatatgtcaagaagcggatccctgtgatgtaccaacaccacaccgacctcaacccaatagaagttgcaattgatgaaatgagtaaaaaggtcgcggagctccgtcagctgtgttcttctgctgaggtggatatgattaagttacaattaaagttacaggggtctgtcagcgtccaggtaaatgcgggtccgctcgcgtacgcccgagccttcctggatgatacgaacactaagcgttacccagataataaggttaaactcctgaaagaggtgttccgccagtttgtggaggcatgtggacaggcattagccgttaatgagagactgataaaggaggaccagctggaatatcaagaagaaatgaaagctaactaccgggaaatggctaaagagctttctgagattatgcacgagcaagtgcggcgctcagctccttggcggaggcgcagagcctcttaccgcatcccctttacctctagcacgccaagtgtggggctccagcaggctcagtggttcacagggtag

SEQ ID NO: 293156 - DNA, 6285 bp, Artificial Sequence
  derived and/or modified sequence
atgtctcagcctccattgttgccagcctcagcagagactagaaaattcacccgcgccctctccaaaccaggcaccgctgccgaattaagacagtctgtgtcagaggtggtgcgaggctccgtgcttcttgcaaaacccaaactgattgagcccctcgactacgagaacgtgattgttcagaagaaaacacagatcctgaatgattgcttgcgcgagatgcttctgttcccctacgacgacttccagaccgctatcctgcgcagacagggtagatacatatgtagcacagtccccgctaaagcagaggaggaagcccagagcctatttgtgactgagtgtataaaaacatataacagtgactggcacctcgttaattacaagtatgaggactacagtggtgaattcagacagcttcctaacaaagtagttaagctggataagctgcccgtccacgtgtatgaagtggacgaagaggttgacaaagacgaggacgcagcgagtctgggttcccagaagggaggcatcaccaaacatgggtggctctacaaaggaaacatgaactccgcaatttctgtgacaatgcgctcatttaagaggagattttttcacctgattcagctcggcgatgggagttataacctcaacttttacaaggatgagaaaatctctaaagaacctaaggggagcattttcttagattcttgcatgggtgtggtgcagaacaataaggtgaggcgctttgctttcgaactaaagatgcaggataaaagctcataccttctcgctgctgactcagaagtggaaatggaggaatggattaccattctcaacaagatactgcaactgaattttgaagcggcgatgcaggagaaaagaaacggggactcacacgaagacgacgagcagagtaagctggagggcagcggcagcgggctggactcatatctcccagaactggctaagtcagcgagagaagctgagatcaagctgaagagcgaaagcagggtcaaactgttctatctcgatcccgacgcacagaaactggatttcagcagtgcagaacctgaggttaaaagtttcgaggaaaaatttggcaagcggatcttagtaaaatgcaatgacctctcctttaatctgcaatgttgcgtggccgaaaacgaagagggcccaaccacaaacgtggagcctttctttgtcacactgagtctctttgacataaagtacaatcgtaagattagtgcggatttccatgtggatctgaaccatttctccgtgagacagatgctcgctaccaccagtccggcgctgatgaatggatccggacagtctcccagcgtcctgaagggtattcttcacgaagccgccatgcagtatccaaaacagggaatcttcagcgtgacgtgtccccacccggatatcttcctagtggcgcgaatcgagaaagtgctccagggaagcatcacgcactgcgccgagccatacatgaagtctagcgactcgtcaaaggtggcccaaaaggttctgaagaatgcgaagcaggcttgccaaagactcggccagtatcgaatgccattcgcatgggccgctagaacgttgtttaaagacgcttcaggcaatctggataagaatgcaagattcagtgctatttacagacaggatagtaacaagctcagcaatgatgacatgctgaagcttctggcagatttccgcaagccagaaaaaatggcgaaactgcctgtgatcctggggaacctggacattactatagacaatgtaagctcagactttcctaactacgtaaactcctcctacattcccactaagcaatttgaaacctgctctaaaacccccatcaccttcgaggtggaagagttcgtcccctgtatccccaaacacacccagccatatacaatctacacaaaccatctttacgtttaccccaagtatctaaagtatgattctcagaagtcttttgccaaggcaaggaatatcgccatttgcatcgagtttaaagattcagatgaagaggacagtcagccattaaaatgcatttacggccgacccggcggacccgtgtttactcgatctgctttcgctgccgtcctacaccaccaccagaaccctgagttttacgacgagatcaaaatcgagcttcctacccagctccacgagaaacatcacctcctgctgacattcttccatgtatcctgtgacaacagctctaaagggagcacaaaaaaaagagacgttgtggaaacacaggttggatattcctggctccccctgctcaaggacggccgcgtggtcacgtctgagcagcacatccccgtatcagcaaatctgcctagcgggtatctgggctatcaggagctgggtatgggtaggcactacggccctgaaatcaagtgggtggatggggggaagcccctcctgaagatcagcacgcatttagtgtccaccgtgtacacacaagaccaacatctccacaacttttttcagtactgtcagaagaccgagtcaggggcccaggccctgggcaatgaactggtcaaataccttaaatctctgcatgcaatggagggccatgtaatgattgcctttttacctacaattctcaatcagctttttagggttttaacgcgagctacacaagaggaagttgccgtcaacgtgacccgcgtgattatccacgtggtcgctcagtgtcatgaagaaggcctggaatcacacctgcgatcatacgtcaagtacgcctacaaggcagagccctatgtggcaagcgaatacaaaaccgtccatgaggagcttaccaaatctatgactacaatcctgaaaccttcagcagacttcctgacatcaaataaactgttgaagtactcctggttctttttcgatgtgctgattaaaagcatggctcagcacctaattgagaattcgaaagtaaagcttctgagaaaccagcgttttccagcttcctaccatcatgccgtggagacagttgtgaatatgctcatgcctcacatcacgcaaaagtttcgcgacaacccagaagcaagcaaaaatgccaaccacagcctggcagtgtttatcaagagatgttttacgttcatggacagagggtttgtctttaagcagatcaataactatataagctgctttgcccctggcgatcccaagactttgtttgagtataagttcgagttcctgcgcgttgtttgcaaccacgaacactacatccctttgaacctgccaatgccatttggcaagggccgcattcagcgctaccaggatttacagctggactactcactcacggatgaattctgccgaaaccactttttagttggtctgcttctcagggaggtcggcaccgcactgcaggaattccgggaagtcaggctgatcgccatctcagtgctcaagaacttactgattaagcactcttttgacgaccggtacgcctctcgctcccaccaggctcgcatcgcaactctgtatcttccattgtttggattgcttatcgagaatgtacagaggattaacgtccgagacgtgtctcctttcccagtaaatgccggaatgaccgttaaagatgaatctctcgcactccccgccgtgaatccactggtaactcctcagaaggggagtacccttgacaactcgctgcacaaagacttacttggcgctatatctggaatcgcctccccctatacaaccagcacacctaatatcaattctgtacgcaacgctgattctagaggcagccttatctcaaccgactccgggaattcactccctgagagaaactccgagaagagcaacagcctcgacaagcaccagcagagctccacccttggcaattccgttgttaggtgtgataagctcgatcagagcgagataaaatcccttcttatgtgttttctatacattctgaagagcatgagcgatgacgccctgtttacatattggaacaaagcttctactagcgaactgatggatttcttcactatttccgaggtctgcctacaccagttccagtacatggggaagcggtatattgcttcggtgcgcaagattagtagtgttttaggtatctcggtggacaatgggtatgggcattccgacgccgatgttctgcatcagtccctgctggaggctaacatcgccaccgaggtctgcttgaccgcgctagataccctgtcactttttaccctcgcattcaagaatcagctgctggccgaccacggccacaaccctttgatgaaaaaagttttcgacgtctacctctgtttcttgcagaaacaccagtcggagacagccctgaaaaatgtgtttacggccttgcgttcattaatctacaagtttccaagtactttttacgaaggtagagcagatatgtgcgccgctttatgttacgagatcttgaagtgttgtaacagcaagcttagttcaatccgtaccgaagcttcccaactgctatatttcctcatgcgcaataactttgactacaccgggaagaaatctttcgtgcgcacccacctacaagtgatcattagcgtaagccagctgatcgccgatgtcgtaggcattggtggaacgcgatttcagcagtctcttagtattattaataactgcgcaaactctgaccgcctaataaagcataccagcttctcttcagacgtgaaggatctgacgaagcggattcgcactgtgcttatggcaacagcccagatgaaggaacacgaaaacgaccccgagatgctggtggatctacaatacagccttgccaaatcctatgcatctacacccgagcttagaaagacatggctggatagcatggccaggattcatgtgaagaatggagatctaagtgaagcggccatgtgctacgtgcacgtgactgctctggtggctgagtatctgactcggaaggaggcagtccagtgggaaccccctctgctaccacactctcattctgcatgcctgaggaggagccggggcggagtgtttcggcagggctgtaccgcatttagggtgataaccccaaatatcgatgaggaagcctccatgatggaggacgttggcatgcaggatgtgcattttaatgaggatgttttaatggaacttcttgagcagtgcgccgacgggttatggaaggctgagagatacgagctgattgctgatatttataaactcatcattccaatttacgagaaaagacgcgacttcgaaagactggcacacctgtatgataccctgcacagagcttattctaaagtcaccgaggtgatgcattccggcaggaggttactggggacctattttcgcgtagccttctttgggcaagccgcccaatatcagtttacagatagtgaaactgacgtggagggtttcttcgaagatgaggatgggaaagaatacatttacaaagaacccaaactgaccccattgtctgagatttcgcaacgactcctgaagttgtattctgacaagtttggatccgaaaatgtaaaaatgatccaggactctgggaaagttaaccctaaggacctggactcaaagtacgcgtacatacaggtgacacacgtgattcccttttttgacgagaaggagctccaggaaaggaaaactgagtttgagcggagtcacaacatccgccgctttatgttcgagatgccttttacacagaccggaaaacgccagggaggcgtggaggagcagtgcaagcgtcgcacaatactgacagccatccactgtttcccctatgttaaaaagcggattcctgtcatgtaccaacatcacacagatctcaaccccatagaggttgctattgacgagatgtcaaagaaggttgctgagcttcgacaactttgttccagcgccgaagtggacatgattaaactacaactgaagctgcaaggcagcgtgtctgtgcaggtgaacgctggcccactagcctacgccagagcattcctggacgataccaatacaaaaaggtaccctgacaacaaagttaaattgcttaaggaggtgtttcgtcagtttgtagaggcttgcgggcaagcactggccgtgaacgagagactcattaaggaagaccagctagaataccaggaagagatgaaagctaactaccgggaaatggccaaggagctttcagagattatgcatgagcaggttcggcgctcggccccatggagacgtcggcgtgcttcttatcgcatccctttcacatcctccacgccaagcgtgggtctccagcaggcgcaatggtttactggctag

SEQ ID NO: 293157 - DNA, 6282 bp, Artificial Sequence
  derived and/or modified sequence
atgagccagccccccctgctgcctgccagcgctgagaccaggaagttcacccgggccctgagcaagccaggcacagctgctgagctgcggcagagcgtgtctgaggtggtgcggggctctgtgctgctggccaagcccaagctgattgagcccctggactatgaaaatgtcatcgtgcagaagaagacccagatcctgaatgactgcctgcgggagatgctgctcttcccctatgatgacttccagacagccatcctgcggcggcagggccgctacatctgcagcacagtgcctgccaaggccgaggaggaggcccagagcctgtttgtgacagagtgcatcaagacctacaacagcgactggcacctggtgaactacaagtatgaggactacagcggggagttccggcagctgcccaacaaggtggtgaagctggacaagctgcctgtgcacgtgtatgaggtggatgaggaggtggacaaggatgaagatgctgccagcctgggcagccagaagggcggcatcaccaagcacggctggctgtacaagggcaacatgaacagcgccatctctgtgaccatgaggagcttcaagaggcgcttcttccacctgatccagctgggagatggcagctacaacctgaacttctacaaggatgagaagatcagcaaggagcccaagggcagcatcttcctggacagctgcatgggcgtggtgcagaacaacaaggtgagaagatttgcctttgagctgaagatgcaggacaagagcagctacctgctggccgctgacagcgaggtggagatggaggagtggatcaccatcctgaacaagatcctgcagctgaactttgaggccgccatgcaggagaagagaaatggagacagccatgaagatgatgagcagagcaagctggagggcagcggcagcggcctggacagctacctgcctgagctggccaagagcgcccgggaggccgagatcaagctgaagtctgagagccgggtgaagctgttctacctggaccctgatgcccagaagctggacttcagcagcgctgagcctgaggtgaagagctttgaggagaagtttgggaagaggatcctggtgaagtgcaatgacctgtccttcaacctgcagtgctgcgtggctgaaaatgaggagggccccaccaccaacgtggagcccttctttgtgaccctgagcctgtttgacatcaagtacaacaggaagatctctgctgacttccacgtggacctgaaccacttctctgtgcggcagatgctggccaccaccagccctgccctgatgaatggcagcggccagagccccagcgtgctgaagggcatcctgcacgaggccgccatgcagtaccccaagcagggcatcttctctgtgacctgcccccacccagacatcttcctggtggccagaattgagaaggtgctgcagggcagcatcacccactgtgccgagccctacatgaagagcagtgacagcagcaaggtggcccagaaggtgctgaagaatgccaagcaggcctgccagaggctgggccagtacaggatgccctttgcctgggccgcccggaccctcttcaaggatgccagcggcaacctggacaagaatgcccgcttcagcgccatctaccggcaggacagcaacaagctgagcaatgatgacatgctgaagctgctggccgacttcaggaagccagagaagatggccaagctgcctgtgatcctgggcaacctggacatcaccatcgacaacgtgtccagtgacttccccaactacgtgaacagcagctacatccccaccaagcagtttgagacctgcagcaagacccccatcacctttgaggtggaggagtttgtgccctgcatccccaagcacacccagccctacaccatctacaccaaccacctgtatgtgtaccccaagtacctgaagtatgacagccagaagagctttgccaaggccaggaacatcgccatctgcatcgagttcaaggacagtgatgaggaggacagccagcccctgaagtgcatctacggccggcctgggggccctgtgttcaccaggtctgcctttgctgctgtgctgcaccaccaccagaaccctgagttctatgatgagatcaagattgagctgcccacccagctgcacgagaagcaccacctgctgctgaccttcttccacgtgtcctgtgacaacagcagcaagggcagcaccaagaagagagatgtggtggagacccaggtgggctacagctggctgcccctgctgaaggatggccgggtggtgaccagcgagcagcacatccctgtgtctgccaacctgcccagcggctacctgggctaccaggagctgggcatgggccgccactacggccctgagatcaagtgggtggatggcggcaagcccctgctgaagatcagcacccacctggtgtccacagtgtacacccaggaccagcacctgcacaacttcttccagtactgccagaagacagagagcggggcccaggccctgggcaatgagctggtgaagtacctgaagagcctgcacgccatggagggccacgtgatgattgccttcctgcccaccatcctgaaccagctgttccgggtgctgacccgggccacccaggaggaggtggccgtgaatgtgaccagggtcatcatccacgtggtggcccagtgccacgaggagggcctggagagccacctgcggagctatgtgaagtatgcctacaaggccgagccctacgtggccagcgagtacaagacagtgcatgaggagctgaccaagtccatgaccaccatcctgaagcccagcgctgacttcctgaccagcaacaagctgctgaagtacagctggttcttctttgatgtgctgatcaagtccatggcccagcacctgattgagaacagcaaggtgaagctgctgaggaaccagcgcttccctgccagctaccaccacgctgtggagaccgtggtgaacatgctgatgccccacatcacccagaagttccgggacaaccctgaggccagcaagaatgccaaccacagcctggccgtgttcatcaagcgctgcttcaccttcatggaccggggctttgtgttcaagcagatcaacaactacatcagctgctttgcccctggggaccccaagaccctgtttgagtacaagtttgagttcctgcgggtggtgtgcaaccacgagcactacatccccctgaacctgcccatgccctttgggaagggccgcatccagcgctaccaggacctgcagctggactacagcctgacagatgagttctgcaggaaccacttcctggtgggcctgctgctgcgggaggtgggcacagccctgcaggagttccgggaggtgcggctgattgccatctctgtgctgaagaacctgctgatcaagcacagctttgatgacagatatgccagccgcagccaccaggcccgcatcgccaccctgtacctgcccctgtttggcctgctgattgaaaatgtgcagaggatcaacgtgagagatgtgagccccttccctgtgaatgccggcatgacagtgaaggatgagagcctggccctgcctgctgtgaaccccctggtgaccccccagaagggcagcaccctggacaacagcctgcacaaggacctgctgggcgccatctctggaattgccagcccctacaccaccagcacccccaacatcaacagcgtgagaaatgctgacagccggggcagcctcatcagcacagattctggcaacagcctgcctgagaggaacagcgagaagagcaacagcctggacaagcaccagcagagcagcaccctgggcaacagcgtggtgcgctgtgacaagctggaccagagcgagatcaagagcctgctgatgtgcttcctgtacatcctgaagtccatgtctgatgatgccctcttcacctactggaacaaggccagcaccagcgagctgatggacttcttcaccatcagcgaggtgtgcctgcaccagttccagtacatgggcaagcgctacatcgccaggacaggcatgatgcacgcccggctgcagcagctgggcagcctggacaacagcctgaccttcaaccacagctatggccacagtgatgctgatgtgctgcaccagagcctgctggaggccaacatcgccacagaggtgtgcctgacagccctggacaccctgagcctcttcaccctggccttcaagaaccagctgctggccgaccacggccacaaccccctgatgaagaaggtgtttgatgtgtacctgtgcttcctgcagaagcaccagagcgagacagccctgaagaatgtgttcaccgccctgcggagcctcatctacaagttccccagcaccttctatgagggccgggctgacatgtgtgccgccctgtgctatgagatcctgaagtgctgcaacagcaagctgagcagcatcagaacagaggccagccagctgctgtacttcctgatgaggaacaactttgactacaccgggaagaagagctttgtgaggacccacctgcaggtgatcatctctgtgtcccagctgattgctgatgtggtgggcatcggcggcacccgcttccagcagagcctgagcatcatcaacaactgtgccaacagcgacaggctcatcaagcacaccagcttcagcagtgatgtgaaggacctgaccaagaggatcagaacagtgctgatggccacagcccagatgaaggagcatgaaaatgaccctgagatgctggtggacctgcagtacagcctggccaagagctatgccagcaccccagagctgaggaagacctggctggacagcatggcccgcatccacgtgaagaatggagacctgtctgaggccgccatgtgctacgtgcacgtgacagccctggtggccgagtacctgaccaggaaggaggccgtgcagtgggagccccccctgctgccccacagccacagcgcctgcctgcggcgcagcagaggaggagtcttccggcagggctgcacagccttccgggtcatcacccccaacattgatgaggaggcctccatgatggaggatgtgggcatgcaggatgtgcacttcaatgaagatgtgctgatggagctgctggagcagtgtgctgatggcctgtggaaggccgagagatatgagctgattgctgacatctacaagctgatcatccccatctatgagaagaggcgggactttgagcggctggcccacctgtatgacaccctgcaccgggcctacagcaaggtgacagaggtgatgcacagcggccggcggctgctgggcacctacttccgggtggccttcttcggccagggcttctttgaagatgaagatggcaaggagtacatctacaaggagcccaagctgacccccctgtctgagatcagccagaggctgctgaagctgtacagcgacaagtttggaagtgaaaatgtgaagatgatccaggacagcggcaaggtgaaccccaaggacctggacagcaaatatgcctacatccaggtgacccacgtgatccccttctttgatgagaaggagctgcaggagaggaagacagaatttgagaggagccacaacatccgccgcttcatgtttgagatgcccttcacccagacaggcaagaggcagggcggcgtggaggagcagtgcaagaggaggaccatcctgacagccatccactgcttcccctacgtgaagaagagaattcctgtgatgtaccagcaccacacagacctgaaccccatcgaggtggccattgatgagatgagcaagaaggtggccgagctgcggcagctgtgcagcagcgctgaggtggacatgatcaagctgcagctgaagctgcagggctctgtgtctgtgcaggtgaatgccggccccctggcctatgcccgggccttcctggatgacaccaacaccaagcgctacccagacaacaaggtgaagctgctgaaggaggtgttccggcagtttgtggaggcctgtggccaggccctggccgtgaatgaaagactcatcaaggaggaccagctggagtaccaggaggagatgaaggccaactaccgggagatggccaaggagctgtctgagatcatgcatgagcagatctgccccctggaggagaagacctctgtgctgcccaacagcctgcacatcttcaatgccatcagcggcacccccaccagcaccatggtgcacggcatgaccagcagcagctctgtggtgtag

SEQ ID NO: 293158 - DNA, 6309 bp, Artificial Sequence
  derived and/or modified sequence
atgagccagccccccctgctgcctgccagcgctgagaccaggaagttcacccgggccctgagcaagccaggcacagctgctgagctgcggcagagcgtgtctgaggtggtgcggggctctgtgctgctggccaagcccaagctgattgagcccctggactatgaaaatgtcatcgtgcagaagaagacccagatcctgaatgactgcctgcgggagatgctgctcttcccctatgatgacttccagacagccatcctgcggcggcagggccgctacatctgcagcacagtgcctgccaaggccgaggaggaggcccagagcctgtttgtgacagagtgcatcaagacctacaacagcgactggcacctggtgaactacaagtatgaggactacagcggggagttccggcagctgcccaacaaggtggtgaagctggacaagctgcctgtgcacgtgtatgaggtggatgaggaggtggacaaggatgaagatgctgccagcctgggcagccagaagggcggcatcaccaagcacggctggctgtacaagggcaacatgaacagcgccatctctgtgaccatgaggagcttcaagaggcgcttcttccacctgatccagctgggagatggcagctacaacctgaacttctacaaggatgagaagatcagcaaggagcccaagggcagcatcttcctggacagctgcatgggcgtggtgcagaacaacaaggtgagaagatttgcctttgagctgaagatgcaggacaagagcagctacctgctggccgctgacagcgaggtggagatggaggagtggatcaccatcctgaacaagatcctgcagctgaactttgaggccgccatgcaggagaagagaaatggagacagccatgaagatgatgagcagagcaagctggagggcagcggcagcggcctggacagctacctgcctgagctggccaagagcgcccgggaggccgagatcaagctgaagtctgagagccgggtgaagctgttctacctggaccctgatgcccagaagctggacttcagcagcgctgagcctgaggtgaagagctttgaggagaagtttgggaagaggatcctggtgaagtgcaatgacctgtccttcaacctgcagtgctgcgtggctgaaaatgaggagggccccaccaccaacgtggagcccttctttgtgaccctgagcctgtttgacatcaagtacaacaggaagatctctgctgacttccacgtggacctgaaccacttctctgtgcggcagatgctggccaccaccagccctgccctgatgaatggcagcggccagagccccagcgtgctgaagggcatcctgcacgaggccgccatgcagtaccccaagcagggcatcttctctgtgacctgcccccacccagacatcttcctggtggccagaattgagaaggtgctgcagggcagcatcacccactgtgccgagccctacatgaagagcagtgacagcagcaaggtggcccagaaggtgctgaagaatgccaagcaggcctgccagaggctgggccagtacaggatgccctttgcctgggccgcccggaccctcttcaaggatgccagcggcaacctggacaagaatgcccgcttcagcgccatctaccggcaggacagcaacaagctgagcaatgatgacatgctgaagctgctggccgacttcaggaagccagagaagatggccaagctgcctgtgatcctgggcaacctggacatcaccatcgacaacgtgtccagtgacttccccaactacgtgaacagcagctacatccccaccaagcagtttgagacctgcagcaagacccccatcacctttgaggtggaggagtttgtgccctgcatccccaagcacacccagccctacaccatctacaccaaccacctgtatgtgtaccccaagtacctgaagtatgacagccagaagagctttgccaaggccaggaacatcgccatctgcatcgagttcaaggacagtgatgaggaggacagccagcccctgaagtgcatctacggccggcctgggggccctgtgttcaccaggtctgcctttgctgctgtgctgcaccaccaccagaaccctgagttctatgatgagatcaagattgagctgcccacccagctgcacgagaagcaccacctgctgctgaccttcttccacgtgtcctgtgacaacagcagcaagggcagcaccaagaagagagatgtggtggagacccaggtgggctacagctggctgcccctgctgaaggatggccgggtggtgaccagcgagcagcacatccctgtgtctgccaacctgcccagcggctacctgggctaccaggagctgggcatgggccgccactacggccctgagatcaagtgggtggatggcggcaagcccctgctgaagatcagcacccacctggtgtccacagtgtacacccaggaccagcacctgcacaacttcttccagtactgccagaagacagagagcggggcccaggccctgggcaatgagctggtgaagtacctgaagagcctgcacgccatggagggccacgtgatgattgccttcctgcccaccatcctgaaccagctgttccgggtgctgacccgggccacccaggaggaggtggccgtgaatgtgaccagggtcatcatccacgtggtggcccagtgccacgaggagggcctggagagccacctgcggagctatgtgaagtatgcctacaaggccgagccctacgtggccagcgagtacaagacagtgcatgaggagctgaccaagtccatgaccaccatcctgaagcccagcgctgacttcctgaccagcaacaagctgctgaagtacagctggttcttctttgatgtgctgatcaagtccatggcccagcacctgattgagaacagcaaggtgaagctgctgaggaaccagcgcttccctgccagctaccaccacgctgtggagaccgtggtgaacatgctgatgccccacatcacccagaagttccgggacaaccctgaggccagcaagaatgccaaccacagcctggccgtgttcatcaagcgctgcttcaccttcatggaccggggctttgtgttcaagcagatcaacaactacatcagctgctttgcccctggggaccccaagaccctgtttgagtacaagtttgagttcctgcgggtggtgtgcaaccacgagcactacatccccctgaacctgcccatgccctttgggaagggccgcatccagcgctaccaggacctgcagctggactacagcctgacagatgagttctgcaggaaccacttcctggtgggcctgctgctgcgggaggtgggcacagccctgcaggagttccgggaggtgcggctgattgccatctctgtgctgaagaacctgctgatcaagcacagctttgatgacagatatgccagccgcagccaccaggcccgcatcgccaccctgtacctgcccctgtttggcctgctgattgaaaatgtgcagaggatcaacgtgagagatgtgagccccttccctgtgaatgccggcatgacagtgaaggatgagagcctggccctgcctgctgtgaaccccctggtgaccccccagaagggcagcaccctggacaacagcctgcacaaggacctgctgggcgccatctctggaattgccagcccctacaccaccagcacccccaacatcaacagcgtgagaaatgctgacagccggggcagcctcatcagcacagattctggcaacagcctgcctgagaggaacagcgagaagagcaacagcctggacaagcaccagcagagcagcaccctgggcaacagcgtggtgcgctgtgacaagctggaccagagcgagatcaagagcctgctgatgtgcttcctgtacatcctgaagtccatgtctgatgatgccctcttcacctactggaacaaggccagcaccagcgagctgatggacttcttcaccatcagcgaggtgtgcctgcaccagttccagtacatgggcaagcgctacatcgccaggacaggcatgatgcacgcccggctgcagcagctgggcagcctggacaacagcctgaccttcaaccacagctatggccacagtgatgctgatgtgctgcaccagagcctgctggaggccaacatcgccacagaggtgtgcctgacagccctggacaccctgagcctcttcaccctggccttcaagaaccagctgctggccgaccacggccacaaccccctgatgaagaaggtgtttgatgtgtacctgtgcttcctgcagaagcaccagagcgagacagccctgaagaatgtgttcaccgccctgcggagcctcatctacaagttccccagcaccttctatgagggccgggctgacatgtgtgccgccctgtgctatgagatcctgaagtgctgcaacagcaagctgagcagcatcagaacagaggccagccagctgctgtacttcctgatgaggaacaactttgactacaccgggaagaagagctttgtgaggacccacctgcaggtgatcatctctgtgtcccagctgattgctgatgtggtgggcatcggcggcacccgcttccagcagagcctgagcatcatcaacaactgtgccaacagcgacaggctcatcaagcacaccagcttcagcagtgatgtgaaggacctgaccaagaggatcagaacagtgctgatggccacagcccagatgaaggagcatgaaaatgaccctgagatgctggtggacctgcagtacagcctggccaagagctatgccagcaccccagagctgaggaagacctggctggacagcatggcccgcatccacgtgaagaatggagacctgtctgaggccgccatgtgctacgtgcacgtgacagccctggtggccgagtacctgaccaggaaggaggccgtgcagtgggagccccccctgctgccccacagccacagcgcctgcctgcggcgcagcagaggaggagtcttccggcagggctgcacagccttccgggtcatcacccccaacattgatgaggaggcctccatgatggaggatgtgggcatgcaggatgtgcacttcaatgaagatgtgctgatggagctgctggagcagtgtgctgatggcctgtggaaggccgagagatatgagctgattgctgacatctacaagctgatcatccccatctatgagaagaggcgggactttgagcggctggcccacctgtatgacaccctgcaccgggcctacagcaaggtgacagaggtgatgcacagcggccggcggctgctgggcacctacttccgggtggccttcttcggccaggccgcccagtaccagttcacagattctgaaacagatgtggagggcttctttgaagatgaagatggcaaggagtacatctacaaggagcccaagctgacccccctgtctgagatcagccagaggctgctgaagctgtacagcgacaagtttggaagtgaaaatgtgaagatgatccaggacagcggcaaggtgaaccccaaggacctggacagcaaatatgcctacatccaggtgacccacgtgatccccttctttgatgagaaggagctgcaggagaggaagacagaatttgagaggagccacaacatccgccgcttcatgtttgagatgcccttcacccagacaggcaagaggcagggcggcgtggaggagcagtgcaagaggaggaccatcctgacagccatccactgcttcccctacgtgaagaagagaattcctgtgatgtaccagcaccacacagacctgaaccccatcgaggtggccattgatgagatgagcaagaaggtggccgagctgcggcagctgtgcagcagcgctgaggtggacatgatcaagctgcagctgaagctgcagggctctgtgtctgtgcaggtgaatgccggccccctggcctatgcccgggccttcctggatgacaccaacaccaagcgctacccagacaacaaggtgaagctgctgaaggaggtgttccggcagtttgtggaggcctgtggccaggccctggccgtgaatgaaagactcatcaaggaggaccagctggagtaccaggaggagatgaaggccaactaccgggagatggccaaggagctgtctgagatcatgcatgagcaggtgagaagaagtgccccctggaggagaagaagagccagctaccgcatccccttcaccagcagcaccccatctgtgggcctgcagcaggcccagtggttcaccggctag

SEQ ID NO: 293159 - DNA, 6285 bp, Artificial Sequence
  derived and/or modified sequence
atgagccagccccccctgctgcctgccagcgctgagaccaggaagttcacccgggccctgagcaagccaggcacagctgctgagctgcggcagagcgtgtctgaggtggtgcggggctctgtgctgctggccaagcccaagctgattgagcccctggactatgaaaatgtcatcgtgcagaagaagacccagatcctgaatgactgcctgcgggagatgctgctcttcccctatgatgacttccagacagccatcctgcggcggcagggccgctacatctgcagcacagtgcctgccaaggccgaggaggaggcccagagcctgtttgtgacagagtgcatcaagacctacaacagcgactggcacctggtgaactacaagtatgaggactacagcggggagttccggcagctgcccaacaaggtggtgaagctggacaagctgcctgtgcacgtgtatgaggtggatgaggaggtggacaaggatgaagatgctgccagcctgggcagccagaagggcggcatcaccaagcacggctggctgtacaagggcaacatgaacagcgccatctctgtgaccatgaggagcttcaagaggcgcttcttccacctgatccagctgggagatggcagctacaacctgaacttctacaaggatgagaagatcagcaaggagcccaagggcagcatcttcctggacagctgcatgggcgtggtgcagaacaacaaggtgagaagatttgcctttgagctgaagatgcaggacaagagcagctacctgctggccgctgacagcgaggtggagatggaggagtggatcaccatcctgaacaagatcctgcagctgaactttgaggccgccatgcaggagaagagaaatggagacagccatgaagatgatgagcagagcaagctggagggcagcggcagcggcctggacagctacctgcctgagctggccaagagcgcccgggaggccgagatcaagctgaagtctgagagccgggtgaagctgttctacctggaccctgatgcccagaagctggacttcagcagcgctgagcctgaggtgaagagctttgaggagaagtttgggaagaggatcctggtgaagtgcaatgacctgtccttcaacctgcagtgctgcgtggctgaaaatgaggagggccccaccaccaacgtggagcccttctttgtgaccctgagcctgtttgacatcaagtacaacaggaagatctctgctgacttccacgtggacctgaaccacttctctgtgcggcagatgctggccaccaccagccctgccctgatgaatggcagcggccagagccccagcgtgctgaagggcatcctgcacgaggccgccatgcagtaccccaagcagggcatcttctctgtgacctgcccccacccagacatcttcctggtggccagaattgagaaggtgctgcagggcagcatcacccactgtgccgagccctacatgaagagcagtgacagcagcaaggtggcccagaaggtgctgaagaatgccaagcaggcctgccagaggctgggccagtacaggatgccctttgcctgggccgcccggaccctcttcaaggatgccagcggcaacctggacaagaatgcccgcttcagcgccatctaccggcaggacagcaacaagctgagcaatgatgacatgctgaagctgctggccgacttcaggaagccagagaagatggccaagctgcctgtgatcctgggcaacctggacatcaccatcgacaacgtgtccagtgacttccccaactacgtgaacagcagctacatccccaccaagcagtttgagacctgcagcaagacccccatcacctttgaggtggaggagtttgtgccctgcatccccaagcacacccagccctacaccatctacaccaaccacctgtatgtgtaccccaagtacctgaagtatgacagccagaagagctttgccaaggccaggaacatcgccatctgcatcgagttcaaggacagtgatgaggaggacagccagcccctgaagtgcatctacggccggcctgggggccctgtgttcaccaggtctgcctttgctgctgtgctgcaccaccaccagaaccctgagttctatgatgagatcaagattgagctgcccacccagctgcacgagaagcaccacctgctgctgaccttcttccacgtgtcctgtgacaacagcagcaagggcagcaccaagaagagagatgtggtggagacccaggtgggctacagctggctgcccctgctgaaggatggccgggtggtgaccagcgagcagcacatccctgtgtctgccaacctgcccagcggctacctgggctaccaggagctgggcatgggccgccactacggccctgagatcaagtgggtggatggcggcaagcccctgctgaagatcagcacccacctggtgtccacagtgtacacccaggaccagcacctgcacaacttcttccagtactgccagaagacagagagcggggcccaggccctgggcaatgagctggtgaagtacctgaagagcctgcacgccatggagggccacgtgatgattgccttcctgcccaccatcctgaaccagctgttccgggtgctgacccgggccacccaggaggaggtggccgtgaatgtgaccagggtcatcatccacgtggtggcccagtgccacgaggagggcctggagagccacctgcggagctatgtgaagtatgcctacaaggccgagccctacgtggccagcgagtacaagacagtgcatgaggagctgaccaagtccatgaccaccatcctgaagcccagcgctgacttcctgaccagcaacaagctgctgaagtacagctggttcttctttgatgtgctgatcaagtccatggcccagcacctgattgagaacagcaaggtgaagctgctgaggaaccagcgcttccctgccagctaccaccacgctgtggagaccgtggtgaacatgctgatgccccacatcacccagaagttccgggacaaccctgaggccagcaagaatgccaaccacagcctggccgtgttcatcaagcgctgcttcaccttcatggaccggggctttgtgttcaagcagatcaacaactacatcagctgctttgcccctggggaccccaagaccctgtttgagtacaagtttgagttcctgcgggtggtgtgcaaccacgagcactacatccccctgaacctgcccatgccctttgggaagggccgcatccagcgctaccaggacctgcagctggactacagcctgacagatgagttctgcaggaaccacttcctggtgggcctgctgctgcgggaggtgggcacagccctgcaggagttccgggaggtgcggctgattgccatctctgtgctgaagaacctgctgatcaagcacagctttgatgacagatatgccagccgcagccaccaggcccgcatcgccaccctgtacctgcccctgtttggcctgctgattgaaaatgtgcagaggatcaacgtgagagatgtgagccccttccctgtgaatgccggcatgacagtgaaggatgagagcctggccctgcctgctgtgaaccccctggtgaccccccagaagggcagcaccctggacaacagcctgcacaaggacctgctgggcgccatctctggaattgccagcccctacaccaccagcacccccaacatcaacagcgtgagaaatgctgacagccggggcagcctcatcagcacagattctggcaacagcctgcctgagaggaacagcgagaagagcaacagcctggacaagcaccagcagagcagcaccctgggcaacagcgtggtgcgctgtgacaagctggaccagagcgagatcaagagcctgctgatgtgcttcctgtacatcctgaagtccatgtctgatgatgccctcttcacctactggaacaaggccagcaccagcgagctgatggacttcttcaccatcagcgaggtgtgcctgcaccagttccagtacatgggcaagcgctacatcgcctctgtgaggaagatcagctctgtgctgggcatctctgtggacaatggctacggccacagtgatgctgatgtgctgcaccagagcctgctggaggccaacatcgccacagaggtgtgcctgacagccctggacaccctgagcctcttcaccctggccttcaagaaccagctgctggccgaccacggccacaaccccctgatgaagaaggtgtttgatgtgtacctgtgcttcctgcagaagcaccagagcgagacagccctgaagaatgtgttcaccgccctgcggagcctcatctacaagttccccagcaccttctatgagggccgggctgacatgtgtgccgccctgtgctatgagatcctgaagtgctgcaacagcaagctgagcagcatcagaacagaggccagccagctgctgtacttcctgatgaggaacaactttgactacaccgggaagaagagctttgtgaggacccacctgcaggtgatcatctctgtgtcccagctgattgctgatgtggtgggcatcggcggcacccgcttccagcagagcctgagcatcatcaacaactgtgccaacagcgacaggctcatcaagcacaccagcttcagcagtgatgtgaaggacctgaccaagaggatcagaacagtgctgatggccacagcccagatgaaggagcatgaaaatgaccctgagatgctggtggacctgcagtacagcctggccaagagctatgccagcaccccagagctgaggaagacctggctggacagcatggcccgcatccacgtgaagaatggagacctgtctgaggccgccatgtgctacgtgcacgtgacagccctggtggccgagtacctgaccaggaaggaggccgtgcagtgggagccccccctgctgccccacagccacagcgcctgcctgcggcgcagcagaggaggagtcttccggcagggctgcacagccttccgggtcatcacccccaacattgatgaggaggcctccatgatggaggatgtgggcatgcaggatgtgcacttcaatgaagatgtgctgatggagctgctggagcagtgtgctgatggcctgtggaaggccgagagatatgagctgattgctgacatctacaagctgatcatccccatctatgagaagaggcgggactttgagcggctggcccacctgtatgacaccctgcaccgggcctacagcaaggtgacagaggtgatgcacagcggccggcggctgctgggcacctacttccgggtggccttcttcggccaggccgcccagtaccagttcacagattctgaaacagatgtggagggcttctttgaagatgaagatggcaaggagtacatctacaaggagcccaagctgacccccctgtctgagatcagccagaggctgctgaagctgtacagcgacaagtttggaagtgaaaatgtgaagatgatccaggacagcggcaaggtgaaccccaaggacctggacagcaaatatgcctacatccaggtgacccacgtgatccccttctttgatgagaaggagctgcaggagaggaagacagaatttgagaggagccacaacatccgccgcttcatgtttgagatgcccttcacccagacaggcaagaggcagggcggcgtggaggagcagtgcaagaggaggaccatcctgacagccatccactgcttcccctacgtgaagaagagaattcctgtgatgtaccagcaccacacagacctgaaccccatcgaggtggccattgatgagatgagcaagaaggtggccgagctgcggcagctgtgcagcagcgctgaggtggacatgatcaagctgcagctgaagctgcagggctctgtgtctgtgcaggtgaatgccggccccctggcctatgcccgggccttcctggatgacaccaacaccaagcgctacccagacaacaaggtgaagctgctgaaggaggtgttccggcagtttgtggaggcctgtggccaggccctggccgtgaatgaaagactcatcaaggaggaccagctggagtaccaggaggagatgaaggccaactaccgggagatggccaaggagctgtctgagatcatgcatgagcaggtgagaagaagtgccccctggaggagaagaagagccagctaccgcatccccttcaccagcagcaccccatctgtgggcctgcagcaggcccagtggttcaccggctag

SEQ ID NO: 293160 - DNA, 6282 bp, Artificial Sequence
  derived and/or modified sequence
atgagccagccccccctgctgcccgccagcgccgagacccggaagttcacccgcgccctgagtaaacctggaacagcagccgagctaaggcaatccgttagcgaagttgtgcggggtagcgttcttctcgccaagccaaagttaattgagcccctggactacgaaaatgtgattgtccaaaaaaaaacccagatcctgaatgactgccttcgcgagatgctgctgtttccctacgacgactttcaaactgccattttaaggaggcagggccgttacatttgttcaacagtgcctgcaaaggccgaggaggaggctcagtccctgttcgtcacggaatgtattaagacatacaactccgattggcatcttgttaattacaagtatgaagactacagtggtgagtttcgacagttgccaaacaaggtcgtaaaattggacaagctccccgtccacgtttatgaagtggatgaagaagtggacaaggatgaagatgctgctagcctggggtcccagaagggagggatcactaaacacggctggctgtacaaggggaatatgaattcagcaatcagcgtgacgatgcgtagctttaagcggcggttcttccaccttatccagctgggtgatggaagttataatctgaacttctataaggatgaaaaaatctctaaggaacctaagggatccattttcctagactcttgtatgggagtcgtgcaaaataataaagtgagacgattcgcatttgagctgaaaatgcaggacaaatctagttaccttctggctgcggactctgaggtggagatggaagaatggattactattctgaacaagatactccagttgaatttcgaggctgcaatgcaagagaaacgcaacggcgacagtcatgaagatgacgagcagtctaagctggagggctctgggtctgggttagattcatatctcccagaactagccaagtcagcccgcgaagcagagatcaaactcaagtccgaatcacgcgtgaagctgttctacctggatcctgacgctcagaagctagatttttctagcgcagaacccgaggttaaaagctttgaagaaaagtttggaaagcgcatcctggttaaatgcaatgatttgtccttcaaccttcagtgctgtgttgccgaaaatgaagagggtccaacaacgaatgtggaaccgttctttgtgactttgagtctgttcgatataaaatataaccgtaaaatttcagccgatttccacgttgatttgaaccatttttcagtgaggcagatgctcgccacaaccagtcccgccttgatgaacggctcaggacagagcccctctgtactaaagggcatcctccacgaggcagccatgcagtatcccaaacagggtatttttagcgtgacgtgtcctcacccagacatttttctagtggccagaattgagaaagtcctccagggttcgatcacccattgcgccgagccttatatgaagagtagtgacagtagcaaagtggcacagaaggtgctgaaaaacgctaagcaggcatgtcagaggctaggtcagtaccgtatgcctttcgcttgggccgcccgtactctgttcaaggatgcctccggtaacctggacaaaaacgcgcgattttctgcaatctaccgtcaggattctaacaagctgtccaatgacgatatgctgaagctgctcgctgacttccgtaaaccagaaaagatggccaaactgcccgtcatactgggcaatctggacataactatcgataatgtatctagcgattttccaaattatgtaaactccagctatatcccaaccaagcagttcgaaacctgcagtaagacaccaataacttttgaggtcgaggaattcgtgccatgcattcccaaacatactcagccttacacaatctacacaaatcacttatacgtatatccaaagtaccttaaatacgacagccagaaatcattcgccaaagctcgcaacattgccatctgtatcgaatttaaggactcagatgaggaggactcccagcctctcaagtgtatttatggacgacccggaggaccagtgttcacacgcagcgccttcgccgcagtgctccatcatcaccagaatccagaattttatgacgagatcaagatcgaactgcccacccaactgcatgaaaagcaccacctccttctgacctttttccacgtcagttgtgacaactcaagcaaaggcagcaccaagaaacgagatgtggtagaaacgcaggtcgggtactcttggttaccactgttgaaagatggacgggtggtgaccagtgagcagcacatccctgtgtctgcaaacctgccctcggggtacttgggctaccaggagctgggtatgggccgacactatgggcctgagattaagtgggtggacggagggaagccccttcttaagataagcacgcatctcgtcagtactgtctatacgcaagaccagcatctgcacaatttctttcagtattgccagaaaaccgagtccggagcccaggcactcggcaacgaactagtgaagtacctgaaatcgctgcacgctatggaaggacacgttatgatcgcattcctacccaccattctgaatcagctgttcagggtccttacccgagccactcaggaagaggtagcagtcaatgttacccgggtgattatacatgtagtggcccagtgccacgaagagggcttggagagccacctaaggtcctatgtaaagtacgcatataaggctgaaccctatgttgcatccgaatacaaaacggttcatgaggagttaactaagtctatgacaacaatattaaaacccagcgcagactttctaacttctaataaacttctgaaatacagctggtttttctttgacgtcctcataaagtcaatggcacagcatcttatagaaaactctaaggtgaagctgctacggaaccagaggttccccgcaagctatcaccacgcagtggagactgttgtcaatatgctcatgccccacataacacaaaagtttcgcgacaatccagaggcaagcaaaaacgcaaatcactcgttggccgtgttcattaaaaggtgcttcacattcatggaccgaggattcgtgtttaagcagattaataattatatttcttgctttgcccccggcgaccctaaaactttatttgagtataagtttgagttcctgcgggtagtctgtaatcacgaacattatatccctctgaatctgccaatgccatttggaaaagggcgcatacaaaggtatcaggacctccagttggactactctttgaccgacgaattctgcaggaaccacttcctggtgggactgctgctgagggaagtgggcaccgcactccaggagttccgcgaggtgaggctcatagcgatcagcgtgttgaagaacctgctcatcaaacactcctttgacgataggtatgcttccaggagtcatcaggccagaatagccactttatacttacccttatttgggctgctcatagaaaacgtgcagcgcatcaatgttcgggatgtgtctccatttcctgtcaacgctggtatgactgtgaaagatgaatctctcgctcttcccgctgttaacccgctggtgacaccacaaaaaggctcaaccttagataactccctgcacaaggaccttcttggggctattagtggcattgcgtccccttataccacatctacaccaaatattaactctgtaaggaatgctgattctcgaggctcgctgatttccacggacagtggcaatagcttgcccgagagaaactcggaaaagtccaattctctggataagcaccagcaaagttccacactgggcaactccgtggtgagatgcgataaattggatcaatcagagattaaatctctgctgatgtgcttcctatatattctcaaaagcatgagcgacgacgccctgttcacttactggaacaaggcctcgacatccgagctgatggattttttcactatcagtgaggtgtgtctgcatcagttccaatatatgggcaaacgctacatagcccgaacaggtatgatgcatgccagactacagcagttaggtagtctagacaattctctcaccttcaatcactcatacgggcattcagatgcagacgtcttgcaccaaagtctgctggaggctaatatcgccaccgaggtgtgcttgaccgctttagataccttgagccttttcacactggccttcaaaaatcagcttctggccgatcacggccacaatcctctcatgaagaaggtctttgatgtgtacttatgtttcctccagaaacaccagagcgagactgcactaaagaacgtcttcactgcattgaggagccttatttataagttccccagcacattctacgagggacgagcagatatgtgcgcggccctctgctatgagatcctgaaatgttgcaactccaaactctctagtatcaggacagaggcttctcaactgctgtatttcctgatgcggaacaatttcgattatacaggtaagaaatctttcgtcagaactcatcttcaggtaattattagtgttagtcaacttatcgctgatgttgtgggaataggtggtacccggtttcagcagtcactatctattatcaataattgcgccaactccgatcggctcattaagcacaccagcttttcatcggacgtgaaggacctgaccaaaaggattcggaccgttcttatggccacggcccaaatgaaggagcatgaaaatgaccccgagatgctggtcgacttacagtactccctggcaaagtcttacgccagtactcctgaactgagaaaaacctggttggacagcatggcaagaatccacgtgaaaaacggggatttgtccgaggccgctatgtgctatgtccacgtcacagccctggtagctgagtatctcactcgtaaggaggcagtccaatgggaaccccccctcctgccacacagccactcggcgtgcctcagaaggagcagagggggcgtgttcagacagggatgcacagcctttcgagtcataactcccaacattgatgaagaggcttctatgatggaggacgtagggatgcaggacgtacattttaatgaggacgtgcttatggaattattggagcaatgtgcggacggtctatggaaggctgagcgctatgagctgattgccgacatttacaaattgatcattcccatttatgaaaagaggcgggatttcgaaaggcttgcgcacctgtacgatacccttcatcgggcctacagcaaggtgaccgaggttatgcacagcggccgccgactgctgggaacttatttccgcgttgcttttttcggacaaggctttttcgaggacgaagacggaaaggaatatatttacaaggaacctaagctgacgccactcagcgaaatctcccaaagactgctcaaactttactccgacaagttcgggagcgagaacgtgaaaatgatccaggattccggaaaggtcaatccgaaggatctcgacagtaagtacgcctatatccaagtgacgcacgtaatcccattcttcgacgaaaaagaactccaggaacggaagaccgagtttgaacgaagccacaatatacggcgattcatgtttgagatgccttttacccagactggcaagcggcagggaggcgttgaagagcagtgcaaaagacgtaccatactgaccgccattcactgcttcccttacgtcaagaagcgaatcccagtaatgtaccaacatcatactgatcttaacccgatagaggtggcaatcgatgaaatgtcaaagaaggtggcagaactgagacagttatgctctagcgcagaagttgatatgataaaactacagctgaagctccaaggcagcgttagcgtccaggtgaacgctggacccctggcctacgccagagccttcttggatgatacaaacacaaaaaggtacccggacaacaaagtcaagctgctcaaagaggtcttcagacagtttgtggaggcctgcggtcaggccctcgctgtgaacgaaaggctcatcaaggaagaccagctagagtaccaggaggagatgaaagctaactatcgagagatggcgaaggagctgtcagaaattatgcacgagcagatttgccctctggaagagaaaacctctgtcctcccaaacagcctgcatatttttaacgcgatctctggcacaccaacaagcaccatggtacatggcatgacatctagctcctccgtggtgtag

SEQ ID NO: 293161 - DNA, 6309 bp, Artificial Sequence
  derived and/or modified sequence
atgagccagccccccctgctgcccgccagcgccgagacccggaagtttacgcgagcgctgtctaaaccagggacagctgccgaactgcgccagagtgtctccgaagtggtgagaggcagtgttctgctggcgaaacctaagcttatcgagccactggactatgaaaacgtcattgtgcaaaagaaaactcagattctgaatgattgtctccgcgagatgttgctttttccttacgacgacttccagacagctattctgaggcgccagggaaggtacatttgcagcaccgtcccggctaaggccgaagaggaagctcaatctctgttcgtgaccgagtgtatcaagacctataacagcgactggcaccttgtgaactataaatacgaagattattctggcgaattccgccaactgcccaataaggtggtgaagctagacaagttgcccgtgcacgtttatgaagtcgatgaggaagtagataaagacgaagatgctgcctccttgggaagtcagaaggggggtatcactaaacatggatggttgtacaaggggaatatgaactccgctattagtgtgacaatgcgatcctttaagcgccgcttcttccatctgattcagcttggtgacgggtcctacaatcttaacttctacaaagacgaaaaaatcagcaaggagccgaagggatcaatttttctcgactcctgcatgggagtcgtgcaaaataacaaagtgcgccggttcgcattcgaacttaagatgcaggacaagtccagctatctgttggcggccgactccgaagtcgaaatggaggagtggattaccatacttaacaaaatcctccaactgaattttgaggcagctatgcaggagaagagaaacggcgactcgcacgaagacgacgaacaatctaagctggaggggtcgggctctggactggactcttatctccccgagttagcgaaatcagcccgagaggctgagattaaactgaagtccgaatcgcgggttaaacttttttacctggatccagacgcccagaaattggatttctccagcgctgagccagaggtgaagagctttgaagagaaatttgggaagcggatcttggtcaagtgcaacgatctgtcctttaacctacagtgctgcgtggctgaaaatgaggagggccccactaccaacgtggagcctttcttcgtgaccctcagcctctttgacatcaaatataatagaaagatctcagctgactttcatgttgatctgaaccatttttccgtaagacagatgctggccacaacgtcccctgccctgatgaatgggtctggccaatccccctcagtgcttaaaggaatccttcatgaagctgctatgcagtacccaaaacaaggaatctttagcgtgacctgtccccacccagacatttttctcgtggcacgaatcgagaaagttttacaaggatcgatcacacactgtgccgagccctatatgaagtcttccgactccagcaaggtggcgcagaaagttctgaagaatgccaaacaggcctgccagaggctcggtcaataccggatgccttttgcttgggccgccaggacactcttcaaggacgcttctgggaatctggacaagaatgcgcggtttagcgctatctaccggcaggacagcaataaactgtccaacgacgacatgttgaaactcctggcagacttcagaaagccggaaaagatggccaaattgcccgtgatccttggcaacctggatattacgatcgataacgtgtcttctgattttcccaattacgttaatagctcctacataccaaccaagcagttcgagacatgctctaagactccgattaccttcgaagtagaagagtttgtgccttgcattcctaaacacacacagccgtatacaatctatactaaccatctgtacgtgtaccctaagtatctcaagtacgattctcaaaagtcgttcgcgaaggctcggaatatcgcgatctgcattgagttcaaggattccgatgaagaggactcccagccattgaaatgtatttacggtcggcccggcggtccggtattcacgcgaagcgcctttgcagccgtactgcaccaccaccagaatccagagttctacgatgagattaaaatcgagttacctacacagctgcacgagaagcatcatcttctgctgaccttcttccacgtaagctgcgacaacagtagcaagggctctactaagaagagggatgtggtggaaactcaagtcggctactcttggctgcctcttctaaaagacgggcgcgtcgtcaccagcgaacagcacatacccgtgagcgctaatctgccgtccggatatctgggctaccaggaactgggcatgggacgtcactacggcccggaaatcaaatgggtggatggcggaaagcccctgttgaaaatttctacccacctggtttccaccgtctatacacaggatcagcacctgcataatttcttccagtattgccagaagacagagagtggggcacaggccctcgggaacgaactcgtcaagtacttgaagtcattacatgcaatggaagggcatgttatgattgcattcctgcctacgattctcaaccagctgttccgagtcttaactagagctacccaggaagaagtggcagtaaatgtcactagagtgataattcatgtcgtcgctcagtgtcacgaggagggattagaatcccatctacggtcctacgtgaagtacgcttacaaggccgaaccttatgtggcatccgaatataaaaccgttcacgaagagctgacaaaatctatgactaccatcttgaaaccatccgcagacttccttacaagtaacaaattactgaaatactcttggttcttttttgacgtgttgattaagagcatggcccagcacctgattgagaattccaaagtcaagctactacggaaccagagattccccgctagctatcatcatgccgttgagacagtcgtcaatatgttgatgccccacatcacccagaagtttagagataacccagaggcaagcaaaaatgccaatcattcattggctgtattcattaagcgctgttttacattcatggatcgcggcttcgttttcaagcagattaacaattacatctcctgtttcgcccccggcgatccgaagacacttttcgaatacaagttcgaattcctccgggtggtgtgcaaccacgaacattacattcccctcaatttacctatgcccttcggtaaggggcgcattcagcgctaccaggatctgcagctcgattatagcctaaccgacgaattttgtagaaaccactttcttgttggcttgcttctgcgggaagtgggcacagctctgcaagaatttagggaggtccgactgatagcaatctctgtcctgaaaaacctgttgatcaagcactcttttgacgacagatatgcctcaaggtctcatcaggcccggattgccaccctttatctgcccctttttgggctcttgattgagaacgtgcagagaattaacgtgcgagatgtgagtcctttccccgtgaacgccggtatgaccgtgaaagacgagagtcttgcattacccgcagtgaaccccctggtcacacctcagaaaggctcaacattggataattctttgcataaggatttgctgggcgctattagcggtatagcaagcccctacaccacaagcacccctaatataaactccgtccggaacgctgatagcagaggctccctgatatcaactgactcagggaactcactgcccgagcgcaatagcgaaaaatccaattcgctagacaagcatcagcagtcttcaacgctgggaaatagtgttgtccgttgcgacaagctggatcagtcagaaatcaagtccttgctgatgtgtttcttgtacatactgaagtcaatgtccgatgacgccttattcacatattggaataaggccagcacaagcgaacttatggattttttcacaatttccgaggtatgtctgcaccaattccaatacatgggtaaacggtatatcgctagaaccggaatgatgcatgcccgcctgcagcagctggggtccctggacaattctcttacatttaatcactcctacggccactcggacgcagatgtgctccatcagagcttgctggaagctaatattgctaccgaggtttgcctcaccgccctggacacattgagtctcttcacactggcatttaaaaatcagctgctggcagatcatggccataacccactgatgaagaaagtcttcgacgtttacctgtgtttcctgcagaagcaccagtcagagaccgccctcaaaaacgtgttcaccgcattgcgcagcctgatttacaaatttccatctaccttttacgagggaagggcggacatgtgcgcggccctgtgttacgaaattctcaagtgctgtaatagcaaactgtcctccatacgtactgaagcctctcaattactatacttcctaatgcgaaacaactttgattatacaggaaaaaagagctttgttcggacgcacctccaggtgatcatctcagtgagccaactgatcgccgatgttgttggcatcggggggaccaggttccagcagtctctcagcatcataaacaattgcgccaactccgacagattaatcaaacacacctccttttccagtgatgtgaaagatctaactaaaagaatcaggacagtactgatggctaccgcccagatgaaggagcacgagaacgaccccgagatgctggtggacttgcaatattctttggccaaatcctacgcttcgactcctgaactgagaaagacatggttggactctatggccagaattcatgtcaagaacggtgatctgagtgaggcggctatgtgctacgtccatgtgacagccctcgtggccgaataccttactcgcaaggaggccgtacagtgggagccccctttgctgcctcatagccactcagcgtgcctcagaagatcccgggggggagtttttcggcagggttgcactgcatttagagtaatcacaccaaacatcgatgaagaagcttctatgatggaagatgtcggaatgcaggatgttcactttaacgaagatgtgcttatggagctgctggaacagtgcgccgatgggctgtggaaggctgaaagatacgaactgattgccgatatctataaactcatcattccaatctatgagaagcggagggactttgaacggctcgctcatctatacgacacattgcacagagcttattctaaggtgactgaggttatgcatagcgggcgtcggctgctgggcacgtacttccgtgtggcttttttcgggcaggcagcgcaatatcagttcactgatagcgaaaccgatgtggaggggttcttcgaggatgaggatggcaaggagtacatttacaaagagccaaaattaacccctctatccgaaatttcacagcgtctgttaaaattgtacagcgacaagttcgggtcagaaaacgtgaagatgatccaagacagcggcaaagtgaatcctaaggacctggatagcaagtacgcctatatccaggtcacacacgtcataccattttttgatgagaaggagctgcaggagcgcaaaaccgagttcgaacgctcgcacaatatccgcaggtttatgtttgaaatgcccttcacacagaccgggaagcgccagggcggcgtcgaggagcaatgcaagagaagaacaatactgactgccatacactgttttccatacgtcaagaaaagaataccggtgatgtatcagcaccacaccgatcttaatcccattgaggttgccatcgacgaaatgagcaagaaggtagcagaactccggcagctctgctcctctgccgaagtagatatgatcaaattgcaacttaagctacagggtagtgtttctgtgcaggtcaatgcgggtccgctggcctatgcgcgcgcgttcttagatgatactaacaccaagcggtaccctgataacaaggtgaagctgttgaaggaggtcttcagacaatttgtggaggcctgtggacaggctctggccgtcaatgagcggctgatcaaagaggaccagctggaatatcaggaagaaatgaaggccaattatcgcgagatggccaaggagctctccgaaataatgcacgaacaggtgcgcagatcagcaccatggcgtcgcaggagagccagctaccgcatcccctttacatcctcgacgccaagcgtaggccttcaacaggctcaatggtttaccggatag

SEQ ID NO: 293162 - DNA, 6285 bp, Artificial Sequence
  derived and/or modified sequence
atgagccagccccccctgctgcccgccagcgccgagacccggaagtttaccagggctttgtccaagccggggacagccgctgagctgagacaaagtgtgagcgaagtggtgcgaggatcagtgctgctcgcaaagcctaagctcattgaaccgttggactatgagaacgtgattgtgcagaaaaagactcaaatcttgaatgactgcctacgggagatgcttctgttcccttacgatgactttcagaccgccattctccgacgccaaggacgctatatatgcagcactgtgcctgccaaggccgaagaagaggctcagtcccttttcgtgaccgagtgtataaaaacctacaacagcgattggcaccttgtcaactacaagtatgaggactactcgggtgagtttagacaactgcccaataaagtggtcaagctggacaaactgccagtccatgtgtacgaagtggatgaagaagtagacaaagacgaagacgcagcatctctggggtcacaaaagggcggcattacgaaacacggatggctttacaaaggtaacatgaactccgccatctcagtcacaatgagaagctttaagagacgattcttccacctcatccagctgggggatggcagctacaatctaaacttctataaggacgaaaagatctcaaaagaaccaaagggatctatcttcctagacagctgtatgggcgtggtacagaataacaaggttaggaggttcgccttcgaactgaaaatgcaagataaatcttcctacctgctcgctgcagatagcgaagttgaaatggaagagtggattaccatactcaataagattcttcaattgaatttcgaggctgccatgcaggaaaaacgtaatggtgacagtcacgaggacgacgaacagtcaaagttggaggggtccggatctggcctggactcctacctgcccgaactagccaagagtgcgcgcgaggcagaaattaagctgaaaagtgagtctagggtcaaacttttctaccttgatccagacgcacagaagttggacttctcaagcgccgaacctgaggtcaagtcattcgaggaaaaatttgggaagcgaattcttgtcaagtgcaatgacctgtctttcaacctgcagtgctgtgtcgccgagaacgaggagggacccaccacaaacgtcgaaccattcttcgtgactttgtctcttttcgatattaaatataataggaagatttcagctgatttccacgtagatctgaaccacttctctgtccggcagatgcttgccactactagtcccgctttgatgaacggctctgggcagagccctagcgtgcttaaaggcatccttcatgaggccgcaatgcagtatcccaaacagggaatctttagcgtgacatgtcctcatccagacatctttcttgtcgcccggattgagaaagtcctgcaggggtccattacccactgtgcagagccatacatgaaatccagtgattcatcaaaggtggcccagaaggtcctcaaaaacgccaaacaagcctgccagcgactgggtcagtatagaatgcccttcgcgtgggctgctcgcactctgtttaaggacgccagtgggaacctggacaagaacgcccgatttagcgctatctatcggcaagatagcaataagttgtcaaacgatgacatgctcaagctgcttgcagacttccggaagccagagaagatggctaaattgccagttattctgggaaatctggacatcaccatagacaatgtatcgtcagacttccccaattacgtgaactcttcctacatccccactaaacagtttgagacgtgcagtaaaacccccatcacatttgaagtggaggagttcgttccgtgtatacctaaacacactcagccttacaccatctacaccaatcatttgtacgtgtaccctaaatacctgaagtatgactcacagaagagcttcgcgaaagctcgtaacatcgccatctgcatcgagtttaaggattccgacgaagaagactcccaacctctgaagtgtatctacggtcggccaggcggccccgtgttcacccggtctgcatttgccgcagtgctccaccatcatcaaaaccccgagttttacgacgagatcaaaatagaactgcctacacagctccacgagaagcaccacctccttctcacattctttcacgtcagctgtgacaactccagcaaaggcagcaccaagaagcgcgatgtggtcgagacacaagtgggctacagctggctgcccctcttgaaagatggccgcgttgtgacgagtgaacagcacatccctgtttccgccaacctccctagcggatatctagggtaccaagagctcggcatgggcaggcactatggtcccgagatcaaatgggttgatggaggaaagcccttgttgaagatcagtactcacctcgtgtccacagtgtacacccaggatcagcatctgcataacttctttcaatattgccagaagactgagtcgggtgctcaagctctgggaaacgagctggtgaaataccttaagtcgttgcacgcaatggagggacacgttatgatcgcctttcttcccacgatcctcaaccagctgtttcgagtcttgactagagctacccaggaagaggtcgcagtgaatgtcacccgggtcatcatccatgtggtggctcaatgccatgaagaaggattggaaagtcatcttcggtcctacgttaagtacgcgtataaggccgagccctatgtggccagcgaatacaagaccgtgcatgaagagctaacaaaatcaatgaccaccattttgaagccaagcgcagattttctcacaagcaacaagcttctgaagtatagttggtttttctttgatgtgctgattaagagcatggctcagcatttgatagagaatagcaaggtgaagctgctccgcaatcaacgatttcctgctagctaccatcatgccgtggaaacggtcgtaaatatgttaatgcctcatatcacccagaagttcagggataacccagaggccagcaaaaacgcgaatcattcactggccgtgtttatcaagcgttgttttactttcatggatcgcggattcgtgttcaagcagattaataattacatcagttgcttcgcacccggggacccaaagacactcttcgaatataaatttgaattcctgagggtggtatgtaaccatgagcattacattccactgaacttgccgatgcctttcggcaaggggagaatacagcggtatcaggacctgcagctggattacagcctcaccgatgagttctgcagaaaccatttcctagtgggcttgttactgcgtgaggtgggaactgcgctgcaggaattccgagaggtgcgcctaatcgcaatttcagtgttgaagaacctcctaataaagcattcatttgacgatcggtatgcgagtcgaagccaccaggcaagaattgccaccctatatcttccactctttggccttttaatcgagaacgtacagcggatcaacgtcagggacgtgtcaccattcccagtgaatgctggtatgacagtgaaagatgagtccctcgcactgccggcggttaaccccttggtcactcctcagaagggcagtacactggataattcactgcataaggatttgttgggtgctattagtggcatcgcctctccatataccacatccaccccaaatatcaactcagtcaggaatgccgacagtcgcggctctcttatttctacagattctggtaactctttgcctgagcgcaactcagagaagtcaaactcactagacaaacaccagcaaagctcaaccttagggaattcagtggtgcggtgcgataaattagatcagagcgagataaagtcgctactcatgtgttttctatacatactcaagtcaatgagtgatgatgccctgttcacttactggaacaaggcttcaacaagcgagctgatggactttttcacaatttctgaagtctgcctacatcagttccagtacatgggcaaaagatacatcgcttccgttcgtaagatttcgtccgtcctggggatttctgtggataacgggtacgggcactccgacgctgatgtgctgcatcagtccctgctggaagccaatatagcaaccgaagtgtgtctgactgctttggacactctgtccctgttcaccttggcatttaagaaccagctactagccgaccacggccacaatccgctcatgaaaaaggtgttcgatgtatatctgtgtttccttcagaaacatcagagcgaaaccgccctgaaaaacgtatttaccgccctcagatccctgatctataaattccctagcacgttttacgaagggcgggcggacatgtgtgctgcactgtgctatgaaattctcaagtgctgtaattcaaagctgagctctatccggaccgaggcctctcagcttctctattttctcatgagaaataatttcgattacactggcaaaaagagtttcgttcgcacgcaccttcaggtgatcatctccgtctcacaactgattgccgatgtcgtgggcatcggaggtacaagatttcagcaatccctttccataatcaataattgtgccaactcagacagattaattaaacataccagttttagctcagacgtgaaggacctgaccaaaagaattagaacagtcctgatggctacagcccagatgaaagaacacgagaacgatccagagatgctcgtagacctgcagtactcccttgccaagtcatacgcatccactccggagctgcgaaagacttggctggattcaatggcacggattcatgtaaagaacggcgacctcagtgaagctgccatgtgttatgttcacgtgaccgcgctggtcgccgagtatctcacacgaaaggaggcagtgcagtgggaaccccctctcttgccccatagccactctgcatgcttgagaaggtcccggggcggcgtgttcagacagggatgtacagctttcagggtgattacccccaacattgatgaagaggctagcatgatggaagatgtgggaatgcaggatgtgcactttaatgaagatgtcctgatggaactgctagaacaatgcgcggatgggctgtggaaggcggaacgatatgagctgattgctgacatctataagttaattatacccatatatgaaaaaagacgagacttcgagcggctcgctcacttgtatgatacacttcatagagcttactcaaaggtgactgaggtaatgcatagcggtaggcggctgctggggacctatttccgggtagcgttcttcggccaggcagctcagtaccagttcaccgattctgaaaccgacgtcgaggggtttttcgaggatgaagacggcaaggagtacatatacaaggaaccaaaattgacgccactgagtgagatttctcagaggctcctcaagctatattccgacaagttcggctcagaaaacgtgaagatgattcaggacagcgggaaggtgaatcctaaagatctcgactccaaatacgcatatattcaggtcacccacgtgatcccattctttgatgaaaaggagttgcaggaacgcaaaacagaatttgagcggtcgcacaacatccgcaggtttatgtttgagatgccttttacccagaccggcaagcggcagggcggcgtcgaggagcagtgcaaaagaaggacgatcttaacggccatccattgcttcccctacgttaaaaaacgcattccagtgatgtaccaacaccatacagatctgaacccaattgaggtggctatcgatgagatgtccaagaaagtcgccgaactcagacagctctgcagctccgccgaagtggacatgatcaaattgcagcttaagctccagggctctgtcagcgtgcaggtgaatgccggacccctggcatacgctcgagccttcctggatgacactaacacgaaacgttaccctgacaacaaggtcaagctcctgaaggaagtgttccgtcagtttgtggaggcttgcggccaggcactcgcagtaaacgaacgtttaatcaaagaggaccagctggagtaccaggaagaaatgaaggccaattacagagaaatggccaaggaactgagcgaaatcatgcacgagcaggtgcggcgaagtgcaccttggcgccggcggagggcgtcgtaccgaatcccttttacttccagcacccccagcgtcggactccagcaggcgcagtggttcacagggtag

SEQ ID NO: 293163 - DNA, 6281 bp, Artificial Sequence
  derived and/or modified sequence
atgtcgcagcccccacttctcccagcatccgcggaaacccgaaagtttacacgggctctgtccaagcccggtaccgccgcagagctccgccagtcagtgagtgaggtggtgcgtggctcagttctcctagcaaaacctaagctaatcgagcctttggactacgaaaatgtgattgtacagaaaaagactcaaatcctgaacgattgtttaagagagatgctcctgttcccgtatgacgactttcagacagccattctccgcagacagggccgttacatttgttctactgtaccggcaaaggccgaggaagaggctcaatctcttttcgtaactgagtgcatcaaaacatataatagcgactggcatttggttaactataagtatgaagattattcaggtgagttcaggcagctccctaataaggtggttaagcttgataagctgccagtccatgtgtacgaggtagatgaagaggttgacaaggacgaagacgccgcatccctgggctcccagaagggcggtattaccaagcacgggtggctgtataaaggcaacatgaacagtgccatctcagtgacaatgcgatcgtttaaacgcaggttttttcaccttattcagttgggggatggcagctataatctgaacttctacaaagacgagaaaatttccaaggagccgaaaggaagcatttttttagattcttgtatgggcgttgtccagaacaataaagtcagacgtttcgctttcgaactgaaaatgcaggataaatcctcctacttacttgctgcagactctgaagtggagatggaagaatggatcacaatacttaacaagattttgcagctgaattttgaagcagctatgcaagagaaaaggaacggagactcacatgaggacgatgagcagtcaaagctcgagggttcgggctcagggctcgactcctatctgcccgaacttgcaaaatcagctagagaggctgaaatcaagttgaaatccgagtcacgagtgaaactattctatctggaccccgacgcccagaagctcgacttcagctcagccgagcctgaggttaaatcttttgaggagaaatttggaaagcgcatattggttaaatgtaacgatctgtctttcaatctgcagtgctgtgtcgctgagaatgaagaggggcctaccaccaatgtggaacctttttttgtgaccctgtctttgttcgatattaagtacaatcgcaaaatctctgccgactttcacgtagacttgaaccacttctccgtgagacagatgctcgcgaccactagccccgctctgatgaatggttcaggtcaaagccccagtgtcctgaaaggcatactacacgaggccgctatgcagtatcctaagcaggggatcttttctgtaacttgcccacaccctgacatattcttggtggcccgtatcgagaaagtactccaaggatccataacacactgcgctgagccctacatgaaatcttccgactcatctaaggttgcccagaaagtcctgaagaacgcaaaacaggcctgtcagagactcgggcaataccgaatgccctttgcctgggccgctagaactctcttcaaagatgcctctggtaatcttgacaaaaatgcaagattctcagctatatacagacaggattcaaacaaattgagtaacgacgacatgcttaagctgctggcggatttcagaaagccagagaaaatggcaaagcttccggtcatactgggcaaccttgacattactatcgataacgtatcttctgatttccctaattacgttaactcctcatatatccccactaaacagttcgaaacttgctcaaaaacccctatcaccttcgaggtggaagagtttgtgccctgtatcccaaaacacacgcagccatacactatttatacaaatcacctgtacgtttacccaaaatatttaaagtacgatagccagaagtcttttgcaaaggcccgaaacattgcaatctgcatcgaattcaaggactcagatgaagaggattcccagccactaaagtgcatttatgggaggccgggaggaccggtgttcaccaggtccgcattcgcagccgtcctgcatcaccaccagaatcctgagttttatgacgagatcaagattgagctcccgactcaattacacgagaaacaccatctgttactgactttcttccacgtgtcttgcgataactctagtaaaggatctaccaaaaagagggacgtggtggagacccaggtgggttattcctggttaccccttctaaaagacggacgtgtcgttacttcagagcagcacatccccgttagcgctaatctcccatcaggctatctaggatatcaggagctgggtatgggtcgccactatggccctgaaataaagtgggtggacgggggaaagcccctgctcaaaatctcaacccacttggtgagtaccgtctatacacaggatcagcatctgcataacttcttccagtattgccagaaaaccgagtccggcgcacaggcactgggtaacgagctagtgaaatatctaaaatctttacacgctatggaaggccatgtgatgatagctttcttacccaccatactcaaccaactctttagagtgctgacccgtgcaacccaagaagaagtggctgtcaacgtgacacgcgtgattatccatgtggtcgcccagtgccacgaggagggtctggaatcgcacctgaggtcctacgtaaagtacgcttacaaagccgaaccgtatgtagcttctgaatacaaaacagtccatgaggagttgactaagtccatgactactatacttaagcctagcgctgattttctgacaagcaacaagttgctgaaatatagttggttcttctttgatgtgttaatcaaatcgatggcccaacacctcattgagaactccaaggttaaattactcaggaaccagcgcttccctgcgagctatcaccacgccgtggagactgtggtgaatatgttgatgcctcatattacacagaaattccgtgacaaccctgaagcttcgaaaaacgcgaaccactcacttgctgtcttcattaagcggtgttttaccttcatggataggggatttgttttcaaacaaatcaataattatattagttgtttcgctccaggcgatcctaaaaccctcttcgaatacaagtttgaattcctccgggtagtctgtaaccacgaacattatatacctttaaacctaccaatgcctttcggcaaaggcaggattcagaggtaccaggatctccagctggactacagcttaactgacgagttttgccgaaatcactttttggtgggactcctccttcgtgaggtgggcactgcgctgcaggagttccgagaggtgaggttaatcgccatctcggtgctcaaaaatctgctgattaaacattctttcgacgaccggtacgccagccgctcccaccaagccagaattgctactctgtacctgccccttttcgggctcctcatcgagaatgtgcagcggattaacgttagagacgtgagtcccttcccagtgaacgccggaatgacagtcaaggatgagtcccttgccctccccgcagtaaacccccttgtgactccacagaaaggaagtacattagacaacagcctccataaggatttgcttggcgctatctccggaatcgcctcaccttatactacttccacccctaacataaatagcgtgaggaacgccgactcccgaggcagtttgatctcaacagattccggcaatagcctgcccgaaaggaactctgagaagtcgaattctttggataaacaccagcaatccagtaccctaggaaacagcgtggtgcgttgcgacaagctagatcagtctgagatcaagtcactcctgatgtgcttcctttacattcttaaatctatgagtgacgacgcgctctttacatactggaataaggcatccacctctgaactcatggatttctttacaatctccgaggtgtgcctgcaccagttccagtacatgggcaagcggtatatcgccagaactgggatgatgcacgctaggctccagcagctgggctccctggataattcattgacatttaaccattcttacgggcattcagacgctgacgttctgcaccagagtttacttgaagcaaacatcgccaccgaagtgtgtctgacagcattagataccctgagcttgtttaccctggcatttaaaaaccagcttctcgctgaccacggccataatccgcttatgaagaaggtgttcgatgtatacttgtgtttcttacagaagcaccaatctgagaccgcgctgaaaaatgtctttacagccttgaggagtcttatttacaagtttcccagcaccttctatgagggacgcgctgacatgtgtgctgccttgtgttatgagatccttaaatgttgcaactcgaagctaagttctatacggaccgaggcatcccagttactatacttcctgatgcgcaacaatttcgattatacgggcaaaaagtcctttgttcgaacccatcttcaggtgattatttccgtatctcagctgatcgccgatgtcgttgggatcgggggtacgaggttccagcaaagtctgtccattatcaataattgcgccaactccgaccggcttatcaaacacacaagtttttcatcggacgtcaaagatttaaccaagcgcattcggaccgtcctgatggcgaccgctcagatgaaagagcacgaaaatgaccctgaaatgctagtcgatctgcaatattctctcgccaaatcctacgcatctactcccgagttaaggaaaacatggttggacagtatggcacgaattcatgttaaaaacggagatctgtcagaagcggcaatgtgctatgtgcatgtcacggctctggtcgctgagtatctgacccggaaggaggctgtgcaatgggaacccccattgttgccacacagccattccgcttgcctgagacgctctagagggggagtatttcgtcagggttgcactgcttttagggttatcacgccaaacattgatgaggaagcgtccatgatggaggatgtgggcatgcaggatgtgcattttaacgaagatgtgctgatggaacttctagagcagtgtgccgatggtctctggaaggcagagcgttacgaactgatcgccgatatttataagctaattataccgatttatgaaaaacggcgagactttgaacggctggcacacctgtatgataccctgcatcgcgcttattctaaagtgactgaggtgatgcactccggaagaaggctgctggggacatactttagagtcgccttttttggccaagggtttttcgaagatgaggatggcaaggagtatatctacaaagagcccaaacttacccccctctccgaaattagccagaggttgttaaagctctactctgacaagtttggctcggagaatgtcaagatgattcaggactcggggaaggtcaacccaaaggacctggactcgaagtatgcatatatccaggtcactcatgtcattccgtttttcgacgaaaaggaactacaggagcgaaaaaccgaattcgagagaagccataacattcgtcgctttatgtttgaaatgcctttcacgcagacaggcaagcgccaggggggagtcgaagaacagtgcaagcgcaggactatcctcactgctattcactgttttccttatgtcaagaagagaattcctgtgatgtatcagcatcatactgatcttaaccctattgaggtggccattgacgagatgagcaaaaaagtagctgagttgcgacagttatgctcctcagcagaggttgatatgataaagcttcagctcaagctccagggtagcgtttctgtccaggtgaatgcgggaccgttagcatacgccagagcctttctggacgataccaatacgaagcgatatccagataataaagtaaaactccttaaggaggtttttagacagttcgtggaggcctgcggccaggcattggctgtaaacgagcgcctgatcaaagaagaccagttggagtaccaagaagagatgaaagccaattatcgggagatggcaaaggaactctccgagatcatgcatgagcagatatgtccccttgaggagaaaactagcgtgctgcctaattccctgcacatctttaatgctataagtggcactccaacatccacgatggtacacggcatgacttcttccagcagtgtggttta

SEQ ID NO: 293164 - DNA, 6308 bp, Artificial Sequence
  derived and/or modified sequence
atgtctcagccgccattattacccgctagtgctgagactaggaagtttactcgcgctttgtctaagcccggtacagctgcagaattgcgacagagcgtctcagaagtagtgagagggtccgtgttgctcgccaagccaaaactgatcgaacccttggattacgagaatgtgatcgtgcaaaagaaaacgcaaattctgaacgattgccttcgcgagatgctgctgttcccatacgacgatttccagaccgcaatcctgaggcgccaggggaggtacatctgctcaaccgtacctgccaaagctgaggaggaggctcagagtctgtttgtgacagaatgcatcaaaacctacaattccgactggcaccttgtgaactacaaatacgaagattattctggagagtttaggcagctcccaaataaagtcgttaaattggacaaactcccggtacacgtctacgaggttgacgaggaagttgacaaggatgaagatgccgctagcctgggaagtcagaagggagggatcactaaacatggctggctgtacaaaggcaatatgaattctgccattagcgtaacaatgcgctcatttaagcgaaggttcttccatctgattcagctgggtgacgggagctacaacctcaacttttacaaggacgaaaagatctccaaggagcctaagggaagcattttcttagactcttgcatgggtgtggttcagaacaataaagtgagacgatttgcctttgaactcaagatgcaggacaagtctagctatctgctggcggcagacagtgaggtggaaatggaggaatggatcaccatccttaacaaaattctccaactgaatttcgaggcagccatgcaggaaaaacggaatggcgactcccatgaggacgatgaacagtccaagctcgagggatctggaagcggactggattcctatctgcccgagctggccaagtctgcccgagaggctgaaattaagctgaaatctgagtctagagtgaagctgttctatctcgatccggacgcacagaaactggatttctcttctgccgagccggaagtcaagtcctttgaagagaagttcgggaaacgcatcctggtgaaatgtaacgatctgtcttttaaccttcaatgttgtgtggcagagaacgaggaggggcctaccactaatgtcgaaccgttctttgttacactttctctgtttgatatcaagtataatagaaagatctccgcagattttcacgtggaccttaaccactttagtgtccggcagatgcttgccactacttcaccagcactgatgaatggctccggtcagtctcctagtgttttgaaggggatcttacacgaggctgccatgcagtaccctaaacagggtatcttttccgtcacgtgtccccaccccgacatatttttagttgccaggattgagaaagttctccaggggtccattacacattgtgcggaaccatatatgaagtcctctgatagctctaaggtggcccagaaggtgctcaagaatgcgaagcaggcatgccaacgcctgggacagtaccggatgcccttcgcgtgggccgctcgaactttgttcaaagacgcctcagggaatctggacaagaatgcgaggttttcagccatctaccggcaggattcgaacaaactgtccaacgatgatatgcttaagctcctggctgacttccggaaacccgagaagatggccaagttacccgttattctgggtaatttggatataacaatagacaacgtgtcttccgatttccctaattacgtcaatagctcatatataccaactaagcagtttgagacctgtagcaagacaccaatcacatttgaagtcgaggagtttgttccgtgtatccctaaacatacccaaccctacacgatatacactaaccatctgtacgtttatccgaaatatctgaaatatgattctcaaaaatctttcgccaaggctcgaaatatcgccatctgcatcgaattcaaagactccgacgaggaagactcacagccactgaaatgcatctacggtcgaccaggcggtcccgtgttcactcgctctgcattcgcagccgtcttgcaccatcatcagaatcctgagttttacgacgaaattaaaatagagctcccaacccagctacacgagaaacatcacctgctacttacatttttccatgtatcttgcgacaacagcagtaaagggtcaactaagaaacgagacgtcgtggagacacaagtaggttattcttggctgccactcctcaaggacggacgcgtcgttacatccgaacagcacatccccgtctctgccaacttaccaagtggctacctaggctaccaggagttggggatggggcgacactacggacctgagatcaagtgggtggacggcggaaaacctctgttgaagatcagtacccatctggtcagcactgtttatacacaggatcaacacctgcataacttctttcaatactgccagaaaacagagagcggcgcacaggccctgggtaatgaactggtaaaataccttaagtctctccacgcaatggaaggacacgtgatgattgccttcctcccaaccattttgaatcagttgttcagggttctcacccgtgcaacccaggaggaggtcgccgtcaacgtgacacgcgttattatccatgtggttgcacaatgtcacgaggaggggctggagagtcacttaagatcatatgtcaagtatgcatacaaagccgagccttacgtagcttcagagtataagacagtgcacgaagagctaactaagagcatgacaacaatcctcaagccgtctgccgactttttgaccagcaacaagctgctgaagtactcatggttctttttcgacgtcctgatcaagagcatggctcagcacttgatagagaacagcaaggtaaagctgctgcgcaatcagcggttcccagcgagctatcaccacgccgttgaaacagtagtaaacatgcttatgccccatatcacacagaagtttcgggataacccggaggccagtaagaatgctaaccatagcctggctgtctttattaagagatgcttcaccttcatggatagaggcttcgtcttcaaacagattaataactatatttcgtgtttcgcccctggggaccccaaaactctcttcgagtacaaattcgagttcttacgcgtagtgtgcaatcatgagcactatattcccctcaatttgcccatgccctttggcaagggccgtatccagcggtatcaggaccttcagctagactactcactgactgacgagttttgccgtaatcactttctcgttggcctgctgctacgcgaggtcggcacagctctgcaggaatttcgagaagttcggctcattgcaatttccgtgctaaagaatcttctcataaagcactctttcgacgacaggtatgccagccgttctcaccaggctcggatcgccacactgtacttgcccctattcggtctcctgatcgagaatgtccagcgaattaacgtgcgagacgtaagcccattcccagttaacgccggtatgactgtgaaggacgaatccttagctctcccagctgtgaatccactcgtcacacctcagaaggggtctacactagataattcccttcataaagaccttttgggggctatatctgggatagcctcgccttacactacctccaccccaaatataaacagtgtccgtaatgcagacagcaggggatctctaatctctacggactccgggaatagccttcccgaacgcaatagcgagaagagcaatagtctggacaagcatcagcaaagcagtacattgggaaatagcgtggtgcggtgtgataagctggatcagagtgagatcaagtccctactgatgtgtttcttatatattctcaaatcaatgagcgacgatgccctgttcacgtactggaataaggcttcaacttccgagctgatggatttttttaccattagcgaagtctgccttcatcaatttcagtatatgggcaaaaggtacattgcccgaaccggaatgatgcacgctagactgcaacaactggggagccttgacaactccctgaccttcaatcactcatatggccactctgacgctgatgtcctgcatcagagtctgctggaagcaaacatcgccacagaggtgtgcctgactgccttagatacactgagcttgtttaccttggccttcaagaatcagcttctcgctgatcatggacacaaccccctaatgaagaaagtgtttgatgtctatttgtgcttcctccagaagcaccagagcgaaactgcgcttaaaaacgtgtttactgcattaagaagcctgatctataagttcccttcaaccttctatgaaggaagagccgatatgtgtgccgctctgtgctatgagattctgaaatgctgtaatagcaagctttcctccatacgaaccgaggcttcacagttactgtattttctgatgagaaacaactttgactatactggcaagaagagtttcgtgcgaacacatttacaggtaattatcagcgtgtcccagttaatcgctgatgttgtggggattgggggtacaaggttccagcagagcctgtctattattaataattgtgctaacagcgaccgcctaataaagcacacgtcgttcagctctgatgtgaaggacctgactaaacgtattagaacagtgctgatggccaccgcccagatgaaagagcatgagaacgatccggagatgctggtcgacctccagtactctctagcgaagagttacgcctctactcctgagctgcggaagacctggctcgactcaatggccagaatccacgtaaaaaacggagacctttcagaagcagctatgtgctacgtgcacgttactgccctggtggcagagtacttgacgaggaaagaagctgtccaatgggagccacctctattgcctcactctcacagcgcatgtctgcggaggtctcgaggcggagtgtttcggcagggttgtacagccttccgcgtgataacaccaaacatcgatgaggaagccagcatgatggaggacgtcggtatgcaagacgttcactttaatgaggatgtccttatggagctgctggaacagtgcgcagatggcctgtggaaagccgagagatatgaattaatcgctgacatctataaactgatcattcccatatatgaaaaacggagagatttcgagcgtttggcccacctgtatgataccttgcatcgtgcctactcaaaagtgaccgaggtgatgcattccgggaggcgcctgcttgggacctacttcagagtcgcgttcttcgggcaggctgcacagtaccagtttactgacagtgaaaccgatgtggagggtttctttgaagatgaggacggaaaagagtatatttacaaggagccaaagttgacccctctcagtgagatcagccagcggttgctgaagctctacagcgacaaattcggttctgaaaatgtcaaaatgatccaagattcaggcaaagtgaacccaaaggacctggattctaagtacgcctacattcaagtcactcatgtgataccattttttgatgagaaggaactgcaagagaggaagaccgagttcgagcgatcccataatattagacggtttatgtttgaaatgccatttacccaaactggcaaacggcaggggggagtggaggagcagtgcaagcgccgaacaattctgacagcaatccattgctttccctacgtgaagaaacgaatccccgtgatgtatcagcatcataccgatttgaacccgatcgaggttgccatcgatgagatgagtaaaaaggtggccgagttgcgccagttatgcagcagcgcagaggtagatatgataaaactccagctcaaactgcagggatcggtgtcagtgcaggttaatgcgggtcccctggcatacgcccgtgcattcctagacgataccaataccaaaagatatcctgacaataaagtgaagctgttaaaggaagtctttcgccagtttgtagaagcttgcggccaggccctcgcagtaaacgagagacttatcaaggaagatcagcttgaatatcaggaggagatgaaagctaattaccgagaaatggctaaggaactctctgaaattatgcatgaacaagtccggagatcagccccttggaggcgtagacgcgctagttatcgcatcccctttacctcctccacccccagtgtcggcttgcagcaggcccagtggtttacagggta

SEQ ID NO: 293165 - DNA, 6284 bp, Artificial Sequence
  derived and/or modified sequence
atgtcccaaccaccactgctgcccgcttccgcagaaactcgtaagtttacaagggctctgtcaaaacctggtaccgctgctgagctgaggcaatccgtgtccgaggtcgttcgtgggtctgttctccttgcaaagccaaagctaatcgagccactcgattacgagaatgtgatcgtgcagaagaagactcaaattctcaacgattgcctgagggagatgctcctcttcccctacgatgactttcagaccgctatcctccggaggcagggtcggtacatctgctcaaccgtcccagccaaagcagaggaggaagctcagagcctcttcgtgacagaatgtatcaaaacctataacagtgactggcatctcgtaaactacaaatacgaggattactccggcgagttcaggcagctgcccaataaggttgttaaactggataagttaccagtgcacgtgtacgaagtagatgaggaggtggacaaagacgaagacgctgcgtcactgggctcccagaagggaggtatcaccaaacatggctggctgtataaggggaatatgaattcagccatttctgtgacgatgaggagcttcaaaagacgcttctttcatctaattcagctgggcgacggaagctataatctaaacttctataaagacgagaagattagcaaggagcctaaaggttcgatcttcttggacagctgcatgggggtggttcaaaacaacaaggtgaggaggtttgcatttgagctgaaaatgcaggacaagtcatcttacctccttgccgctgattcagaagtggaaatggaggaatggattaccattctgaacaaaattctccagctgaacttcgaagccgctatgcaggaaaaacgtaacggagacagccatgaagatgacgaacagtcgaagttagaaggtagcgggagtggcctggacagctacctgcccgagctagccaagtctgccagggaagcagaaattaagctgaagtcagagagtcgcgtcaaattattctatttagatccagatgcccaaaagctggacttctcttccgccgaacctgaggtgaagtcctttgaggagaagttcggcaaaagaatcctggtcaagtgcaacgacttgtctttcaacctgcaatgctgcgtcgccgaaaacgaggaagggcctactacaaacgtggagcccttctttgtcacccttagcctcttcgacatcaaatataatcgaaagatctcggccgactttcacgttgaccttaaccacttttctgtccgccagatgctcgctaccactagcccagccctgatgaacgggtcaggccagtctcccagcgtgttgaaggggattctccacgaggctgcaatgcaataccctaaacaggggatcttttctgtgacctgccctcaccctgacatcttcctggttgccagaattgaaaaggtgttacagggctctattacacactgtgctgaaccatacatgaagtcttctgactcttccaaggtggcacaaaaggtgctaaaaaacgcaaaacaggcatgccagcgtctcgggcagtacaggatgccatttgcttgggcggctagaacattgtttaaggacgccagcgggaatctagacaaaaacgcaaggttttccgctatctaccgccaagattcaaataagctcagcaacgatgacatgttaaaattactggctgactttcggaaacccgagaaaatggcaaagctccctgtgatcctgggcaatttagacataaccatagataacgtctcgtccgatttccctaattacgtgaattcctcctatatcccgaccaaacagttcgaaacatgtagtaagacacccatcactttcgaggtggaggagtttgtgccgtgcataccaaagcatacgcagccctatactatatacactaatcacctgtacgtgtatcctaaatatctgaaatacgactcccagaaatcatttgccaaagctcgcaacattgctatctgtatcgaatttaaggactccgatgaagaagattcacaacccctgaagtgtatctatggcagacccggaggacccgtgtttacaaggtcagcatttgccgcagttcttcaccaccaccaaaaccccgaattctacgacgagatcaagatagagctacccacacagctgcatgagaagcatcatctgttactgacgtttttccacgtgagttgcgataatagtagtaaaggttctactaagaagcgggatgtcgtggagacccaagtcggctactcatggctgccattgctcaaggatgggagggtggtaacatccgaacaacatattcctgtgagtgccaatctgcctagcggttacctaggatatcaggagctaggcatggggagacattatggcccagaaataaagtgggtggatggcggaaagcccctattgaaaattagtacccatctcgtgtccaccgtgtatacccaagaccagcatttacataatttctttcagtattgtcagaaaacagaatccggggcacaggcattgggcaatgaactcgtgaagtacctcaagtccctgcatgctatggagggccacgtgatgatagccttcctgcccaccatattaaatcagctctttagagtgctaaccagagccacacaggaggaagtagccgtcaacgtgactagagtaatcatccacgtcgttgcccagtgtcacgaggagggactggagtctcatcttcgctcttatgtcaagtacgcctacaaggcagagccatacgttgccagcgaatacaaaactgtgcacgaggaactaaccaagtctatgaccaccatcctgaaacctagtgcagatttccttacctccaacaaactgctgaagtatagttggttctttttcgatgtgctgatcaagtccatggcacagcacctcatcgaaaattcaaaggtgaaattactgcgcaaccagcggttcccagcatcttaccatcatgctgtggaaactgttgtgaatatgctgatgccacacatcacacaaaagttccgtgacaatccagaggcttctaagaatgccaatcatagtctggctgtcttcatcaagcgatgttttacatttatggacaggggttttgtattcaaacaaatcaataactacatatcttgtttcgctcctggagatcccaagacgctgtttgagtataaatttgagttcctgcgagtagtctgcaaccacgagcattacattccactcaatctgcccatgccatttggaaagggtcgtatccagcgctaccaggacctgcagctggattattccctgaccgacgaattctgtcggaatcactttttggtgggacttctgctccgagaagtcggcacagcactccaggagttccgtgaagtgcgtctaatcgcgatcagcgtgctgaaaaatctcctgatcaaacactcttttgacgaccgctacgcgagccggtctcaccaggcacgcatagctactctgtatctcccgttgtttgggctgctgatcgagaacgttcagcgcataaatgtgcgcgacgtgtctccctttcccgttaatgctgggatgactgtcaaagacgagtcactggcccttccagccgttaatccacttgtgactccccagaaaggaagcacattagacaatagtctgcataaggatctcctcggtgctataagcggcattgcgtccccctacaccactagcacaccgaatatcaacagtgtgcgcaacgcagattcacgagggtcccttatctctactgactcaggaaacagcctcccagaaagaaattcagagaaaagcaacagccttgataagcaccagcaaagcagcaccttgggcaactcagttgttcggtgtgacaagctggaccaaagtgaaatcaaatccctattgatgtgtttcctctacattctgaaatcaatgagcgacgacgccttattcacatactggaataaggcatccacgtccgagctgatggattttttcaccatctctgaggtttgtctgcatcagttccaatacatgggaaaaagatacattgcctcagtgcggaaaatctcatccgttcttggcattagcgttgacaatggctacggacacagcgatgccgacgtattacatcagagtctgctcgaggcgaacattgcaactgaagtatgcttaaccgctcttgatacattaagtttatttacactggcattcaaaaatcagttactagcagaccacggacataatccgttaatgaagaaggtctttgacgtctacctctgcttcctgcaaaagcaccaatccgagaccgccctgaagaacgtcttcacagccctgcgcagtttgatatataaattcccatccacattttacgagggccgtgcagatatgtgcgccgctctttgctacgagatcctcaagtgctgcaattccaaattgagctccattcgaaccgaggcctcgcagcttctgtatttcctgatgcgtaacaattttgactataccggcaagaagagttttgtgcggacccacttacaggtgataatctctgtttcccagttgattgccgacgtggttggaatagggggtactcgatttcaacagagcctttctatcatcaataattgcgcaaattctgacagactgatcaaacatacctcattttcttccgacgtcaaagacctcacaaagcgcatcagaactgtgctaatggcgaccgcccaaatgaaggaacacgagaacgaccccgagatgctcgtcgaccttcagtactccctggctaagtcttacgcctccacacccgagctcaggaagacatggctggactcgatggcacgaatacacgtcaagaatggcgacctttccgaggcggctatgtgttatgtgcatgtgacggctctggttgccgaatatctgaccagaaaagaggccgtccaatgggaacccccacttcttccgcatagccacagcgcatgcctgcgaaggagccgcggtggggtatttagacaaggctgtacagcctttagagtgatcaccccaaacattgacgaagaagcttctatgatggaagacgtgggcatgcaagacgtccattttaacgaagatgtgcttatggagctcctcgagcagtgcgcggatgggttgtggaaggctgagcgctacgagctcatagccgacatctacaaactgatcattcccatctatgaaaaacgacgagacttcgagcgactggctcacctctatgatacccttcacagggcgtattcaaaggtaactgaggtcatgcatagcggcaggagacttctcggcacctatttcagagtggccttttttgggcaggctgcgcaataccagtttacggattctgaaaccgacgtcgaggggttctttgaggatgaggatggtaaagaatacatctacaaggaaccaaagctgacacctcttagcgagatcagtcagaggctgctgaaactgtactctgataaattcggtagtgagaatgttaaaatgattcaagacagtggcaaagttaaccctaaggacctggattccaaatacgcgtatatccaagtcacccatgtgatcccattttttgatgagaaagagctgcaggaacgaaagacggaattcgaaaggtcacataacatacgaaggttcatgttcgaaatgcccttcacgcagaccgggaaacgtcaagggggagtcgaagaacaatgtaagagacgcactatcctcaccgccattcattgcttcccttacgtgaagaagagaatcccggtcatgtaccaacatcacactgacctgaacccgattgaggtcgcgattgatgagatgtccaagaaggtggccgagctgcgccagctttgcagttcggcagaagtggacatgattaagctacagcttaagctacagggctctgtatccgttcaagtgaacgctgggcctctcgcttacgcgagagcattcctggacgacacaaataccaagaggtaccccgataataaagtgaaactactaaaagaggtctttcggcagttcgttgaagcctgcggccaagcgcttgccgtgaatgagagactgataaaagaagatcagttggagtaccaggaagagatgaaagcaaactatagggagatggctaaggaactgtcagaaatcatgcacgagcaggtacgtagatctgccccttggcgcagacggagggcctcctaccgcatccccttcaccagctctaccccaagcgtggggctgcagcaggcccagtggtttacgggcta

SEQ ID NO: 293166 - protein, 2101 aa, Artificial Sequence [sequence omitted]

SEQ ID NO: 293167 - DNA, 6306 bp, Artificial Sequence
  derived and/or modified sequence
atgcaggccgacaagtgcagaaccagcagcagaagcgtgaagaaggagctggtgatcgagagccccctgcagtacaaggacgccgcccagggcgaggtggaggccgagagccccggccccgtgcccgccaagcccaagctgatcgagcccctggactacgagaacgtgatcgtgcagaagaagacccagatcctgaacgactgcctgagagagatgctgctgttcccctacgacgacttccagaccgccatcctgagaagacagggcagatacatctgcagcaccgtgcccgccaaggccgaggaggaggcccagagcctgttcgtgaccgagtgcatcaagacctacaacagcgactggcacctggtgaactacaagtacgaggactacagcggcgagttcagacagctgcccaacaaggtggtgaagctggacaagctgcccgtgcacgtgtacgaggtggacgaggaggtggacaaggacgaggacgccgccagcctgggcagccagaagggcggcatcaccaagcacggctggctgtacaagggcaacatgaacagcgccatcagcgtgaccatgagaagcttcaagagaagattcttccacctgatccagctgggcgacggcagctacaacctgaacttctacaaggacgagaagatcagcaaggagcccaagggcagcatcttcctggacagctgcatgggcgtggtgcagaacaacaaggtgagaagattcgccttcgagctgaagatgcaggacaagagcagctacctgctggccgccgacagcgaggtggagatggaggagtggatcaccatcctgaacaagatcctgcagctgaacttcgaggccgccatgcaggagaagagaaacggcgacagccacgaggacgacgagcagagcaagctggagggcagcggcagcggcctggacagctacctgcccgagctggccaagagcgccagagaggccgagatcaagctgaagagcgagagcagagtgaagctgttctacctggaccccgacgcccagaagctggacttcagcagcgccgagcccgaggtgaagagcttcgaggagaagttcggcaagagaatcctggtgaagtgcaacgacctgagcttcaacctgcagtgctgcgtggccgagaacgaggagggccccaccaccaacgtggagcccttcttcgtgaccctgagcctgttcgacatcaagtacaacagaaagatcagcgccgacttccacgtggacctgaaccacttcagcgtgagacagatgctggccaccaccagccccgccctgatgaacggcagcggccagagccccagcgtgctgaagggcatcctgcacgaggccgccatgcagtaccccaagcagggcatcttcagcgtgacctgcccccaccccgacatcttcctggtggccagaatcgagaaggtgctgcagggcagcatcacccactgcgccgagccctacatgaagagcagcgacagcagcaaggtggcccagaaggtgctgaagaacgccaagcaggcctgccagagactgggccagtacagaatgcccttcgcctgggccgccagaaccctgttcaaggacgccagcggcaacctggacaagaacgccagattcagcgccatctacagacaggacagcaacaagctgagcaacgacgacatgctgaagctgctggccgacttcagaaagcccgagaagatggccaagctgcccgtgatcctgggcaacctggacatcaccatcgacaacgtgagcagcgacttccccaactacgtgaacagcagctacatccccaccaagcagttcgagacctgcagcaagacccccatcaccttcgaggtggaggagttcgtgccctgcatccccaagcacacccagccctacaccatctacaccaaccacctgtacgtgtaccccaagtacctgaagtacgacagccagaagagcttcgccaaggccagaaacatcgccatctgcatcgagttcaaggacagcgacgaggaggacagccagcccctgaagtgcatctacggcagacccggcggccccgtgttcaccagaagcgccttcgccgccgtgctgcaccaccaccagaaccccgagttctacgacgagatcaagatcgagctgcccacccagctgcacgagaagcaccacctgctgctgaccttcttccacgtgagctgcgacaacagcagcaagggcagcaccaagaagagagacgtggtggagacccaggtgggctacagctggctgcccctgctgaaggacggcagagtggtgaccagcgagcagcacatccccgtgagcgccaacctgcccagcggctacctgggctaccaggagctgggcatgggcagacactacggccccgagatcaagtgggtggacggcggcaagcccctgctgaagatcagcacccacctggtgagcaccgtgtacacccaggaccagcacctgcacaacttcttccagtactgccagaagaccgagagcggcgcccaggccctgggcaacgagctggtgaagtacctgaagagcctgcacgccatggagggccacgtgatgatcgccttcctgcccaccatcctgaaccagctgttcagagtgctgaccagagccacccaggaggaggtggccgtgaacgtgaccagagtgatcatccacgtggtggcccagtgccacgaggagggcctggagagccacctgagaagctacgtgaagtacgcctacaaggccgagccctacgtggccagcgagtacaagaccgtgcacgaggagctgaccaagagcatgaccaccatcctgaagcccagcgccgacttcctgaccagcaacaagctgctgaagtacagctggttcttcttcgacgtgctgatcaagagcatggcccagcacctgatcgagaacagcaaggtgaagctgctgagaaaccagagattccccgccagctaccaccacgccgtggagaccgtggtgaacatgctgatgccccacatcacccagaagttcagagacaaccccgaggccagcaagaacgccaaccacagcctggccgtgttcatcaagagatgcttcaccttcatggacagaggcttcgtgttcaagcagatcaacaactacatcagctgcttcgcccccggcgaccccaagaccctgttcgagtacaagttcgagttcctgagagtggtgtgcaaccacgagcactacatccccctgaacctgcccatgcccttcggcaagggcagaatccagagataccaggacctgcagctggactacagcctgaccgacgagttctgcagaaaccacttcctggtgggcctgctgctgagagaggtgggcaccgccctgcaggagttcagagaggtgagactgatcgccatcagcgtgctgaagaacctgctgatcaagcacagcttcgacgacagatacgccagcagaagccaccaggccagaatcgccaccctgtacctgcccctgttcggcctgctgatcgagaacgtgcagagaatcaacgtgagagacgtgagccccttccccgtgaacgccggcatgaccgtgaaggacgagagcctggccctgcccgccgtgaaccccctggtgaccccccagaagggcagcaccctggacaacagcctgcacaaggacctgctgggcgccatcagcggcatcgccagcccctacaccaccagcacccccaacatcaacagcgtgagaaacgccgacagcagaggcagcctgatcagcaccgacagcggcaacagcctgcccgagagaaacagcgagaagagcaacagcctggacaagcaccagcagagcagcaccctgggcaacagcgtggtgagatgcgacaagctggaccagagcgagatcaagagcctgctgatgtgcttcctgtacatcctgaagagcatgagcgacgacgccctgttcacctactggaacaaggccagcaccagcgagctgatggacttcttcaccatcagcgaggtgtgcctgcaccagttccagtacatgggcaagagatacatcgccagaaccggcatgatgcacgccagactgcagcagctgggcagcctggacaacagcctgaccttcaaccacagctacggccacagcgacgccgacgtgctgcaccagagcctgctggaggccaacatcgccaccgaggtgtgcctgaccgccctggacaccctgagcctgttcaccctggccttcaagaaccagctgctggccgaccacggccacaaccccctgatgaagaaggtgttcgacgtgtacctgtgcttcctgcagaagcaccagagcgagaccgccctgaagaacgtgttcaccgccctgagaagcctgatctacaagttccccagcaccttctacgagggcagagccgacatgtgcgccgccctgtgctacgagatcctgaagtgctgcaacagcaagctgagcagcatcagaaccgaggccagccagctgctgtacttcctgatgagaaacaacttcgactacaccggcaagaagagcttcgtgagaacccacctgcaggtgatcatcagcgtgagccagctgatcgccgacgtggtgggcatcggcggcaccagattccagcagagcctgagcatcatcaacaactgcgccaacagcgacagactgatcaagcacaccagcttcagcagcgacgtgaaggacctgaccaagagaatcagaaccgtgctgatggccaccgcccagatgaaggagcacgagaacgaccccgagatgctggtggacctgcagtacagcctggccaagagctacgccagcacccccgagctgagaaagacctggctggacagcatggccagaatccacgtgaagaacggcgacctgagcgaggccgccatgtgctacgtgcacgtgaccgccctggtggccgagtacctgaccagaaaggaggccgtgcagtgggagccccccctgctgccccacagccacagcgcctgcctgagaagaagcagaggcggcgtgttcagacagggctgcaccgccttcagagtgatcacccccaacatcgacgaggaggccagcatgatggaggacgtgggcatgcaggacgtgcacttcaacgaggacgtgctgatggagctgctggagcagtgcgccgacggcctgtggaaggccgagagatacgagctgatcgccgacatctacaagctgatcatccccatctacgagaagagaagagacttcgagagactggcccacctgtacgacaccctgcacagagcctacagcaaggtgaccgaggtgatgcacagcggcagaagactgctgggcacctacttcagagtggccttcttcggccaggccgcccagtaccagttcaccgacagcgagaccgacgtggagggcttcttcgaggacgaggacggcaaggagtacatctacaaggagcccaagctgacccccctgagcgagatcagccagagactgctgaagctgtacagcgacaagttcggcagcgagaacgtgaagatgatccaggacagcggcaaggtgaaccccaaggacctggacagcaagtacgcctacatccaggtgacccacgtgatccccttcttcgacgagaaggagctgcaggagagaaagaccgagttcgagagaagccacaacatcagaagattcatgttcgagatgcccttcacccagaccggcaagagacagggcggcgtggaggagcagtgcaagagaagaaccatcctgaccgccatccactgcttcccctacgtgaagaagagaatccccgtgatgtaccagcaccacaccgacctgaaccccatcgaggtggccatcgacgagatgagcaagaaggtggccgagctgagacagctgtgcagcagcgccgaggtggacatgatcaagctgcagctgaagctgcagggcagcgtgagcgtgcaggtgaacgccggccccctggcctacgccagagccttcctggacgacaccaacaccaagagataccccgacaacaaggtgaagctgctgaaggaggtgttcagacagttcgtggaggcctgcggccaggccctggccgtgaacgagagactgatcaaggaggaccagctggagtaccaggaggagatgaaggccaactacagagagatggccaaggagctgagcgagatcatgcacgagcaggtgagaagaagcgccccctggagaagaagaagagccagctacagaatccccttcaccagcagcacccccagcgtgggcctgcagcaggcccagtggttcaccggctag

SEQ ID NO: 293168 - DNA, 7643 bp, Artificial Sequence
  derived and/or modified sequence
gtcatgccttcccaccccacaggctctgcagacccagccagcggggctgaccacttgtgcctgggaagccagtttcctttccttccttggaccactggcatgcctgtgccttgcacggccagggactcgcagctgttccagttgcagactttctgacttgcgttttcagccgagaatgcaggctgataaatgcaggacaagtagtagaagtgtcaaaaaggaactggtgattgagtcccccctgcaatacaaggatgcagctcagggcgaagtggaagcagagagcccgggccctgtgccggcaaagccaaagctaattgagccactcgactatgaaaatgtcatcgtccagaagaagactcagatcctgaacgactgtttacgggagatgctgctcttcccttacgatgactttcagacggccatcctgagacgacagggtcgatacatatgctcaacagtgcctgcgaaggcggaagaggaagcacagagcttgtttgttacagagtgcatcaaaacctataactctgactggcatcttgtgaactataaatatgaagattactcaggagagtttcgacagcttccgaacaaagtggtcaagttggataaacttccagttcatgtctatgaagttgacgaggaggtcgacaaagatgaggatgctgcctcccttggttcccagaagggtgggatcaccaagcatggctggctgtacaaaggcaacatgaacagtgccatcagcgtgaccatgaggtcatttaagagacgatttttccacctgattcaacttggcgatggatcctataatttgaatttttataaagatgaaaagatctccaaagaaccaaaaggatcaatatttctggattcctgtatgggtgtcgttcagaacaacaaagtcaggcgttttgcttttgagctcaagatgcaggacaaaagtagttatctcttggcagcagacagtgaagtggaaatggaagaatggatcacaattctaaataagatcctccagctcaactttgaagctgcaatgcaagaaaagcgaaatggcgactctcacgaagatgatgaacaaagcaaattggaaggttctggttccggtttagatagctacctgccggaacttgccaagagtgcaagagaagcagaaatcaaactgaaaagtgaaagcagagtcaaacttttttatttggacccagatgcccagaagcttgacttctcatcagctgagccagaagtgaagtcatttgaagagaagtttggaaaaaggatccttgtcaagtgcaatgatttatctttcaatttgcaatgctgtgttgccgaaaatgaagaaggacccactacaaatgttgaacctttctttgttactctatccctgtttgacataaaatacaaccggaagatttctgccgatttccacgtagacctgaaccatttctcagtgaggcaaatgctcgccaccacgtccccggcgctgatgaatggcagtgggcagagcccatctgtcctcaagggcatccttcatgaagccgccatgcagtatccgaagcagggaatattttcagtcacttgtcctcatccagatatatttcttgtggccagaattgaaaaagtccttcaggggagcatcacacattgcgctgagccatatatgaaaagttcagactcttctaaggtggcccagaaggtgctgaagaatgccaagcaggcatgccaaagactaggacagtatagaatgccatttgcttgggcagcaaggacattgtttaaggatgcatctggaaatcttgacaaaaatgccagattttctgccatctacaggcaagacagcaataagctatccaatgatgacatgctcaagttacttgcagactttcggaaacctgagaagatggctaagctcccagtgattttaggcaatctagacattacaattgataatgtttcctcagacttccctaattatgttaattcatcatacattcccacaaaacaatttgaaacctgcagtaaaactcccatcacgtttgaagtggaggaatttgtgccctgcataccaaaacacactcagccttacaccatctacaccaatcacctttacgtttatcctaagtacttgaaatacgacagtcagaagtcttttgccaaggctagaaatattgcgatttgcattgaattcaaagattcagatgaggaagactctcagccccttaagtgcatttatggcagacctggtgggccagttttcacaagaagcgcctttgctgcagttttacaccatcaccaaaacccagaattttatgatgagattaaaatagagttgcccactcagctgcatgaaaagcaccacctgttgctcacattcttccatgtcagctgtgacaactcaagtaaaggaagcacgaagaagagggatgtcgttgaaacccaagttggctactcctggcttcccctcctgaaagacggaagggtggtgacaagcgagcagcacatcccggtctcggcgaaccttccttcgggctatcttggctaccaggagcttgggatgggcaggcattatggtccggaaattaaatgggtagatggaggcaagccactgctgaaaatttccactcatctggtttctacagtgtatactcaggatcagcatttacataattttttccagtactgtcagaaaaccgaatctggagcccaagccttaggaaacgaacttgtaaagtaccttaagagtctgcatgcgatggaaggccacgtgatgatcgccttcttgcccactatcctaaaccagctgttccgagtcctcaccagagccacacaggaagaagtcgcggttaacgtgactcgggtcattattcatgtggttgcccagtgccatgaggaaggattggagagccacttgaggtcatatgttaagtacgcgtataaggctgagccatatgttgcctctgaatacaagacagtgcatgaagaactgaccaaatccatgaccacgattctcaagccttctgccgatttcctcaccagcaacaaactactgaagtactcatggtttttctttgatgtactgatcaaatctatggctcagcatttgatagagaactccaaagttaagttgctgcgaaaccagagatttcctgcatcctatcatcatgcagtggaaaccgttgtaaatatgctgatgccacacatcactcagaagtttcgagataatccagaggcatctaagaacgcgaatcatagccttgctgtcttcatcaagagatgtttcaccttcatggacaggggctttgtcttcaagcagatcaacaactacattagctgttttgctcctggagacccaaagaccctctttgaatacaagtttgaatttctccgtgtagtgtgcaaccatgaacattatattccgttgaacttaccaatgccatttggaaaaggcaggattcaaagataccaagacctccagcttgactactcattaacagatgagttctgcagaaaccacttcttggtgggactgttactgagggaggtggggacagccctccaggagttccgggaggtccgtctgatcgccatcagtgtgctcaagaacctgctgataaagcattcttttgatgacagatatgcttcaaggagccatcaggcaaggatagccaccctctacctgcctctgtttggtctgctgattgaaaacgtccagcggatcaatgtgagggatgtgtcacccttccctgtgaacgcgggcatgactgtgaaggatgaatccctggctctaccagctgtgaatccgctggtgacgccgcagaagggaagcaccctggacaacagcctgcacaaggacctgctgggcgccatctccggcattgcttctccatatacaacctcaactccaaacatcaacagtgtgagaaatgctgattcgagaggatctctcataagcacagattcgggtaacagccttccagaaaggaatagtgagaagagcaattccctggataagcaccaacaaagtagcacattgggaaattccgtggttcgctgtgataaacttgaccagtctgagattaagagcctactgatgtgtttcctctacatcttaaagagcatgtctgatgatgctttgtttacatattggaacaaggcttcaacatctgaacttatggatttttttacaatatctgaagtctgcctgcaccagttccagtacatggggaagcgatacatagccagaacaggaatgatgcatgccagattgcagcagctgggcagcctggataactctctcacttttaaccacagctatggccactcggacgcagatgttctgcaccagtcattacttgaagccaacattgctactgaggtttgcctgacagctctggacacgctttctctatttacattggcgtttaagaaccagctcctggccgaccatggacataatcctctcatgaaaaaagtttttgatgtctacctgtgttttcttcaaaaacatcagtctgaaacggctttaaaaaatgtcttcactgccttaaggtccttaatttataagtttccctcaacattctatgaagggagagcggacatgtgtgcggctctgtgttacgagattctcaagtgctgtaactccaagctgagctccatcaggacggaggcctcccagctgctctacttcctgatgaggaacaactttgattacactggaaagaagtcctttgtccggacacatttgcaagtcatcatatctgtcagccagctgatagcagacgttgttggcattgggggaaccagattccagcagtccctgtccatcatcaacaactgtgccaacagtgaccggcttattaagcacaccagcttctcctctgatgtgaaggacttaaccaaaaggatacgcacggtgctaatggccaccgcccagatgaaggagcatgagaacgacccagagatgctggtggacctccagtacagcctggccaaatcctatgccagcacgcccgagctcaggaagacgtggctcgacagcatggccaggatccatgtcaaaaatggcgatctctcagaggcagcaatgtgctatgtccacgtaacagccctagtggcagaatatctcacacggaaagaagcagtccagtgggagccgccccttctcccccacagccatagcgcctgcctgaggaggagccggggaggcgtgtttagacaaggatgcaccgccttcagggtcattaccccaaacatcgacgaggaggcctccatgatggaagacgtggggatgcaggatgtccatttcaacgaggatgtgctgatggagctccttgagcagtgcgcagatggactctggaaagccgagcgctacgagctcatcgccgacatctacaaacttatcatccccatttatgagaagcggagggattttgagaggctggcccatctgtatgacacgctgcaccgggcctacagcaaagtgaccgaggtcatgcactcgggccgcaggcttctggggacctacttccgggtagccttcttcgggcaggcagcgcaataccagtttacagacagtgaaacagatgtggagggattctttgaagatgaagatggaaaggagtatatttacaaggaacccaaactcacaccgctgtcggaaatttctcagagactccttaaactgtactcggataaatttggttctgaaaatgtcaaaatgatacaggattctggcaaggtcaaccctaaggatctggattctaagtatgcatacatccaggtgactcacgtcatccccttctttgacgaaaaagagttgcaagaaaggaaaacagagtttgagagatcccacaacatccgccgcttcatgtttgagatgccatttacgcagaccgggaagaggcagggcggggtggaagagcagtgcaaacggcgcaccatcctgacagccatacactgcttcccttatgtgaagaagcgcatccctgtcatgtaccagcaccacactgacctgaaccccatcgaggtggccattgacgagatgagtaagaaggtggcggagctccggcagctgtgctcctcggccgaggtggacatgatcaaactgcagctcaaactccagggcagcgtgagtgttcaggtcaatgctggcccactagcatatgcgcgagctttcttagatgatacaaacacaaagcgatatcctgacaataaagtgaagctgcttaaggaagttttcaggcaatttgtggaagcttgcggtcaagccttagcggtaaacgaacgtctgattaaagaagaccagctcgagtatcaggaagaaatgaaagccaactacagggaaatggcgaaggagctttctgaaatcatgcatgagcaggtgagaagatctgccccctggaggagaagacgagcgtcttaccgaattcccttcacatcttcaacgccatcagtgggactccaacaagcacaatggttcacgggatgaccagctcgtcttcggtcgtgtgattacatctcatggcccgtgtgtggggacttgctttgtcatttgcaaactcaggatgctttccaaagccaatcactggggagaccgagcacagggaggaccaaggggaaggggagagaaaggaaataaagaacaacgttatttcttaacagactttctataggagttgtaagaaggtgcacatatttttttaaatctcactggcaatattcaaagttttcattgtgtcttaacaaaggtgtggtagacactcttgagctggacttagattttattcttccttgcagagtagtgttagaatagatggcctacagaaaaaaaaggttctgggatctacatggcagggagggctgcactgacattgatgcctgggggaccttttgcctcgaggctgagctggaaaatcttgaaaatattttttttttcctgtggcacattcaggttgaatacaagaactatttttgtgactagtttttgatgacctaagggaactgaccattgtaatttttgtaccagtgaaccaggagatttagtgcttttatattcatttccttgcatttaagaaaatatgaaagcttaaggaattatgtgagcttaaaactagtcaagcagtttagaaccaaaggcctatattaataaccgcaactatgctgaaaagtacaaagtagtacagtatattgttatgtacatatcattgttaatacagtcctggcattctgtacatatatgtattacatttctacatttttaatactcacatgggcttatgcattaagtttaattgtgataaatttgtgctgttccagtatatgcaatacactttaatgttttattcttgtacataaaaatgtgcaatatggagatgtatacagtctttactatattaggtttataaacagttttaagaatttcatccttttgccaaaatggtggagtatgtaattggtaaatcataaatcctgtggtgaatggtggtgtactttaaagctgtcaccatgttatattttcttttaagactttaatttagtaattttatatttgggaaaataaaggtttttaattttatttaactggaatcactgccctgctgtaattaaacattctgtaccacatctgtattaaaaagacattgctgaccatt

SEQ ID NO: 293169 - DNA, 6306 bp, Artificial Sequence
  derived and/or modified sequence
atgcaagcagacaagtgcaggacatcgtctcgcagcgtaaagaaggagctagtgatcgaatctcctctccagtacaaggatgccgcacagggtgaggtcgaagcagaaagccccggcccagtgcctgctaaacctaagctgatagagccgttagactatgaaaacgtcatagtgcaaaaaaagactcaaatccttaacgattgtctcagagaaatgctgctgtttccctatgatgactttcagaccgcaattctccgtcggcagggcaggtatatctgctcaactgtgcctgccaaagctgaggaagaggcccagtccctgttcgtgacagagtgcattaagacttacaatagcgattggcacttggttaattacaagtacgaagattacagtggagaattcagacagttgccaaataaggtggtgaagttggacaaactgccagtgcatgtctacgaagtcgatgaagaggtggacaaagatgaagacgcagcttcactagggtcccagaagggcggcataacaaagcatggatggttgtacaagggaaatatgaactcagctatttctgttacaatgcgctctttcaaacggagattcttccatctcatccagttaggcgatgggtcttacaacctgaatttctacaaagatgagaaaatttctaaggagccgaaaggctccatctttctggactcatgtatgggagttgtgcagaataataaggtgcgccgcttcgctttcgaactcaaaatgcaggacaagtctagctatcttctggcagccgattcagaggtcgagatggaggaatggattacgatactcaacaagatactccaactgaactttgaggccgctatgcaagagaaaaggaatggtgatagccatgaagacgacgagcaatccaaactcgaaggatcaggatccggactggactcctacctccccgaactggccaagagcgcccgggaggccgaaatcaagcttaagtctgagagtagggtcaaactcttctacctggatccagatgcccaaaagctggacttctcgtcagcagaaccagaagtcaaatccttcgaagagaagtttggcaagcgaattctggtgaaatgtaacgatctttcgttcaatttacagtgttgtgtcgcagaaaacgaggaggggccaaccaccaacgtggagccttttttcgtgaccttgtcattatttgacatcaaatacaaccgaaagatttcagcagatttccatgtggacctgaaccacttctccgttagacagatgctcgcaacaacaagcccggcactcatgaatggcagcggtcaaagcccctcagttctgaagggcattctccacgaggccgccatgcagtatccaaagcagggtatattttcagtgacatgcccccatcccgatatctttctggttgccagaatcgaaaaggtgcttcaaggctccatcacacactgtgctgagccttacatgaaatcctctgacagctcaaaggtggcacagaaggtgcttaagaacgcaaagcaagcctgccagcggctgggccagtaccgcatgccattcgcctgggcagcccgaacgctattcaaagatgcaagcggcaacttggataagaatgccagattctccgccatctacagacaagacagtaataagctttccaatgacgatatgctgaaactgcttgcggatttcagaaagccggagaagatggccaaacttcccgttatcttgggaaacctcgatatcacaatcgacaatgtgagcagcgacttcccgaactacgtgaattcctcctacattcctacaaaacagtttgaaacttgttctaaaactccaatcaccttcgaagtagaggagtttgtgccctgcatccccaaacacacacagccctacactatctacacgaaccatttgtatgtgtaccccaaatatctcaaatacgattcccagaagtcattcgccaaggcccgaaacatcgcaatttgcattgagttcaaggactcagacgaggaagattcacaacctctcaaatgtatttacgggagaccaggcggacccgtcttcactaggtctgcctttgctgccgtcttgcatcaccaccagaatcctgagttttatgatgaaattaagattgaactccctactcagttgcatgagaaacatcacctgctgctaacgttttttcatgtgtcctgtgataattcatccaagggctcaactaaaaagcgggatgtggtagagactcaggtagggtattcttggttacctttgctgaaggacggacgggttgttacaagcgagcagcatatcccagtatctgcaaacctaccctctggctacttgggatatcaggaactgggcatggggaggcattacggaccagagattaagtgggttgacggagggaagcccctgttaaaaatcagtacacacttggtttctactgtgtatactcaggatcagcacctccataacttcttccagtactgccaaaagaccgagtcaggcgcgcaggcactcggaaacgagctggtgaaatacctgaagtcattgcatgccatggagggacatgttatgatcgccttcctgccaacaatattgaaccagttattccgggtgctgacccgggccacccaggaggaagtggctgtcaatgtgacaagagtgatcatccacgtggtggctcagtgtcacgaagagggccttgagagccacctcagaagttatgtgaagtatgcttacaaggcagaaccatatgtggccagtgaatataagacagtgcacgaggaactgactaagtcaatgacaacgatcttaaagcctagtgcagatttcctgacttcaaataaactgttgaaatattcttggttcttttttgacgttttgattaagtctatggctcagcatttgattgaaaatagcaaagtgaagctactgcgtaaccagcggtttcctgcctcatatcaccacgcggtcgagaccgtcgttaacatgcttatgcctcatattactcaaaaatttcgggacaacccggaggctagcaagaacgctaaccacagcctggccgtctttataaaacgatgcttcacatttatggatcgcggattcgtattcaagcagattaacaactacatatcctgtttcgccccaggcgatccaaaaactctgtttgagtacaagttcgagtttctgagagtggtgtgcaatcatgagcactatattccattaaacctacccatgcctttcggcaaagggcgcatacagaggtatcaggatctgcaactggattactcactcactgacgagttttgtaggaatcacttcctggttgggctgctgttgagagaggtcgggactgctcttcaggagttccgcgaggtacgccttattgccatttcagtattgaagaacctgctgattaagcatagctttgacgatcgctacgcatcccggagtcaccaggcccggattgccaccctttatctgcccctgtttggcttactcattgagaatgtgcaacggattaacgtgagggacgtgagccccttccctgtgaatgcgggcatgacagtgaaagatgaaagtctggcactgccggccgtgaatcccctggttacccctcaaaagggatccaccctggataactcactccataaagatcttctgggtgcaatcagtggcatcgcctccccttatactacatccaccccaaatatcaactcagtgcgcaacgcggactcaagggggagtctgatttccactgattccggcaatagcttgccagaaaggaactccgagaagagcaacagtctcgacaagcatcaacagagttccactctgggaaactcagtcgtgaggtgcgacaaacttgatcaatcagaaattaaatcactgctaatgtgtttcctgtacatactcaaatcaatgtccgacgatgctttgttcacctactggaataaggcttccaccagtgagttgatggatttcttcacaatttctgaggtgtgtctccaccagtttcagtacatgggtaagcgttatattgccaggactggaatgatgcatgctcggcttcagcagctgggatccctagacaattccctgacatttaatcattcttacggccatagcgatgctgatgtactgcaccagagtctgctggaggccaatattgcgacagaagtgtgtctgactgccctggataccctgtcactttttacattggctttcaaaaaccagctgctggccgatcatggacataaccccctaatgaaaaaagtattcgacgtttatctttgttttctgcaaaagcatcagtccgagactgccttgaagaatgtgtttactgcgttgaggtctctgatctacaaattcccgtcaaccttttacgaaggacgagccgatatgtgtgccgctttgtgctacgagattctcaagtgttgcaatagcaagctttcatccatccggaccgaggcgtctcagctactgtatttcttaatgcgtaataactttgactacactggcaaaaaatcctttgttcgaactcacctccaggtgataatctccgtgtcccagctaattgccgacgtggtcgggatcggaggcaccagattccagcaatccctaagcatcataaataactgcgcgaacagcgatcgtcttataaagcacacctccttttcgagcgatgttaaggacctaaccaagagaatccggacagtcctgatggcaactgcccagatgaaagagcacgaaaatgatccagagatgttggtcgacttgcagtactccctggccaagagttatgcctctaccccagagttgagaaaaacatggttggatagcatggcacggatccacgtcaagaatggggacctttcagaggccgccatgtgctacgtccacgtgacagctttggtggcagaatatctaaccagaaaggaggccgtccaatgggagccgcctctgctgccccacagccactccgcgtgcttacgaagatctcgcggtggcgtctttagacagggatgcacagcattccgggtaatcacccccaatatcgatgaggaagcctctatgatggaggacgtcggcatgcaagatgtgcacttcaacgaggacgtgctgatggaacttctggagcagtgcgcggacggactgtggaaggccgagcgctacgaactgatcgctgacatctacaagctgattatcccgatttacgagaagcgacgggatttcgagcggcttgcacatttgtatgatacactacatagagcctactctaaagtgaccgaggtcatgcattctggccgccggctgctgggcacatactttagagtcgccttcttcggacaagctgcacagtatcagttcaccgacagcgaaaccgacgttgaggggttctttgaggatgaagacggcaaagaatacatctacaaggaacccaagctcacacccctgtctgaaatctcccaaagactcctgaagctgtattcagacaaatttggcagcgagaacgtaaaaatgattcaggattccggcaaggtgaaccccaaagatctggattcaaagtatgcgtatattcaagtcacgcatgtgattcccttcttcgacgaaaaagaactgcaggagagaaagaccgagttcgagcgttcccacaatattcgccgctttatgttcgagatgccatttacacagactggcaaacgccaggggggggtggaggaacagtgtaaaaggaggactatactcactgccatccattgctttccttacgtcaagaaacgaatacccgtaatgtaccagcaccatactgacctgaatccgattgaggtcgccatcgatgaaatgtcaaagaaagtggctgaactgcggcagctttgctcatctgccgaagtagatatgattaagttgcaactgaagctccagggctccgtgtcagtgcaggtgaatgcagggcccctggcttacgcacgcgccttcctggatgatacaaatacaaaaaggtatccggacaataaagtaaagctgctcaaggaggtgttcagacagtttgtagaagcctgcggacaggccctagctgtcaacgagagattaatcaaagaggaccagttggagtatcaggaggagatgaaggcaaactatagagagatggccaaggaactttccgaaatcatgcatgagcaggtaagacggtctgcgccgtggagacgtcgcagagcgtcctaccggattccctttacaagttccacccctagtgttggcctacagcaagcgcagtggttcacaggctag

SEQ ID NO: 293170 - DNA, 6306 bp, Artificial Sequence
  derived and/or modified sequence
atgcaggccgacaagtgcaggaccagcagccgctctgtgaagaaggagctggtgattgagagccccctgcagtacaaggatgctgcccagggcgaggtggaggccgagagccctggccctgtgcctgccaagcccaagctgattgagcccctggactatgaaaatgtgattgtgcagaagaagacccagatcctgaatgactgcctgcgggagatgctgctcttcccctatgatgacttccagacagccatcctgcggcggcagggccgctacatctgcagcacagtgcctgccaaggccgaggaggaggcccagagcctgtttgtgacagagtgcatcaagacctacaacagcgactggcacctggtgaactacaagtatgaggactacagcggggagttccggcagctgcccaacaaggtggtgaagctggacaagctgcctgtgcacgtgtatgaggtggatgaggaggtggacaaggatgaagatgctgccagcctgggcagccagaagggcggcatcaccaagcacggctggctgtacaagggcaacatgaacagcgccatctctgtgaccatgaggagcttcaagaggcgcttcttccacctgatccagctgggagatggcagctacaacctgaacttctacaaggatgagaagatcagcaaggagcccaagggcagcatcttcctggacagctgcatgggcgtggtgcagaacaacaaggtgagaagatttgcctttgagctgaagatgcaggacaagagcagctacctgctggccgctgacagcgaggtggagatggaggagtggatcaccatcctgaacaagatcctgcagctgaactttgaagctgccatgcaggagaagagaaatggagacagccatgaagatgatgagcagagcaagctggagggcagcggcagcggcctggacagctacctgcctgagctggccaagagcgcccgggaggccgagatcaagctgaagtctgagagccgggtgaagctgttctacctggaccctgatgcccagaagctggacttcagcagcgctgagcctgaggtgaagagctttgaggagaagtttgggaagaggatcctggtgaagtgcaatgacctgtccttcaacctgcagtgctgcgtggccgagaatgaggagggccccaccaccaacgtggagcccttctttgtgaccctgagcctgtttgacatcaagtacaacaggaagatctctgctgacttccacgtggacctgaaccacttctctgtgcggcagatgctggccaccaccagccctgccctgatgaatggaagtggccagagccccagcgtgctgaagggcatcctgcatgaagctgccatgcagtaccccaagcagggcatcttctctgtgacctgcccccacccagacatcttcctggtggcccgcatcgagaaggtgctgcagggcagcatcacccactgtgccgagccctacatgaagagcagtgacagcagcaaggtggcccagaaggtgctgaagaatgccaagcaggcctgccagaggctgggccagtacaggatgccctttgcctgggccgcccggaccctcttcaaggatgccagcggcaacctggacaagaatgcccgcttcagcgccatctaccggcaggacagcaacaagctgagcaatgatgacatgctgaagctgctggccgacttcaggaagccagagaagatggccaagctgcccgtcatcctgggcaacctggacatcaccatcgacaacgtgtccagtgacttccccaactacgtgaacagcagctacatccccaccaagcagtttgagacctgcagcaagacccccatcacctttgaggtggaggagtttgtgccctgcatccccaagcacacccagccctacaccatctacaccaaccacctgtatgtgtaccccaagtacctgaagtatgacagccagaagagctttgccaaggccagaaatattgccatctgcatcgagttcaaggacagtgatgaggaggacagccagcccctgaagtgcatctacggccggcctgggggccctgtgttcaccaggtctgcctttgctgctgtgctgcaccaccaccagaaccctgagttctatgatgagatcaagattgagctgcccacccagctgcacgagaagcaccacctgctgctgaccttcttccacgtgtcctgtgacaacagcagcaagggcagcaccaagaagagagatgtggtggagacccaggtgggctacagctggctgcccctgctgaaggatggccgggtggtgaccagcgagcagcacatccctgtgtctgccaacctgcccagcggctacctgggctaccaggagctgggcatgggccgccactacggccctgagatcaagtgggtggatggcggcaagcccctgctgaagatcagcacccacctggtgtccacagtgtacacccaggaccagcacctgcacaacttcttccagtactgccagaagacagaaagtggggcccaggccctgggcaatgagctggtgaagtacctgaagagcctgcacgccatggagggccacgtgatgattgccttcctgcccaccatcctgaaccagctgttccgggtgctgacccgggccacccaggaggaggtggccgtgaatgtgaccagggtcatcatccacgtggtggcccagtgccacgaggagggcctggagagccacctgcggagctatgtgaagtatgcctacaaggccgagccctacgtggccagcgagtacaagacagtgcatgaggagctgaccaagtccatgaccaccatcctgaagcccagcgctgacttcctgaccagcaacaagctgctgaagtacagctggttcttctttgatgtgctgatcaagtccatggcccagcacctgattgagaacagcaaggtgaagctgctgaggaaccagcgcttccctgccagctaccaccacgctgtggagaccgtggtgaacatgctgatgccccacatcacccagaagttccgggacaaccctgaggccagcaagaatgccaaccacagcctggccgtgttcatcaagcgctgcttcaccttcatggaccggggctttgtgttcaagcagatcaacaactacatcagctgctttgcccctggggaccccaagaccctgtttgagtacaagtttgagttcctgcgggtggtgtgcaaccacgagcactacatccccctgaacctgcccatgccctttgggaagggccgcatccagcgctaccaggacctgcagctggactacagcctgacagatgagttctgcaggaaccacttcctggtgggcctgctgctgcgggaggtgggcacagccctgcaggagttccgggaggtgcggctcatcgccatctctgtgctgaagaacctgctgatcaagcacagctttgatgacagatatgccagccgcagccaccaggccagaattgccaccctgtacctgcccctgtttggcctgctgattgaaaatgtgcagaggatcaacgtgagagatgtgagccccttccctgtgaatgccggcatgacagtgaaggatgagagcctggccctgcctgctgtgaaccccctggtgaccccccagaagggcagcaccctggacaacagcctgcacaaggacctgctgggcgccatcagcggcatcgccagcccctacaccaccagcacccccaacatcaacagcgtgagaaatgctgacagccggggcagcctcatcagcacagacagcggcaacagcctgcctgagagaaattctgagaagagcaacagcctggacaagcaccagcagagcagcaccctgggcaacagcgtggtgcgctgtgacaagctggaccagagcgagatcaagagcctgctgatgtgcttcctgtacatcctgaagtccatgtctgatgatgccctcttcacctactggaacaaggccagcaccagcgagctgatggacttcttcaccatcagcgaggtgtgcctgcaccagttccagtacatgggcaagcgctacatcgccaggacaggcatgatgcacgcccggctgcagcagctgggcagcctggacaacagcctgaccttcaaccacagctatggccacagtgatgctgatgtgctgcaccagagcctgctggaggccaacatcgccacagaggtgtgcctgacagccctggacaccctgagcctcttcaccctggccttcaagaaccagctgctggccgaccacggccacaaccccctgatgaagaaggtgtttgatgtgtacctgtgcttcctgcagaagcaccagagcgagacagccctgaagaatgtgttcaccgccctgcggagcctcatctacaagttccccagcaccttctatgagggccgggctgacatgtgtgccgccctgtgctatgagatcctgaagtgctgcaacagcaagctgagcagcatcagaacagaggccagccagctgctgtacttcctgatgaggaacaactttgactacacaggcaagaagagctttgtgaggacccacctgcaggtgatcatctctgtgtcccagctgattgctgatgtggtgggcattggaggcacccgcttccagcagagcctgagcatcatcaacaactgtgccaacagcgacaggctcatcaagcacaccagcttcagcagtgatgtgaaggacctgaccaagaggatcagaacagtgctgatggccacagcccagatgaaggagcatgaaaatgaccctgagatgctggtggacctgcagtacagcctggccaagagctatgccagcaccccagagctgaggaagacctggctggacagcatggcccgcatccacgtgaagaatggagacctgtctgaggccgccatgtgctacgtgcacgtgacagccctggtggccgagtacctgaccaggaaggaggccgtgcagtgggagccccccctgctgccccacagccacagcgcctgcctgcggcgcagccggggcggcgtcttccggcagggctgcacagccttccgggtcatcacccccaacattgatgaggaggcctccatgatggaggatgtgggcatgcaggatgtgcacttcaatgaagatgtgctgatggagctgctggagcagtgtgctgatggcctgtggaaggccgagagatatgagctgattgctgacatctacaagctgatcatccccatctatgagaagagaagagactttgagcggctggcccacctgtatgacaccctgcaccgggcctacagcaaggtgacagaggtgatgcacagcggccgccgcctgctgggcacctacttccgggtggccttcttcggccaggccgcccagtaccagttcacagacagcgagacagatgtggagggcttctttgaagatgaagatggcaaggagtacatctacaaggagcccaagctgacccccctgtctgagatcagccagaggctgctgaagctgtacagcgacaagtttggaagtgaaaatgtgaagatgatccaggacagcggcaaggtgaaccccaaggacctggacagcaaatatgcctacatccaggtgacccacgtgatccccttctttgatgagaaggagctgcaggagaggaagacagaatttgagaggagccacaacatccgccgcttcatgtttgagatgcccttcacccagacaggcaagaggcagggcggcgtggaggagcagtgcaagaggaggaccatcctgacagccatccactgcttcccctacgtgaagaagagaattcctgtgatgtaccagcaccacacagacctgaaccccatcgaggtggccattgatgagatgagcaagaaggtggccgagctgcggcagctgtgcagcagcgctgaggtggacatgatcaagctgcagctgaagctgcagggctctgtgtctgtgcaggtgaatgccggccccctggcctatgcccgggccttcctggatgacaccaacaccaagcgctacccagacaacaaggtgaagctgctgaaggaggtgttccggcagtttgtggaggcctgtggccaggccctggccgtgaatgaaagactcatcaaggaggaccagctggagtaccaggaggagatgaaggccaactaccgggagatggccaaggagctgtctgagatcatgcatgagcaggtgcggcgcagcgccccctggaggagaagaagagccagctaccgcatccccttcaccagcagcacccccagcgtgggcctgcagcaggcccagtggttcaccggctag

SEQ ID NO: 293171 - DNA, 6306 bp, Artificial Sequence
  derived and/or modified sequence
atgcaggccgacaagtgccggaccagcagccggagcgtgaagaaggaactagtgattgaatcccccctgcagtataaggatgctgcgcagggggaggtggaagctgagagtcctgggccggttccggcaaagcccaagctaattgagccactagattacgaaaacgtgattgttcagaagaagacccagatcctgaacgactgtctccgggagatgctcctgtttccttacgacgatttccaaaccgccatcctacgccgacagggtcgatacatttgttcaacggtgcctgccaaagccgaggaggaggcccaatcgctttttgtgactgaatgtatcaagacttacaattccgactggcatctggtcaactataaatacgaggattattcaggtgaattcaggcagctgccaaataaggtagtcaagcttgataagctgcctgtgcacgtctatgaagtcgatgaggaggtagacaaggacgaagatgcggcatcacttgggagccagaaaggggggattactaagcacggttggctttacaaaggtaacatgaatagtgcgatctccgtgactatgagaagcttcaagcggcggttctttcacttgatacagctgggagacggcagttataacctgaacttttacaaagacgagaaaatctcaaaggagcctaagggttctatcttcctggatagttgtatgggtgtggtgcagaacaacaaagtcagaagattcgctttcgaactcaaaatgcaggataaatcctcgtatctcctcgccgcagattccgaagtcgagatggaagagtggataacaattctaaacaaaatcttacaactcaactttgaggcagccatgcaggagaaacgtaacggggactctcatgaagacgacgagcagagtaagctggaagggagtgggtccggcttggattcatacctcccagagctggctaaatctgcaagggaggccgaaatcaagctgaaaagtgagagtagagttaagctgttttaccttgaccctgatgcacagaagctcgactttagttctgcagaacccgaagtgaagagctttgaggagaagttcggtaagcggatattagtcaagtgtaatgacttgtccttcaaccttcaatgctgcgtcgccgagaacgaagagggtcccaccactaatgtggagccatttttcgtgaccttgtctctgttcgatattaagtacaatcgtaagataagtgctgacttccacgtggacctcaaccatttttccgttagacaaatgttagcgacaacttctcccgcactgatgaacggatccggtcaaagtccctcagtactgaagggaattttgcacgaggccgcgatgcagtacccaaagcagggaatcttctcagtaacctgcccgcatccagatatctttctggtagcccgcatcgaaaaggttttgcaaggctcaatcacacattgcgccgagccctatatgaagtcgtctgatagttcgaaggtggcacaaaaggtgctcaagaatgcaaagcaggcctgtcagcggttaggccagtatcggatgcccttcgcttgggccgcacggactctgtttaaggatgccagcgggaatctggataaaaatgcccgattttccgcgatatacagacaggatagtaacaagcttagcaacgatgatatgctgaagctgctggccgattttcgaaagccagagaagatggccaagctgcctgtgatcctaggaaatctggacattaccattgataatgtctcttccgacttcccaaactatgtgaactcctcgtacataccaaccaagcagttcgaaacatgttccaaaacccccattacttttgaagtcgaagagtttgtcccatgtattcccaaacacacccagccctatacaatttataccaatcacctgtatgtctaccccaaatatttaaagtatgattcacaaaaaagttttgcaaaagcgagaaacatagccatttgcattgagttcaaagactccgatgaggaagacagccaaccattaaaatgcatctacgggagaccgggaggccctgtctttaccaggtctgcgtttgccgcagtcttacatcatcatcagaatccagagttttacgacgagattaaaatcgagctgccaacacagcttcacgagaaacatcacctgctcctgactttcttccacgtgagttgtgacaattcctccaaaggttctactaagaagagggacgttgtggagacacaagtgggttacagttggctgcccctactgaaggatgggcgtgtagtgacaagcgaacagcacatccctgtatctgccaacctcccttccggctaccttgggtaccaggaacttggaatgggacgccactacggccccgagatcaagtgggttgatggcgggaaacctcttctgaagatttctactcacctggttagtacagtgtacactcaggaccagcatctgcacaattttttccaatattgccagaaaacagaatctggcgcccaagcacttggaaatgagctggtgaaatacctgaagtccttacacgccatggaggggcatgttatgattgcctttctcccaactatactgaaccagttgtttcgggtcctgactcgggctacacaggaagaggtcgctgtcaacgtgacaagggtgattattcatgtggttgcacaatgtcacgaagaaggccttgagagccacctgcgtagctatgttaaatacgcctacaaggccgagccgtacgtcgcttctgaatacaaaaccgtccatgaggagctcactaaaagcatgacaacaatactcaaaccatcagccgacttcctgacgtccaacaaattgttaaaatatagctggttctttttcgacgtgctcatcaagtctatggcccagcatttgattgaaaattctaaggtcaagctgctccgcaatcagcggtttcctgcctcttaccatcacgcagtcgagaccgttgttaatatgctgatgccgcatattactcagaagttcagagacaaccctgaggcgtctaaaaatgccaatcactctcttgcagtattcattaaaagatgtttcacctttatggaccgcggcttcgtctttaaacaaattaacaactacattagttgctttgctcccggggatccgaaaacgctgttcgagtacaagttcgagttcctacgcgtcgtgtgtaatcatgaacattatatccccctgaatctgcctatgccatttggcaaaggtcgaatccagaggtaccaggatcttcagttagactacagcctgactgacgagttctgcaggaatcactttctcgtgggtctgctgctgcgagaggtgggcacagcattgcaggagtttcgggaggttcgtctgatcgcgatatcagtgctcaagaacctcctcataaaacactcattcgacgacagatatgctagtcgtagccaccaagcgcggattgcaaccctttaccttcccctgttcggcttgcttatcgagaatgtccaaagaatcaacgtcagagatgtgtcccccttccccgtaaatgcagggatgacagtcaaagatgagtctctggcccttcctgccgtcaatccattagtgacccctcagaagggaagcactctggacaattcgctccataaagacctgctgggtgcaattagtgggattgcatccccgtataccacatcaacccccaatattaattcggttcggaacgctgattcaaggggcagtcttatttctaccgatagtggaaatagtctgcccgagcggaattctgaaaagtccaatagtctggacaaacatcaacaatcctccacattaggaaactcagtggtccgttgcgataagctggaccaaagtgaaataaagagcctattgatgtgctttctttacattttgaaatctatgtcagacgatgccttgtttacctattggaataaagcgtccacttccgaactgatggacttctttaccattagcgaggtttgtttgcatcagtttcaatacatgggcaagcgttacattgctagaaccggtatgatgcacgccaggctgcaacagttaggctctcttgataatagcctcaccttcaaccattcctacggacattcagatgcggatgtactgcaccaatccctcctcgaggcgaatatcgcaaccgaggtttgcctcacagcactggacacgctgtcactgttcaccctggccttcaaaaatcaactgctggctgaccacggacataacccccttatgaaaaaagttttcgatgtctatctgtgtttcctgcagaaacatcagtccgagacggccctcaagaacgtgtttacagccctgagaagcctgatatataagtttccttctactttttatgaaggccgagccgacatgtgcgcagcactgtgctatgaaattcttaagtgctgtaactctaagctctccagcattcgcaccgaagcctctcaactcctctatttcctgatgagaaacaattttgattataccgggaaaaaaagcttcgtgcgaactcatctccaggttataatttctgttagccaactgatcgccgacgtcgtgggaatcggcggtacgaggttccagcagtctctgtccatcatcaataactgcgccaattctgatcgcctgataaagcacaccagctttagctccgacgtcaaagacctgaccaagcgaatcagaaccgtgcttatggccaccgctcagatgaaggagcatgagaacgacccggagatgctggtggatctgcaatactccctggctaaaagctacgccagcactccagaactgaggaagacctggctggacagtatggccaggatccacgtaaaaaacggtgacctaagcgaagccgccatgtgctatgtgcacgtgaccgctctggtcgctgaatatctcacgcgaaaggaggccgtccagtgggaaccccccctcctgcctcattctcacagtgcgtgtctgcggaggagcaggggaggcgtttttcgtcaggggtgcactgcttttcgggttattacacctaacatcgacgaggaggccagcatgatggaagacgtgggcatgcaggatgtgcatttcaatgaagatgttctcatggaactgcttgagcaatgtgccgatggtctgtggaaggccgaacgttatgaactgatcgccgatatttacaaattaattataccaatatacgagaagagaagggattttgaacggctagcacacctttacgacacactccatagggcttattcaaaagtgacagaagttatgcactccggccgacgcttgctggggacctacttcagagtagccttttttggtcaggccgcccaatatcagttcaccgattctgaaactgacgtagagggattctttgaagatgaggatggaaaggagtacatttataaggagcccaaactgacccccctgtcagagatatcacaacggcttttgaaattgtactcagacaagttcggttcagagaacgtgaaaatgatccaggattcaggcaaagtaaaccccaaggacttggattccaagtatgcctatatccaggtgacgcacgtgattccattttttgatgagaaggagcttcaggaacggaagaccgagttcgagcgcagtcacaatatcagacggtttatgtttgagatgcctttcacacagacgggaaagcggcagggaggcgtagaggagcagtgcaagaggaggacaatcctgacagccattcactgttttccttacgtgaagaagcggatccccgttatgtaccaacatcacaccgaccttaaccccattgaggttgccatcgatgagatgagcaaaaaggtcgccgaactccgccagctgtgtagttccgctgaggtagatatgatcaaattgcaactgaaactgcagggctcagtctcagtgcaggttaatgctggcccgctagcatacgcccgcgccttcctcgacgacaccaatactaagcggtacccagataataaggtcaagctgcttaaggaagtgttccggcagtttgtcgaagcatgtggccaagccctggccgttaatgagcgcctcatcaaggaggatcagctggagtaccaagaagagatgaaggcaaactatcgggaaatggccaaggaattatctgaaattatgcatgaacaggtccgccgctccgccccttggagacgtaggcgagccagctatcggataccctttacgtcctcaactccatcagtgggcctccagcaggcccagtggtttacaggatag

SEQ ID NO: 293172 - DNA, 6305 bp, Artificial Sequence
  derived and/or modified sequence
atgcaggccgacaagtgccggacctcaagccgaagcgtgaaaaaggaacttgttattgagagccctctgcagtacaaggatgctgcgcagggagaagtcgaagccgagtctccgggtccagtgcccgcaaagcccaagttgattgagcctctagactacgagaacgtaatcgttcagaagaagacgcagatattgaatgattgcctacgcgagatgttgctgtttccgtacgatgacttccaaacagcaatcttgaggcgtcagggtcgatacatctgctcaaccgtccctgccaaagccgaggaggaggctcagagtttattcgtcacagagtgcatcaagacatataactcggattggcatctggtgaattacaagtacgaagactattctggggagtttaggcagcttccaaataaggtggtcaaactcgacaaacttcctgttcatgtctacgaagttgatgaggaagtagacaaggatgaggacgccgcatcactgggttctcaaaaggggggaatcacaaagcacgggtggctgtataagggaaacatgaatagcgcaataagcgttacaatgagatcttttaaacggcgtttcttccacctgatccagcttggcgacggcagttataaccttaatttctacaaggacgagaagatatccaaagagcccaagggctccatttttctggactcttgtatgggggtggtccagaataataaagtccgacgctttgccttcgagctcaagatgcaagacaagagcagttatctgctagccgcagactcagaggtcgaaatggaggagtggattaccatcctcaataaaattctgcagctaaattttgaggccgctatgcaggagaagcgaaacggtgattctcacgaggacgatgagcagagcaaactggaaggttccggaagtggactcgacagctatttgcctgagctggccaagtcagccagggaggctgagatcaagctgaagagtgaatctcgcgtgaagctcttctacctggacccagacgcccagaaactcgatttcagtagcgccgagcccgaagtgaagtcatttgaagagaaatttggtaagcgcatcctcgtcaagtgcaatgacctcagcttcaacctgcaatgctgcgtggcggagaacgaggaggggcctacaaccaacgtggaaccttttttcgttactctgtctctttttgacatcaagtacaaccgtaaaattagcgcagattttcacgtggatctgaaccatttctccgttcgccagatgctggcgacaacttcccctgcactgatgaacgggagcggtcagtccccgtctgtcttgaaaggcatcctgcatgaggccgcaatgcagtatccaaagcagggtattttcagtgtcacttgcccacaccccgacatctttctggttgctagaattgagaaggtactacaggggagcattacacattgcgctgaaccatatatgaaatctagcgattcctcaaaggtggcccagaaggtgttgaaaaacgctaaacaggcatgccagcgcctggggcagtatcggatgcccttcgcttgggccgctcggaccctcttcaaggatgccagtggaaacttggataagaacgcacggttctctgccatataccgccaggattcaaacaagctgtcgaatgacgacatgctcaaattgttagccgatttccggaaaccggaaaaaatggccaagctcccggttatattgggcaatttggacatcacgattgacaacgtctcaagtgactttcccaactacgttaatagctcatacattccgactaagcaatttgaaacatgttcgaaaactccgataactttcgaggtcgaagagtttgtgccttgcatccctaagcacacgcagccgtataccatatacacaaaccatctgtacgtgtaccctaagtatcttaagtacgatagccaaaaatcgttcgctaaagccaggaatatcgcaatctgcattgaatttaaagatagtgacgaggaggactcacagccactgaagtgcatttacggcaggcccggaggtcccgtattcacacgctccgcttttgccgcagtactgcatcatcaccaaaatcctgagttttacgacgagattaagattgaactgcctacccaactgcacgaaaagcatcacctgctgctgacgtttttccacgtcagctgcgataactcatcaaaggggtccacaaagaagcgggacgtggtcgagacgcaagtaggctatagttggctaccattgctcaaagacggtagagtggtaacatctgaacagcacatacctgtgagcgccaatctgccaagcggctatctcggatatcaggagttaggaatgggcagacattacgggcctgagatcaagtgggtcgacggcggtaaacctttactgaaaatttccacccacctcgtttcaactgtttacacacaggaccagcacctgcataatttcttccagtactgccagaaaacagaatcaggagcccaggccttaggcaacgagctagtgaaataccttaagagtttacatgcgatggagggacatgtcatgattgccttcttgcctacaatcctgaatcaactcttcagggtgttgactcgagcaacccaggaggaagtcgccgtcaacgtgacgagagtcattattcacgtggttgcccagtgccacgaggaagggctggagtctcatctgcgctcatacgtcaaatatgcttacaaagcagaaccctatgtggcaagtgaatacaagaccgtccatgaagagctcacaaaatctatgactaccatccttaagccttccgccgattttttaacaagtaacaaactgctgaagtactcctggttttttttcgatgtgttaattaagtccatggcccagcacctgatcgaaaactcaaaggtaaaactgctccgcaatcagagatttccggcaagttaccatcatgccgtggaaaccgttgtgaacatgctgatgccccacattactcagaaattccgcgacaatcccgaggccagcaagaatgctaaccactctttagcagtgttcattaaaagatgcttcacatttatggatcgtggattcgtattcaagcaaatcaataattacatcagctgtttcgcaccgggagacccaaagaccctgtttgaatataaattcgaatttctgcgggtggtttgcaatcatgagcattacatccccctgaatctccctatgccattcggcaagggacgaatccaacggtatcaagatttgcagctcgattactctctgacagatgagttttgtcgtaatcattttctggtgggtctattgcttagggaggtcggtactgctctgcaggagttccgcgaagtccgtttgattgccatatcagtgctgaaaaacctgctgattaaacattcattcgacgatcggtatgcctccaggtcgcaccaggctaggatcgcaacattatatctgccattatttggacttctgatagagaacgtccagagaattaatgtcagggacgtgtcgccattccccgtaaatgcgggtatgaccgtgaaagacgaatccctggccctgcctgctgtcaatcccttagtcaccccccagaagggttccaccctggataactcactgcacaaagatctgcttggggcaatctctgggatcgccagcccctatactacatctactcccaatataaacagtgtccggaatgccgattctcgcggatctctcatttcaaccgatagcggaaattcacttcccgaacgaaattccgagaagtctaatagtctagataaacaccagcaatcttccacgctggggaattccgtagtgagatgcgacaaacttgatcagtctgaaataaagagcctgctaatgtgttttttatatatcctaaagtctatgtctgacgacgccctgttcacatactggaacaaggcatctaccagcgaactcatggatttcttcacaataagcgaagtgtgcctgcaccaatttcagtacatgggcaagcgatatatcgccagaacaggcatgatgcacgcgaggcttcagcagcttggcagcctggataactctctgacttttaatcatagctatggtcacagcgatgccgacgtcctgcaccagtcgctgctcgaggccaatattgctacagaggtgtgtttaactgcgctggatacactcagcctcttcacgctggctttcaagaaccaattgctcgccgatcatggccacaacccgctgatgaagaaggtgttcgacgtttatctgtgcttcctgcagaaacatcaatcagaaaccgcccttaaaaacgtgtttacagcactgcgcagtctgatctataagttccctagcaccttctacgaaggaagggcggatatgtgcgcagccctttgctacgagatactgaagtgctgtaatagtaaattatcttccatccgcacagaagcgtcccaactgctgtacttcctgatgcgcaacaacttcgattacacagggaaaaaatcgttcgtcagaactcatctgcaggtaataatctctgtgtcacagctgatcgcggacgtagtcggaattgggggtacacgcttccagcagtcactctccataatcaacaattgtgctaattcggatcggctgattaaacatacaagtttctcgagcgacgtgaaggaccttactaagagaattcgtactgtgctgatggctaccgcgcagatgaaggagcatgagaacgatcccgaaatgctcgtcgaccttcaatattccctggccaagtcttatgcgagcacccccgaattgagaaagacttggctcgatagcatggccagaatccacgtcaagaacggggatctgagcgaggccgctatgtgctacgttcacgtcaccgccctggtcgcagaatatctcacacggaaggaagcagtccaatgggaaccacccttgctcccgcactcacactctgcctgccttaggagatcacgtggtggcgtctttcgacagggatgtacagcttttagggttattacacctaatatcgacgaggaggccagcatgatggaagacgtcggaatgcaggacgtccacttcaatgaggacgtattgatggagttgctggagcagtgcgccgacggactttggaaagctgagcggtacgagcttattgctgacatctataaactcataatacctatctacgagaagcggagggatttcgagcgcctggctcatctgtacgacacactgcatcgggcatactctaaagtgaccgaggtaatgcacagtggcaggcggttgttagggacatatttcagagtggctttcttcgggcaagcggcacaatatcaattcactgattctgagacggacgtggaaggtttctttgaggatgaagacggcaaggaatacatctataaagagcctaaactgacccctctctctgagattagccagaggctgctgaaactgtacagcgataaattcggcagcgagaatgtgaaaatgattcaggacagtggcaaggtcaatcctaaagacttggattccaaatatgcctatatacaggttactcacgtcattccttttttcgatgagaaggagctgcaggaacgaaaaactgagtttgagcggagtcataacataagacggttcatgttcgagatgccttttactcagactggaaagagacagggaggagtggaggagcagtgcaaaagaagaactatactcacagccatccactgcttcccctatgtgaaaaagcgcatcccggtgatgtaccagcaccacacagacctcaatccaatcgaggtggcaatagacgaaatgtctaagaaagtggctgagttgaggcagctgtgcagtagtgctgaggtagacatgatcaagctccaactgaaactgcaaggcagcgtttctgtgcaagtaaacgcaggtcctttggcatacgcaagagcgttccttgatgacaccaacacaaagaggtatcccgataacaaggtgaagttactgaaagaggtgtttcgtcagttcgtcgaagcctgtgggcaggccctcgcggtcaacgaacgtctgattaaggaggaccagctcgaataccaggaagagatgaaagctaattaccgagaaatggccaaggagctctctgagatcatgcatgaacaggtgagacggtctgcaccctggcggaggagacgggcttcgtataggattccctttacgtcatccactccaagtgttggtctgcagcaggcccaatggttcaccggcta

SEQ ID NO: 293173 - protein, 424 aa, Artificial Sequence
  derived and/or modified sequence
MMHARLQQLGSLDNSLTFNHSYGHSDADVLHQSLLEANIATEVCLTALDTLSLFTLAFKNQLLADHGHNPLMKKVFDVYLCFLQKHQSETALKNVFTALRSLIYKFPSTFYEGRADMCAALCYEILKCCNSKLSSIRTEASQLLYFLMRNNFDYTGKKSFVRTHLQVIISVSQLIADVVGIGGTRFQQSLSIINNCANSDRLIKHTSFSSDVKDLTKRIRTVLMATAQMKEHENDPEMLVDLQYSLAKSYASTPELRKTWLDSMARIHVKNGDLSEAAMCYVHVTALVAEYLTRKGVFRQGCTAFRVITPNIDEEASMMEDVGMQDVHFNEDVLMELLEQCADGLWKAERYELIADIYKLIIPIYEKRRDFERLAHLYDTLHRAYSKVTEVMHSGRRLLGTYFRVAFFGQVSLLSILQTVLSPL

SEQ ID NO: 293174 - protein, 1009 aa, Artificial Sequence
  derived and/or modified sequence
MPFGKGRIQRYQAFLSPTVESNDTPVDLQLDYSLTDEFCRNHFLVGLLLREVGTALQEFREVRLIAISVLKNLLIKHSFDDRYASRSHQARIATLYLPLFGLLIENVQRINVRDVSPFPVNAGMTVKDESLALPAVNPLVTPQKGSTLDNSLHKDLLGAISGIASPYTTSTPNINSVRNADSRGSLISTDSGNSLPERNSEKSNSLDKHQQSSTLGNSVVRCDKLDQSEIKSLLMCFLYILKSMSDDALFTYWNKASTSELMDFFTISEVCLHQFQYMGKRYIARTGMMHARLQQLGSLDNSLTFNHSYGHSDADVLHQSLLEANIATEVCLTALDTLSLFTLAFKNQLLADHGHNPLMKKVFDVYLCFLQKHQSETALKNVFTALRSLIYKFPSTFYEGRADMCAALCYEILKCCNSKLSSIRTEASQLLYFLMRNNFDYTGKKSFVRTHLQVIISVSQLIADVVGIGGTRFQQSLSIINNCANSDRLIKHTSFSSDVKDLTKRIRTVLMATAQMKEHENDPEMLVDLQYSLAKSYASTPELRKTWLDSMARIHVKNGDLSEAAMCYVHVTALVAEYLTRKGVFRQGCTAFRVITPNIDEEASMMEDVGMQDVHFNEDVLMELLEQCADGLWKAERYELIADIYKLIIPIYEKRRDFERLAHLYDTLHRAYSKVTEVMHSGRRLLGTYFRVAFFGQAAQYQFTDSETDVEGFFEDEDGKEYIYKEPKLTPLSEISQRLLKLYSDKFGSENVKMIQDSGKVNPKDLDSKYAYIQVTHVIPFFDEKELQERKTEFERSHNIRRFMFEMPFTQTGKRQGGVEEQCKRRTILTAIHCFPYVKKRIPVMYQHHTDLNPIEVAIDEMSKKVAELRQLCSSAEVDMIKLQLKLQGSVSVQVNAGPLAYARAFLDDTNTKRYPDNKVKLLKEVFRQFVEACGQALAVNERLIKEDQLEYQEEMKANYREMAKELSEIMHEQVRRSAPWRRRRASYRIPFTSSTPSVGLQQAQWFTG

SEQ ID NO: 293175 - protein, 195 aa, Artificial Sequence
  derived and/or modified sequence
MSQPPLLPASAETRKFTRALSKPGTAAELRQSVSEVVRGSVLLAKPKLIEPLDYENVIVQKKTQILNDCLREMLLFPYDDFQTAILRRQGRYICSTVPAKAEEEAQSLFVTECIKTYNSDWHLVNYKYEDYSGEFRQLPNKVVKLDKLPVHVYEVDEEVDKDEDAASLGSQKGGITKHGWLYKGNMNSAISVTMR

SEQ ID NO: 293176 - DNA, 3030 bp, Artificial Sequence
  derived and/or modified sequence
atgcccttcggcaagggcagaatccagagataccaggccttcctgagccccaccgtggagagcaacgacacccccgtggacctgcagctggactacagcctgaccgacgagttctgcagaaaccacttcctggtgggcctgctgctgagagaggtgggcaccgccctgcaggagttcagagaggtgagactgatcgccatcagcgtgctgaagaacctgctgatcaagcacagcttcgacgacagatacgccagcagaagccaccaggccagaatcgccaccctgtacctgcccctgttcggcctgctgatcgagaacgtgcagagaatcaacgtgagagacgtgagccccttccccgtgaacgccggcatgaccgtgaaggacgagagcctggccctgcccgccgtgaaccccctggtgaccccccagaagggcagcaccctggacaacagcctgcacaaggacctgctgggcgccatcagcggcatcgccagcccctacaccaccagcacccccaacatcaacagcgtgagaaacgccgacagcagaggcagcctgatcagcaccgacagcggcaacagcctgcccgagagaaacagcgagaagagcaacagcctggacaagcaccagcagagcagcaccctgggcaacagcgtggtgagatgcgacaagctggaccagagcgagatcaagagcctgctgatgtgcttcctgtacatcctgaagagcatgagcgacgacgccctgttcacctactggaacaaggccagcaccagcgagctgatggacttcttcaccatcagcgaggtgtgcctgcaccagttccagtacatgggcaagagatacatcgccagaaccggcatgatgcacgccagactgcagcagctgggcagcctggacaacagcctgaccttcaaccacagctacggccacagcgacgccgacgtgctgcaccagagcctgctggaggccaacatcgccaccgaggtgtgcctgaccgccctggacaccctgagcctgttcaccctggccttcaagaaccagctgctggccgaccacggccacaaccccctgatgaagaaggtgttcgacgtgtacctgtgcttcctgcagaagcaccagagcgagaccgccctgaagaacgtgttcaccgccctgagaagcctgatctacaagttccccagcaccttctacgagggcagagccgacatgtgcgccgccctgtgctacgagatcctgaagtgctgcaacagcaagctgagcagcatcagaaccgaggccagccagctgctgtacttcctgatgagaaacaacttcgactacaccggcaagaagagcttcgtgagaacccacctgcaggtgatcatcagcgtgagccagctgatcgccgacgtggtgggcatcggcggcaccagattccagcagagcctgagcatcatcaacaactgcgccaacagcgacagactgatcaagcacaccagcttcagcagcgacgtgaaggacctgaccaagagaatcagaaccgtgctgatggccaccgcccagatgaaggagcacgagaacgaccccgagatgctggtggacctgcagtacagcctggccaagagctacgccagcacccccgagctgagaaagacctggctggacagcatggccagaatccacgtgaagaacggcgacctgagcgaggccgccatgtgctacgtgcacgtgaccgccctggtggccgagtacctgaccagaaagggcgtgttcagacagggctgcaccgccttcagagtgatcacccccaacatcgacgaggaggccagcatgatggaggacgtgggcatgcaggacgtgcacttcaacgaggacgtgctgatggagctgctggagcagtgcgccgacggcctgtggaaggccgagagatacgagctgatcgccgacatctacaagctgatcatccccatctacgagaagagaagagacttcgagagactggcccacctgtacgacaccctgcacagagcctacagcaaggtgaccgaggtgatgcacagcggcagaagactgctgggcacctacttcagagtggccttcttcggccaggccgcccagtaccagttcaccgacagcgagaccgacgtggagggcttcttcgaggacgaggacggcaaggagtacatctacaaggagcccaagctgacccccctgagcgagatcagccagagactgctgaagctgtacagcgacaagttcggcagcgagaacgtgaagatgatccaggacagcggcaaggtgaaccccaaggacctggacagcaagtacgcctacatccaggtgacccacgtgatccccttcttcgacgagaaggagctgcaggagagaaagaccgagttcgagagaagccacaacatcagaagattcatgttcgagatgcccttcacccagaccggcaagagacagggcggcgtggaggagcagtgcaagagaagaaccatcctgaccgccatccactgcttcccctacgtgaagaagagaatccccgtgatgtaccagcaccacaccgacctgaaccccatcgaggtggccatcgacgagatgagcaagaaggtggccgagctgagacagctgtgcagcagcgccgaggtggacatgatcaagctgcagctgaagctgcagggcagcgtgagcgtgcaggtgaacgccggccccctggcctacgccagagccttcctggacgacaccaacaccaagagataccccgacaacaaggtgaagctgctgaaggaggtgttcagacagttcgtggaggcctgcggccaggccctggccgtgaacgagagactgatcaaggaggaccagctggagtaccaggaggagatgaaggccaactacagagagatggccaaggagctgagcgagatcatgcacgagcaggtgagaagaagcgccccctggagaagaagaagagccagctacagaatccccttcaccagcagcacccccagcgtgggcctgcagcaggcccagtggttcaccggctag

SEQ ID NO: 293177 - DNA, 6240 bp, Artificial Sequence
  derived and/or modified sequence
atgagccagccccccctgctgcccgccagcgccgagaccagaaagttcaccagagccctgagcaagcccggcaccgccgccgagctgagacagagcgtgagcgaggtggtgagaggcagcgtgctgctggccaagcccaagctgatcgagcccctggactacgagaacgtgatcgtgcagaagaagacccagatcctgaacgactgcctgagagagatgctgctgttcccctacgacgacttccagaccgccatcctgagaagacagggcagatacatctgcagcaccgtgcccgccaaggccgaggaggaggcccagagcctgttcgtgaccgagtgcatcaagacctacaacagcgactggcacctggtgaactacaagtacgaggactacagcggcgagttcagacagctgcccaacaaggtggtgaagctggacaagctgcccgtgcacgtgtacgaggtggacgaggaggtggacaaggacgaggacgccgccagcctgggcagccagaagggcggcatcaccaagcacggctggctgtacaagggcaacatgaacagcgccatcagcgtgaccatgagaagcttcaagagaagattcttccacctgatccagctgggcgacggcagctacaacctgaacttctacaaggacgagaagatcagcaaggagcccaagggcagcatcttcctggacagctgcatgggcgtggtgcagaacaacaaggtgagaagattcgccttcgagctgaagatgcaggacaagagcagctacctgctggccgccgacagcgaggtggagatggaggagtggatcaccatcctgaacaagatcctgcagctgaacttcgaggccgccatgcaggagaagagaaacggcgacagccacgaggacgacgagcagagcaagctggagggcagcggcagcggcctggacagctacctgcccgagctggccaagagcgccagagaggccgagatcaagctgaagagcgagagcagagtgaagctgttctacctggaccccgacgcccagaagctggacttcagcagcgccgagcccgaggtgaagagcttcgaggagaagttcggcaagagaatcctggtgaagtgcaacgacctgagcttcaacctgcagtgctgcgtggccgagaacgaggagggccccaccaccaacgtggagcccttcttcgtgaccctgagcctgttcgacatcaagtacaacagaaagatcagcgccgacttccacgtggacctgaaccacttcagcgtgagacagatgctggccaccaccagccccgccctgatgaacggcagcggccagagccccagcgtgctgaagggcatcctgcacgaggccgccatgcagtaccccaagcagggcatcttcagcgtgacctgcccccaccccgacatcttcctggtggccagaatcgagaaggtgctgcagggcagcatcacccactgcgccgagccctacatgaagagcagcgacagcagcaaggtggcccagaaggtgctgaagaacgccaagcaggcctgccagagactgggccagtacagaatgcccttcgcctgggccgccagaaccctgttcaaggacgccagcggcaacctggacaagaacgccagattcagcgccatctacagacaggacagcaacaagctgagcaacgacgacatgctgaagctgctggccgacttcagaaagcccgagaagatggccaagctgcccgtgatcctgggcaacctggacatcaccatcgacaacgtgagcagcgacttccccaactacgtgaacagcagctacatccccaccaagcagttcgagacctgcagcaagacccccatcaccttcgaggtggaggagttcgtgccctgcatccccaagcacacccagccctacaccatctacaccaaccacctgtacgtgtaccccaagtacctgaagtacgacagccagaagagcttcgccaaggccagaaacatcgccatctgcatcgagttcaaggacagcgacgaggaggacagccagcccctgaagtgcatctacggcagacccggcggccccgtgttcaccagaagcgccttcgccgccgtgctgcaccaccaccagaaccccgagttctacgacgagatcaagatcgagctgcccacccagctgcacgagaagcaccacctgctgctgaccttcttccacgtgagctgcgacaacagcagcaagggcagcaccaagaagagagacgtggtggagacccaggtgggctacagctggctgcccctgctgaaggacggcagagtggtgaccagcgagcagcacatccccgtgagcgccaacctgcccagcggctacctgggctaccaggagctgggcatgggcagacactacggccccgagatcaagtgggtggacggcggcaagcccctgctgaagatcagcacccacctggtgagcaccgtgtacacccaggaccagcacctgcacaacttcttccagtactgccagaagaccgagagcggcgcccaggccctgggcaacgagctggtgaagtacctgaagagcctgcacgccatggagggccacgtgatgatcgccttcctgcccaccatcctgaaccagctgttcagagtgctgaccagagccacccaggaggaggtggccgtgaacgtgaccagagtgatcatccacgtggtggcccagtgccacgaggagggcctggagagccacctgagaagctacgtgaagtacgcctacaaggccgagccctacgtggccagcgagtacaagaccgtgcacgaggagctgaccaagagcatgaccaccatcctgaagcccagcgccgacttcctgaccagcaacaagctgctgaagtacagctggttcttcttcgacgtgctgatcaagagcatggcccagcacctgatcgagaacagcaaggtgaagctgctgagaaaccagagattccccgccagctaccaccacgccgtggagaccgtggtgaacatgctgatgccccacatcacccagaagttcagagacaaccccgaggccagcaagaacgccaaccacagcctggccgtgttcatcaagagatgcttcaccttcatggacagaggcttcgtgttcaagcagatcaacaactacatcagctgcttcgcccccggcgaccccaagaccctgttcgagtacaagttcgagttcctgagagtggtgtgcaaccacgagcactacatccccctgaacctgcccatgcccttcggcaagggcagaatccagagataccaggacctgcagctggactacagcctgaccgacgagttctgcagaaaccacttcctggtgggcctgctgctgagagaggtgggcaccgccctgcaggagttcagagaggtgagactgatcgccatcagcgtgctgaagaacctgctgatcaagcacagcttcgacgacagatacgccagcagaagccaccaggccagaatcgccaccctgtacctgcccctgttcggcctgctgatcgagaacgtgcagagaatcaacgtgagagacgtgagccccttccccgtgaacgccggcatgaccgtgaaggacgagagcctggccctgcccgccgtgaaccccctggtgaccccccagaagggcagcaccctggacaacagcctgcacaaggacctgctgggcgccatcagcggcatcgccagcccctacaccaccagcacccccaacatcaacagcgtgagaaacgccgacagcagaggcagcctgatcagcaccgacagcggcaacagcctgcccgagagaaacagcgagaagagcaacagcctggacaagcaccagcagagcagcaccctgggcaacagcgtggtgagatgcgacaagctggaccagagcgagatcaagagcctgctgatgtgcttcctgtacatcctgaagagcatgagcgacgacgccctgttcacctactggaacaaggccagcaccagcgagctgatggacttcttcaccatcagcgaggtgtgcctgcaccagttccagtacatgggcaagagatacatcgccagaaccggcatgatgcacgccagactgcagcagctgggcagcctggacaacagcctgaccttcaaccacagctacggccacagcgacgccgacgtgctgcaccagagcctgctggaggccaacatcgccaccgaggtgtgcctgaccgccctggacaccctgagcctgttcaccctggccttcaagaaccagctgctggccgaccacggccacaaccccctgatgaagaaggtgttcgacgtgtacctgtgcttcctgcagaagcaccagagcgagaccgccctgaagaacgtgttcaccgccctgagaagcctgatctacaagttccccagcaccttctacgagggcagagccgacatgtgcgccgccctgtgctacgagatcctgaagtgctgcaacagcaagctgagcagcatcagaaccgaggccagccagctgctgtacttcctgatgagaaacaacttcgactacaccggcaagaagagcttcgtgagaacccacctgcaggtgatcatcagcgtgagccagctgatcgccgacgtggtgggcatcggcggcaccagattccagcagagcctgagcatcatcaacaactgcgccaacagcgacagactgatcaagcacaccagcttcagcagcgacgtgaaggacctgaccaagagaatcagaaccgtgctgatggccaccgcccagatgaaggagcacgagaacgaccccgagatgctggtggacctgcagtacagcctggccaagagctacgccagcacccccgagctgagaaagacctggctggacagcatggccagaatccacgtgaagaacggcgacctgagcgaggccgccatgtgctacgtgcacgtgaccgccctggtggccgagtacctgaccagaaagggcgtgttcagacagggctgcaccgccttcagagtgatcacccccaacatcgacgaggaggccagcatgatggaggacgtgggcatgcaggacgtgcacttcaacgaggacgtgctgatggagctgctggagcagtgcgccgacggcctgtggaaggccgagagatacgagctgatcgccgacatctacaagctgatcatccccatctacgagaagagaagagacttcgagagactggcccacctgtacgacaccctgcacagagcctacagcaaggtgaccgaggtgatgcacagcggcagaagactgctgggcacctacttcagagtggccttcttcggccaggccgcccagtaccagttcaccgacagcgagaccgacgtggagggcttcttcgaggacgaggacggcaaggagtacatctacaaggagcccaagctgacccccctgagcgagatcagccagagactgctgaagctgtacagcgacaagttcggcagcgagaacgtgaagatgatccaggacagcggcaaggtgaaccccaaggacctggacagcaagtacgcctacatccaggtgacccacgtgatccccttcttcgacgagaaggagctgcaggagagaaagaccgagttcgagagaagccacaacatcagaagattcatgttcgagatgcccttcacccagaccggcaagagacagggcggcgtggaggagcagtgcaagagaagaaccatcctgaccgccatccactgcttcccctacgtgaagaagagaatccccgtgatgtaccagcaccacaccgacctgaaccccatcgaggtggccatcgacgagatgagcaagaaggtggccgagctgagacagctgtgcagcagcgccgaggtggacatgatcaagctgcagctgaagctgcagggcagcgtgagcgtgcaggtgaacgccggccccctggcctacgccagagccttcctggacgacaccaacaccaagagataccccgacaacaaggtgaagctgctgaaggaggtgttcagacagttcgtggaggcctgcggccaggccctggccgtgaacgagagactgatcaaggaggaccagctggagtaccaggaggagatgaaggccaactacagagagatggccaaggagctgagcgagatcatgcacgagcaggtgagaagaagcgccccctggagaagaagaagagccagctacagaatccccttcaccagcagcacccccagcgtgggcctgcagcaggcccagtggttcaccggctag

SEQ ID NO: 293178 - DNA, 6304 bp, Artificial Sequence
  derived and/or modified sequence
gcggccgggccgggccgcgggagcaggcggaggcggaggcggcgggggcaggaggatgtcgcagccgccgctgctccccgcctcggcggagactcggaagttcacccgggcgctgagtaagccgggcacggcggccgagctgcggcagagcgtgtctgaggtggtgcgcggctccgtgctcctggcaaagccaaagctaattgagccactcgactatgaaaatgtcatcgtccagaagaagactcagatcctgaacgactgtttacgggagatgctgctcttcccttacgatgactttcagacggccatcctgagacgacagggtcgatacatatgctcaacagtgcctgcgaaggcggaagaggaagcacagagcttgtttgttacagagtgcatcaaaacctataactctgactggcatcttgtgaactataaatatgaagattactcaggagagtttcgacagcttccgaacaaagtggtcaagttggataaacttccagttcatgtctatgaagttgacgaggaggtcgacaaagatgaggatgctgcctcccttggttcccagaagggtgggatcaccaagcatggctggctgtacaaaggcaacatgaacagtgccatcagcgtgaccatgaggtcatttaagagacgatttttccacctgattcaacttggcgatggatcctataatttgaatttttataaagatgaaaagatctccaaagaaccaaaaggatcaatatttctggattcctgtatgggtgtcgttcagaacaacaaagtcaggcgttttgcttttgagctcaagatgcaggacaaaagtagttatctcttggcagcagacagtgaagtggaaatggaagaatggatcacaattctaaataagatcctccagctcaactttgaagctgcaatgcaagaaaagcgaaatggcgactctcacgaagatgatgaacaaagcaaattggaaggttctggttccggtttagatagctacctgccggaacttgccaagagtgcaagagaagcagaaatcaaactgaaaagtgaaagcagagtcaaacttttttatttggacccagatgcccagaagcttgacttctcatcagctgagccagaagtgaagtcatttgaagagaagtttggaaaaaggatccttgtcaagtgcaatgatttatctttcaatttgcaatgctgtgttgccgaaaatgaagaaggacccactacaaatgttgaacctttctttgttactctatccctgtttgacataaaatacaaccggaagatttctgccgatttccacgtagacctgaaccatttctcagtgaggcaaatgctcgccaccacgtccccggcgctgatgaatggcagtgggcagagcccatctgtcctcaagggcatccttcatgaagccgccatgcagtatccgaagcagggaatattttcagtcacttgtcctcatccagatatatttcttgtggccagaattgaaaaagtccttcaggggagcatcacacattgcgctgagccatatatgaaaagttcagactcttctaaggtggcccagaaggtgctgaagaatgccaagcaggcatgccaaagactaggacagtatagaatgccatttgcttgggcagcaaggacattgtttaaggatgcatctggaaatcttgacaaaaatgccagattttctgccatctacaggcaagacagcaataagctatccaatgatgacatgctcaagttacttgcagactttcggaaacctgagaagatggctaagctcccagtgattttaggcaatctagacattacaattgataatgtttcctcagacttccctaattatgttaattcatcatacattcccacaaaacaatttgaaacctgcagtaaaactcccatcacgtttgaagtggaggaatttgtgccctgcataccaaaacacactcagccttacaccatctacaccaatcacctttacgtttatcctaagtacttgaaatacgacagtcagaagtcttttgccaaggctagaaatattgcgatttgcattgaattcaaagattcagatgaggaagactctcagccccttaagtgcatttatggcagacctggtgggccagttttcacaagaagcgcctttgctgcagttttacaccatcaccaaaacccagaattttatgatgagattaaaatagagttgcccactcagctgcatgaaaagcaccacctgttgctcacattcttccatgtcagctgtgacaactcaagtaaaggaagcacgaagaagagggatgtcgttgaaacccaagttggctactcctggcttcccctcctgaaagacggaagggtggtgacaagcgagcagcacatcccggtctcggcgaaccttccttcgggctatcttggctaccaggagcttgggatgggcaggcattatggtccggaaattaaatgggtagatggaggcaagccactgctgaaaatttccactcatctggtttctacagtgtatactcaggatcagcatttacataattttttccagtactgtcagaaaaccgaatctggagcccaagccttaggaaacgaacttgtaaagtaccttaagagtctgcatgcgatggaaggccacgtgatgatcgccttcttgcccactatcctaaaccagctgttccgagtcctcaccagagccacacaggaagaagtcgcggttaacgtgactcgggtcattattcatgtggttgcccagtgccatgaggaaggattggagagccacttgaggtcatatgttaagtacgcgtataaggctgagccatatgttgcctctgaatacaagacagtgcatgaagaactgaccaaatccatgaccacgattctcaagccttctgccgatttcctcaccagcaacaaactactgaagtactcatggtttttctttgatgtactgatcaaatctatggctcagcatttgatagagaactccaaagttaagttgctgcgaaaccagagatttcctgcatcctatcatcatgcagtggaaaccgttgtaaatatgctgatgccacacatcactcagaagtttcgagataatccagaggcatctaagaacgcgaatcatagccttgctgtcttcatcaagagatgtttcaccttcatggacaggggctttgtcttcaagcagatcaacaactacattagctgttttgctcctggagacccaaagaccctctttgaatacaagtttgaatttctccgtgtagtgtgcaaccatgaacattatattccgttgaacttaccaatgccatttggaaaaggcaggattcaaagataccaagacctccagcttgactactcattaacagatgagttctgcagaaaccacttcttggtgggactgttactgagggaggtggggacagccctccaggagttccgggaggtccgtctgatcgccatcagtgtgctcaagaacctgctgataaagcattcttttgatgacagatatgcttcaaggagccatcaggcaaggatagccaccctctacctgcctctgtttggtctgctgattgaaaacgtccagcggatcaatgtgagggatgtgtcacccttccctgtgaacgcgggcatgactgtgaaggatgaatccctggctctaccagctgtgaatccgctggtgacgccgcagaagggaagcaccctggacaacagcctgcacaaggacctgctgggcgccatctccggcattgcttctccatatacaacctcaactccaaacatcaacagtgtgagaaatgctgattcgagaggatctctcataagcacagattcgggtaacagccttccagaaaggaatagtgagaagagcaattccctggataagcaccaacaaagtagcacattgggaaattccgtggttcgctgtgataaacttgaccagtctgagattaagagcctactgatgtgtttcctctacatcttaaagagcatgtctgatgatgctttgtttacatattggaacaaggcttcaacatctgaacttatggatttttttacaatatctgaagtctgcctgcaccagttccagtacatggggaagcgatacatagccagaacaggaatgatgcatgccagattgcagcagctgggcagcctggataactctctcacttttaaccacagctatggccactcggacgcagatgttctgcaccagtcattacttgaagccaacattgctactgaggtttgcctgacagctctggacacgctttctctatttacattggcgtttaagaaccagctcctggccgaccatggacataatcctctcatgaaaaaagtttttgatgtctacctgtgttttcttcaaaaacatcagtctgaaacggctttaaaaaatgtcttcactgccttaaggtccttaatttataagtttccctcaacattctatgaagggagagcggacatgtgtgcggctctgtgttacgagattctcaagtgctgtaactccaagctgagctccatcaggacggaggcctcccagctgctctacttcctgatgaggaacaactttgattacactggaaagaagtcctttgtccggacacatttgcaagtcatcatatctgtcagccagctgatagcagacgttgttggcattgggggaaccagattccagcagtccctgtccatcatcaacaactgtgccaacagtgaccggcttattaagcacaccagcttctcctctgatgtgaaggacttaaccaaaaggatacgcacggtgctaatggccaccgcccagatgaaggagcatgagaacgacccagagatgctggtggacctccagtacagcctggccaaatcctatgccagcacgcccgagctcaggaagacgtggctcgacagcatggccaggatccatgtcaaaaatggcgatctctcagaggcagcaatgtgctatgtccacgtaacagccctagtggcagaatatctcacacggaaaggcgtgtttagacaaggatgcaccgccttcagggtcattaccccaaacatcgacgaggaggcctccatgatggaagacgtggggatgcaggatgtccatttcaacgaggatgtgctgatggagctccttgagcagtgcgcagatggactctggaaagccgagcgctacgagctcatcgccgacatctacaaacttatcatccccatttatgagaagcggagggattttgagaggctggcccatctgtatgacacgctgcaccgggcctacagcaaagtgaccgaggtcatgcactcgggccgcaggcttctggggacctacttccgggtagccttcttcgggcagcaataccagtttacagacagtgaaacagatgtggagggattctttgaagatgaagatggaaaggagtatatttacaaggaacccaaactcacaccgctgtcggaaatttctcagagactccttaaactgtactcggataaatttggttctgaaaatgtcaaaatgatacaggattctggcaaggtcaaccctaaggatctggattctaagtatgcatacatccaggtgactcacgtcatccccttctttgacgaaaaagagttgcaagaaaggaaaacagagtttgagagatcccacaacatccgccgcttcatgtttgagatgccatttacgcagaccgggaagaggcagggcggggtggaagagcagtgcaaacggcgcaccatcctgacagccatacactgcttcccttatgtgaagaagcgcatccctgtcatgtaccagcaccacactgacctgaaccccatcgaggtggccattgacgagatgagtaagaaggtggcggagctccggcagctgtgctcctcggccgaggtggacatgatcaaactgcagctcaaactccagggcagcgtgagtgttcaggtcaatgctggcccactagcatatgcgcgagctttcttagatgatacaaacacaaagcgatatcctgacaataaagtgaagctgcttaaggaagttttcaggcaatttgtggaagcttgcggtcaagccttagcggtaaacgaacgtctgattaaagaagaccagctcgagtatcaggaagaaatgaaagccaactacagggaaatggcgaaggagctttctgaaatcatgcatgagcagatctgccccctggaggagaagacgagcgtcttaccgaattcccttcacatcttcaacgccatcagtgggactccaacaagcacaatggttcacgggatgaccagctcgtcttcggtcgtgtga

SEQ ID NO: 293179 - DNA, 7499 bp, Artificial Sequence
  derived and/or modified sequence
gcggccgggccgggccgcgggagcaggcggaggcggaggcggcgggggcaggaggatgtcgcagccgccgctgctccccgcctcggcggagactcggaagttcacccgggcgctgagtaagccgggcacggcggccgagctgcggcagagcgtgtctgaggtggtgcgcggctccgtgctcctggcaaagccaaagctaattgagccactcgactatgaaaatgtcatcgtccagaagaagactcagatcctgaacgactgtttacgggagatgctgctcttcccttacgatgactttcagacggccatcctgagacgacagggtcgatacatatgctcaacagtgcctgcgaaggcggaagaggaagcacagagcttgtttgttacagagtgcatcaaaacctataactctgactggcatcttgtgaactataaatatgaagattactcaggagagtttcgacagcttccgaacaaagtggtcaagttggataaacttccagttcatgtctatgaagttgacgaggaggtcgacaaagatgaggatgctgcctcccttggttcccagaagggtgggatcaccaagcatggctggctgtacaaaggcaacatgaacagtgccatcagcgtgaccatgaggtcatttaagagacgatttttccacctgattcaacttggcgatggatcctataatttgaatttttataaagatgaaaagatctccaaagaaccaaaaggatcaatatttctggattcctgtatgggtgtcgttcagaacaacaaagtcaggcgttttgcttttgagctcaagatgcaggacaaaagtagttatctcttggcagcagacagtgaagtggaaatggaagaatggatcacaattctaaataagatcctccagctcaactttgaagctgcaatgcaagaaaagcgaaatggcgactctcacgaagatgatgaacaaagcaaattggaaggttctggttccggtttagatagctacctgccggaacttgccaagagtgcaagagaagcagaaatcaaactgaaaagtgaaagcagagtcaaacttttttatttggacccagatgcccagaagcttgacttctcatcagctgagccagaagtgaagtcatttgaagagaagtttggaaaaaggatccttgtcaagtgcaatgatttatctttcaatttgcaatgctgtgttgccgaaaatgaagaaggacccactacaaatgttgaacctttctttgttactctatccctgtttgacataaaatacaaccggaagatttctgccgatttccacgtagacctgaaccatttctcagtgaggcaaatgctcgccaccacgtccccggcgctgatgaatggcagtgggcagagcccatctgtcctcaagggcatccttcatgaagccgccatgcagtatccgaagcagggaatattttcagtcacttgtcctcatccagatatatttcttgtggccagaattgaaaaagtccttcaggggagcatcacacattgcgctgagccatatatgaaaagttcagactcttctaaggtggcccagaaggtgctgaagaatgccaagcaggcatgccaaagactaggacagtatagaatgccatttgcttgggcagcaaggacattgtttaaggatgcatctggaaatcttgacaaaaatgccagattttctgccatctacaggcaagacagcaataagctatccaatgatgacatgctcaagttacttgcagactttcggaaacctgagaagatggctaagctcccagtgattttaggcaatctagacattacaattgataatgtttcctcagacttccctaattatgttaattcatcatacattcccacaaaacaatttgaaacctgcagtaaaactcccatcacgtttgaagtggaggaatttgtgccctgcataccaaaacacactcagccttacaccatctacaccaatcacctttacgtttatcctaagtacttgaaatacgacagtcagaagtcttttgccaaggctagaaatattgcgatttgcattgaattcaaagattcagatgaggaagactctcagccccttaagtgcatttatggcagacctggtgggccagttttcacaagaagcgcctttgctgcagttttacaccatcaccaaaacccagaattttatgatgagattaaaatagagttgcccactcagctgcatgaaaagcaccacctgttgctcacattcttccatgtcagctgtgacaactcaagtaaaggaagcacgaagaagagggatgtcgttgaaacccaagttggctactcctggcttcccctcctgaaagacggaagggtggtgacaagcgagcagcacatcccggtctcggcgaaccttccttcgggctatcttggctaccaggagcttgggatgggcaggcattatggtccggaaattaaatgggtagatggaggcaagccactgctgaaaatttccactcatctggtttctacagtgtatactcaggatcagcatttacataattttttccagtactgtcagaaaaccgaatctggagcccaagccttaggaaacgaacttgtaaagtaccttaagagtctgcatgcgatggaaggccacgtgatgatcgccttcttgcccactatcctaaaccagctgttccgagtcctcaccagagccacacaggaagaagtcgcggttaacgtgactcgggtcattattcatgtggttgcccagtgccatgaggaaggattggagagccacttgaggtcatatgttaagtacgcgtataaggctgagccatatgttgcctctgaatacaagacagtgcatgaagaactgaccaaatccatgaccacgattctcaagccttctgccgatttcctcaccagcaacaaactactgaagtactcatggtttttctttgatgtactgatcaaatctatggctcagcatttgatagagaactccaaagttaagttgctgcgaaaccagagatttcctgcatcctatcatcatgcagtggaaaccgttgtaaatatgctgatgccacacatcactcagaagtttcgagataatccagaggcatctaagaacgcgaatcatagccttgctgtcttcatcaagagatgtttcaccttcatggacaggggctttgtcttcaagcagatcaacaactacattagctgttttgctcctggagacccaaagaccctctttgaatacaagtttgaatttctccgtgtagtgtgcaaccatgaacattatattccgttgaacttaccaatgccatttggaaaaggcaggattcaaagataccaagcttttctttcaccaactgtggagtcaaatgacactcctgtagacctccagcttgactactcattaacagatgagttctgcagaaaccacttcttggtgggactgttactgagggaggtggggacagccctccaggagttccgggaggtccgtctgatcgccatcagtgtgctcaagaacctgctgataaagcattcttttgatgacagatatgcttcaaggagccatcaggcaaggatagccaccctctacctgcctctgtttggtctgctgattgaaaacgtccagcggatcaatgtgagggatgtgtcacccttccctgtgaacgcgggcatgactgtgaaggatgaatccctggctctaccagctgtgaatccgctggtgacgccgcagaagggaagcaccctggacaacagcctgcacaaggacctgctgggcgccatctccggcattgcttctccatatacaacctcaactccaaacatcaacagtgtgagaaatgctgattcgagaggatctctcataagcacagattcgggtaacagccttccagaaaggaatagtgagaagagcaattccctggataagcaccaacaaagtagcacattgggaaattccgtggttcgctgtgataaacttgaccagtctgagattaagagcctactgatgtgtttcctctacatcttaaagagcatgtctgatgatgctttgtttacatattggaacaaggcttcaacatctgaacttatggatttttttacaatatctgaagtctgcctgcaccagttccagtacatggggaagcgatacatagccagaacaggaatgatgcatgccagattgcagcagctgggcagcctggataactctctcacttttaaccacagctatggccactcggacgcagatgttctgcaccagtcattacttgaagccaacattgctactgaggtttgcctgacagctctggacacgctttctctatttacattggcgtttaagaaccagctcctggccgaccatggacataatcctctcatgaaaaaagtttttgatgtctacctgtgttttcttcaaaaacatcagtctgaaacggctttaaaaaatgtcttcactgccttaaggtccttaatttataagtttccctcaacattctatgaagggagagcggacatgtgtgcggctctgtgttacgagattctcaagtgctgtaactccaagctgagctccatcaggacggaggcctcccagctgctctacttcctgatgaggaacaactttgattacactggaaagaagtcctttgtccggacacatttgcaagtcatcatatctgtcagccagctgatagcagacgttgttggcattgggggaaccagattccagcagtccctgtccatcatcaacaactgtgccaacagtgaccggcttattaagcacaccagcttctcctctgatgtgaaggacttaaccaaaaggatacgcacggtgctaatggccaccgcccagatgaaggagcatgagaacgacccagagatgctggtggacctccagtacagcctggccaaatcctatgccagcacgcccgagctcaggaagacgtggctcgacagcatggccaggatccatgtcaaaaatggcgatctctcagaggcagcaatgtgctatgtccacgtaacagccctagtggcagaatatctcacacggaaaggcgtgtttagacaaggatgcaccgccttcagggtcattaccccaaacatcgacgaggaggcctccatgatggaagacgtggggatgcaggatgtccatttcaacgaggatgtgctgatggagctccttgagcagtgcgcagatggactctggaaagccgagcgctacgagctcatcgccgacatctacaaacttatcatccccatttatgagaagcggagggattttgagaggctggcccatctgtatgacacgctgcaccgggcctacagcaaagtgaccgaggtcatgcactcgggccgcaggcttctggggacctacttccgggtagccttcttcgggcaggcagcgcaataccagtttacagacagtgaaacagatgtggagggattctttgaagatgaagatggaaaggagtatatttacaaggaacccaaactcacaccgctgtcggaaatttctcagagactccttaaactgtactcggataaatttggttctgaaaatgtcaaaatgatacaggattctggcaaggtcaaccctaaggatctggattctaagtatgcatacatccaggtgactcacgtcatccccttctttgacgaaaaagagttgcaagaaaggaaaacagagtttgagagatcccacaacatccgccgcttcatgtttgagatgccatttacgcagaccgggaagaggcagggcggggtggaagagcagtgcaaacggcgcaccatcctgacagccatacactgcttcccttatgtgaagaagcgcatccctgtcatgtaccagcaccacactgacctgaaccccatcgaggtggccattgacgagatgagtaagaaggtggcggagctccggcagctgtgctcctcggccgaggtggacatgatcaaactgcagctcaaactccagggcagcgtgagtgttcaggtcaatgctggcccactagcatatgcgcgagctttcttagatgatacaaacacaaagcgatatcctgacaataaagtgaagctgcttaaggaagttttcaggcaatttgtggaagcttgcggtcaagccttagcggtaaacgaacgtctgattaaagaagaccagctcgagtatcaggaagaaatgaaagccaactacagggaaatggcgaaggagctttctgaaatcatgcatgagcaggtgagaagatctgccccctggaggagaagacgagcgtcttaccgaattcccttcacatcttcaacgccatcagtgggactccaacaagcacaatggttcacgggatgaccagctcgtcttcggtcgtgtgattacatctcatggcccgtgtgtggggacttgctttgtcatttgcaaactcaggatgctttccaaagccaatcactggggagaccgagcacagggaggaccaaggggaaggggagagaaaggaaataaagaacaacgttatttcttaacagactttctataggagttgtaagaaggtgcacatatttttttaaatctcactggcaatattcaaagttttcattgtgtcttaacaaaggtgtggtagacactcttgagctggacttagattttattcttccttgcagagtagtgttagaatagatggcctacagaaaaaaaaggttctgggatctacatggcagggagggctgcactgacattgatgcctgggggaccttttgcctcgaggctgagctggaaaatcttgaaaatattttttttttcctgtggcacattcaggttgaatacaagaactatttttgtgactagtttttgatgacctaagggaactgaccattgtaatttttgtaccagtgaaccaggagatttagtgcttttatattcatttccttgcatttaagaaaatatgaaagcttaaggaattatgtgagcttaaaactagtcaagcagtttagaaccaaaggcctatattaataaccgcaactatgctgaaaagtacaaagtagtacagtatattgttatgtacatatcattgttaatacagtcctggcattctgtacatatatgtattacatttctacatttttaatactcacatgggcttatgcattaagtttaattgtgataaatttgtgctgttccagtatatgcaatacactttaatgttttattcttgtacataaaaatgtgcaatatggagatgtatacagtctttactatattaggtttataaacagttttaagaatttcatccttttgccaaaatggtggagtatgtaattggtaaatcataaatcctgtggtgaatggtggtgtactttaaagctgtcaccatgttatattttcttttaagactttaatttagtaattttatatttgggaaaataaaggtttttaattttatttaactggaatcactgccctgctgtaattaaacattctgtaccacatctgtattaaaaagacattgctgaccatt

SEQ ID NO: 293180 - DNA, 7457 bp, Artificial Sequence
  derived and/or modified sequence
gcggccgggccgggccgcgggagcaggcggaggcggaggcggcgggggcaggaggatgtcgcagccgccgctgctccccgcctcggcggagactcggaagttcacccgggcgctgagtaagccgggcacggcggccgagctgcggcagagcgtgtctgaggtggtgcgcggctccgtgctcctggcaaagccaaagctaattgagccactcgactatgaaaatgtcatcgtccagaagaagactcagatcctgaacgactgtttacgggagatgctgctcttcccttacgatgactttcagacggccatcctgagacgacagggtcgatacatatgctcaacagtgcctgcgaaggcggaagaggaagcacagagcttgtttgttacagagtgcatcaaaacctataactctgactggcatcttgtgaactataaatatgaagattactcaggagagtttcgacagcttccgaacaaagtggtcaagttggataaacttccagttcatgtctatgaagttgacgaggaggtcgacaaagatgaggatgctgcctcccttggttcccagaagggtgggatcaccaagcatggctggctgtacaaaggcaacatgaacagtgccatcagcgtgaccatgaggtcatttaagagacgatttttccacctgattcaacttggcgatggatcctataatttgaatttttataaagatgaaaagatctccaaagaaccaaaaggatcaatatttctggattcctgtatgggtgtcgttcagaacaacaaagtcaggcgttttgcttttgagctcaagatgcaggacaaaagtagttatctcttggcagcagacagtgaagtggaaatggaagaatggatcacaattctaaataagatcctccagctcaactttgaagctgcaatgcaagaaaagcgaaatggcgactctcacgaagatgatgaacaaagcaaattggaaggttctggttccggtttagatagctacctgccggaacttgccaagagtgcaagagaagcagaaatcaaactgaaaagtgaaagcagagtcaaacttttttatttggacccagatgcccagaagcttgacttctcatcagctgagccagaagtgaagtcatttgaagagaagtttggaaaaaggatccttgtcaagtgcaatgatttatctttcaatttgcaatgctgtgttgccgaaaatgaagaaggacccactacaaatgttgaacctttctttgttactctatccctgtttgacataaaatacaaccggaagatttctgccgatttccacgtagacctgaaccatttctcagtgaggcaaatgctcgccaccacgtccccggcgctgatgaatggcagtgggcagagcccatctgtcctcaagggcatccttcatgaagccgccatgcagtatccgaagcagggaatattttcagtcacttgtcctcatccagatatatttcttgtggccagaattgaaaaagtccttcaggggagcatcacacattgcgctgagccatatatgaaaagttcagactcttctaaggtggcccagaaggtgctgaagaatgccaagcaggcatgccaaagactaggacagtatagaatgccatttgcttgggcagcaaggacattgtttaaggatgcatctggaaatcttgacaaaaatgccagattttctgccatctacaggcaagacagcaataagctatccaatgatgacatgctcaagttacttgcagactttcggaaacctgagaagatggctaagctcccagtgattttaggcaatctagacattacaattgataatgtttcctcagacttccctaattatgttaattcatcatacattcccacaaaacaatttgaaacctgcagtaaaactcccatcacgtttgaagtggaggaatttgtgccctgcataccaaaacacactcagccttacaccatctacaccaatcacctttacgtttatcctaagtacttgaaatacgacagtcagaagtcttttgccaaggctagaaatattgcgatttgcattgaattcaaagattcagatgaggaagactctcagccccttaagtgcatttatggcagacctggtgggccagttttcacaagaagcgcctttgctgcagttttacaccatcaccaaaacccagaattttatgatgagattaaaatagagttgcccactcagctgcatgaaaagcaccacctgttgctcacattcttccatgtcagctgtgacaactcaagtaaaggaagcacgaagaagagggatgtcgttgaaacccaagttggctactcctggcttcccctcctgaaagacggaagggtggtgacaagcgagcagcacatcccggtctcggcgaaccttccttcgggctatcttggctaccaggagcttgggatgggcaggcattatggtccggaaattaaatgggtagatggaggcaagccactgctgaaaatttccactcatctggtttctacagtgtatactcaggatcagcatttacataattttttccagtactgtcagaaaaccgaatctggagcccaagccttaggaaacgaacttgtaaagtaccttaagagtctgcatgcgatggaaggccacgtgatgatcgccttcttgcccactatcctaaaccagctgttccgagtcctcaccagagccacacaggaagaagtcgcggttaacgtgactcgggtcattattcatgtggttgcccagtgccatgaggaaggattggagagccacttgaggtcatatgttaagtacgcgtataaggctgagccatatgttgcctctgaatacaagacagtgcatgaagaactgaccaaatccatgaccacgattctcaagccttctgccgatttcctcaccagcaacaaactactgaagtactcatggtttttctttgatgtactgatcaaatctatggctcagcatttgatagagaactccaaagttaagttgctgcgaaaccagagatttcctgcatcctatcatcatgcagtggaaaccgttgtaaatatgctgatgccacacatcactcagaagtttcgagataatccagaggcatctaagaacgcgaatcatagccttgctgtcttcatcaagagatgtttcaccttcatggacaggggctttgtcttcaagcagatcaacaactacattagctgttttgctcctggagacccaaagaccctctttgaatacaagtttgaatttctccgtgtagtgtgcaaccatgaacattatattccgttgaacttaccaatgccatttggaaaaggcaggattcaaagataccaagacctccagcttgactactcattaacagatgagttctgcagaaaccacttcttggtgggactgttactgagggaggtggggacagccctccaggagttccgggaggtccgtctgatcgccatcagtgtgctcaagaacctgctgataaagcattcttttgatgacagatatgcttcaaggagccatcaggcaaggatagccaccctctacctgcctctgtttggtctgctgattgaaaacgtccagcggatcaatgtgagggatgtgtcacccttccctgtgaacgcgggcatgactgtgaaggatgaatccctggctctaccagctgtgaatccgctggtgacgccgcagaagggaagcaccctggacaacagcctgcacaaggacctgctgggcgccatctccggcattgcttctccatatacaacctcaactccaaacatcaacagtgtgagaaatgctgattcgagaggatctctcataagcacagattcgggtaacagccttccagaaaggaatagtgagaagagcaattccctggataagcaccaacaaagtagcacattgggaaattccgtggttcgctgtgataaacttgaccagtctgagattaagagcctactgatgtgtttcctctacatcttaaagagcatgtctgatgatgctttgtttacatattggaacaaggcttcaacatctgaacttatggatttttttacaatatctgaagtctgcctgcaccagttccagtacatggggaagcgatacatagccagaacaggaatgatgcatgccagattgcagcagctgggcagcctggataactctctcacttttaaccacagctatggccactcggacgcagatgttctgcaccagtcattacttgaagccaacattgctactgaggtttgcctgacagctctggacacgctttctctatttacattggcgtttaagaaccagctcctggccgaccatggacataatcctctcatgaaaaaagtttttgatgtctacctgtgttttcttcaaaaacatcagtctgaaacggctttaaaaaatgtcttcactgccttaaggtccttaatttataagtttccctcaacattctatgaagggagagcggacatgtgtgcggctctgtgttacgagattctcaagtgctgtaactccaagctgagctccatcaggacggaggcctcccagctgctctacttcctgatgaggaacaactttgattacactggaaagaagtcctttgtccggacacatttgcaagtcatcatatctgtcagccagctgatagcagacgttgttggcattgggggaaccagattccagcagtccctgtccatcatcaacaactgtgccaacagtgaccggcttattaagcacaccagcttctcctctgatgtgaaggacttaaccaaaaggatacgcacggtgctaatggccaccgcccagatgaaggagcatgagaacgacccagagatgctggtggacctccagtacagcctggccaaatcctatgccagcacgcccgagctcaggaagacgtggctcgacagcatggccaggatccatgtcaaaaatggcgatctctcagaggcagcaatgtgctatgtccacgtaacagccctagtggcagaatatctcacacggaaaggcgtgtttagacaaggatgcaccgccttcagggtcattaccccaaacatcgacgaggaggcctccatgatggaagacgtggggatgcaggatgtccatttcaacgaggatgtgctgatggagctccttgagcagtgcgcagatggactctggaaagccgagcgctacgagctcatcgccgacatctacaaacttatcatccccatttatgagaagcggagggattttgagaggctggcccatctgtatgacacgctgcaccgggcctacagcaaagtgaccgaggtcatgcactcgggccgcaggcttctggggacctacttccgggtagccttcttcgggcaggcagcgcaataccagtttacagacagtgaaacagatgtggagggattctttgaagatgaagatggaaaggagtatatttacaaggaacccaaactcacaccgctgtcggaaatttctcagagactccttaaactgtactcggataaatttggttctgaaaatgtcaaaatgatacaggattctggcaaggtcaaccctaaggatctggattctaagtatgcatacatccaggtgactcacgtcatccccttctttgacgaaaaagagttgcaagaaaggaaaacagagtttgagagatcccacaacatccgccgcttcatgtttgagatgccatttacgcagaccgggaagaggcagggcggggtggaagagcagtgcaaacggcgcaccatcctgacagccatacactgcttcccttatgtgaagaagcgcatccctgtcatgtaccagcaccacactgacctgaaccccatcgaggtggccattgacgagatgagtaagaaggtggcggagctccggcagctgtgctcctcggccgaggtggacatgatcaaactgcagctcaaactccagggcagcgtgagtgttcaggtcaatgctggcccactagcatatgcgcgagctttcttagatgatacaaacacaaagcgatatcctgacaataaagtgaagctgcttaaggaagttttcaggcaatttgtggaagcttgcggtcaagccttagcggtaaacgaacgtctgattaaagaagaccagctcgagtatcaggaagaaatgaaagccaactacagggaaatggcgaaggagctttctgaaatcatgcatgagcaggtgagaagatctgccccctggaggagaagacgagcgtcttaccgaattcccttcacatcttcaacgccatcagtgggactccaacaagcacaatggttcacgggatgaccagctcgtcttcggtcgtgtgattacatctcatggcccgtgtgtggggacttgctttgtcatttgcaaactcaggatgctttccaaagccaatcactggggagaccgagcacagggaggaccaaggggaaggggagagaaaggaaataaagaacaacgttatttcttaacagactttctataggagttgtaagaaggtgcacatatttttttaaatctcactggcaatattcaaagttttcattgtgtcttaacaaaggtgtggtagacactcttgagctggacttagattttattcttccttgcagagtagtgttagaatagatggcctacagaaaaaaaaggttctgggatctacatggcagggagggctgcactgacattgatgcctgggggaccttttgcctcgaggctgagctggaaaatcttgaaaatattttttttttcctgtggcacattcaggttgaatacaagaactatttttgtgactagtttttgatgacctaagggaactgaccattgtaatttttgtaccagtgaaccaggagatttagtgcttttatattcatttccttgcatttaagaaaatatgaaagcttaaggaattatgtgagcttaaaactagtcaagcagtttagaaccaaaggcctatattaataaccgcaactatgctgaaaagtacaaagtagtacagtatattgttatgtacatatcattgttaatacagtcctggcattctgtacatatatgtattacatttctacatttttaatactcacatgggcttatgcattaagtttaattgtgataaatttgtgctgttccagtatatgcaatacactttaatgttttattcttgtacataaaaatgtgcaatatggagatgtatacagtctttactatattaggtttataaacagttttaagaatttcatccttttgccaaaatggtggagtatgtaattggtaaatcataaatcctgtggtgaatggtggtgtactttaaagctgtcaccatgttatattttcttttaagactttaatttagtaattttatatttgggaaaataaaggtttttaattttatttaactggaatcactgccctgctgtaattaaacattctgtaccacatctgtattaaaaagacattgctgaccatt

SEQ ID NO: 293181 - DNA, 3030 bp, Artificial Sequence
  derived and/or modified sequence
atgccgtttggtaagggacgcatacagcgttatcaagcatttctgagtccaactgtcgagtcaaacgacacaccagtggatctgcagctggattactccttgaccgatgagttttgcaggaatcatttcctggttggattacttctgcgggaggtaggcaccgcactgcaggagttcagagaggtgaggttgattgcaatttctgtcctcaaaaatttactgattaagcattccttcgatgatcgatacgcctcccggtctcaccaagccaggattgcgaccctgtacctgcctctgtttgggctcctcattgagaatgtgcagcggattaacgttagggacgtgtccccctttccagtgaacgcaggtatgacagtcaaggatgaatcactcgctttaccagcagtcaatccccttgtcactccccagaaaggctcaaccttggacaattcccttcacaaggacctcctgggagcaatctccggtatagcctctccatacacaacttccacgccaaatataaactcagtgagaaatgcggatagtcgagggagtctgatctccacagattcaggcaactctctgccggagcgaaacagcgaaaagtccaactctttggataagcaccaacagtccagcacactggggaattccgtggtgaggtgcgataagctcgaccaatcggaaattaagtcactccttatgtgttttttatacatcttaaagagcatgagcgacgacgccctgtttacatactggaataaggcctccacaagcgagctgatggacttcttcactattagcgaggtgtgcctgcaccagtttcagtacatgggcaagcggtacatcgctaggacagggatgatgcatgcgcggcttcaacaacttggttcactggacaacagcttaacattcaatcatagctatggccactctgatgcagacgtgctgcatcagtcattattagaggctaacatcgctaccgaagtgtgtctgacagccctggatacattgagcctttttacactggctttcaaaaaccagttgctcgcagatcacgggcataatccactgatgaagaaggtttttgacgtctacctgtgttttctgcagaaacatcagtccgagacagccctgaaaaacgtgttcaccgcactccgctctctcatttacaaatttccatctaccttctatgagggccgtgctgacatgtgtgcggccctttgctatgagatcttaaagtgttgcaattctaagctgtcctccatcaggactgaggcttctcaactactgtatttccttatgcggaacaacttcgactatacgggcaaaaaaagcttcgtgcgtacccacctgcaggtgatcatcagcgtgtctcagctgattgctgacgttgtgggaatcggtggtactcgatttcagcagtcactgagcatcatcaacaactgtgcgaattctgacagattgattaagcatacttcattcagttccgacgtcaaagatttaacaaaacggattaggactgtgctgatggctaccgcccagatgaaggagcacgagaatgatccagagatgctcgtggacctccaatatagtctggccaagagctacgcatcaactccagagctgaggaaaacgtggctcgatagcatggctagaattcacgtaaaaaatggcgacctgtcggaagccgcgatgtgctacgtacatgtcaccgctctcgtggcagagtacctgaccagaaaaggagtgtttcgccagggctgtactgccttccgcgtgatcacgcccaacattgacgaggaagcctcgatgatggaggacgtcggcatgcaggacgttcatttcaacgaggacgtcctgatggagctcttagagcagtgcgctgatggcttgtggaaagctgaaagatatgagctgattgctgatatatataaactaataattcccatttatgaaaaaagacgggacttcgaacgcctcgcccacctgtatgataccctgcacagagcctattcgaaggtgactgaagtgatgcacagtgggagacggctgttgggaacatactttcgcgtcgccttcttcggccaggccgctcagtatcagtttaccgactcggaaactgatgtggaaggattttttgaggacgaggatggcaaagaatacatttacaaggagccaaaactgactcctctcagtgagatctcgcagagacttctgaagctgtattctgacaagtttggctcagagaacgttaagatgattcaggacagtggcaaggtcaatccaaaagatcttgattctaaatatgcctatattcaggtcactcacgtaattccattcttcgatgaaaaggagcttcaggagcggaagactgaatttgagagaagtcacaatatcaggaggttcatgtttgaaatgccgtttactcagaccggcaagcggcagggaggagtggaagagcaatgcaagcgaagaactattttaacagccatccattgctttccatacgttaaaaaacgtattccagtaatgtatcagcatcacacagacctgaatcccattgaagtggccattgacgagatgtcaaagaaagtcgccgaactcaggcaactgtgtagcagcgccgaggtggatatgattaagctacagttgaaactgcaaggatctgtgagtgtgcaggtgaacgctggtcctttggcgtacgcacgggcgttcttagacgacaccaataccaagcggtaccctgataacaaggtgaagttactcaaagaggtttttcgccagttcgttgaagcttgcggacaggccctcgcggttaacgagcgcctcatcaaggaagaccagctagagtatcaggaggaaatgaaggcaaattaccgagaaatggccaaggagcttagcgaaatcatgcacgagcaggttcgaagaagcgcaccgtggcggagaaggcgggcctcttacaggatcccattcacttcttcaaccccgtcggtgggactgcagcaagcacagtggtttacagggtag

SEQ ID NO: 293182 - DNA, 6240 bp, Artificial Sequence
  derived and/or modified sequence
atgtcccagccccctctgctccccgcgtcagccgaaactcggaaatttacaagagccctttcaaaacccggcactgctgctgaactgcgccagtcagtttctgaggtggtgagaggctcggtgctgctggctaagcccaaattaatagagcccttagattacgaaaatgtgattgtgcagaagaagacccaaattttgaatgactgcctacgcgagatgcttttgttcccttacgacgactttcagactgccatcctgcgtcgacagggacggtatatctgcagcaccgtgcccgccaaagctgaggaggaggctcagagcctgtttgtgacagaatgcatcaagacttacaactccgactggcatttggtgaattacaagtacgaggattattctggtgagttcaggcagctgcccaacaaggtcgtcaaactggacaaactgcccgtgcacgtttacgaggtggacgaagaggttgataaggacgaagacgccgcttctctgggatcacaaaagggtggcataacgaagcacggatggttatacaaaggcaacatgaactctgccatatccgtgaccatgcgctcttttaagcgaaggttcttccacttaatccaacttggggatggctcgtacaatctcaacttctataaagatgaaaagatttcaaaagaacccaaaggctcaatctttctggatagttgtatgggagtcgtgcaaaataataaggtgaggcggttcgcgttcgagctcaagatgcaggataagtctagctatctactggccgccgactccgaggtggagatggaggagtggattacaatcctgaacaagatcttgcaactgaacttcgaggctgctatgcaggagaagaggaatggcgactcgcacgaggatgacgaacagagcaaactggagggatccggcagcggactagattcttacctgcccgaattggccaagtctgctagagaagcagagattaagctcaagtctgagtcaagggtcaaactcttctacctcgatcccgacgctcagaagctcgatttcagctccgccgagcctgaggtcaaatcattcgaagaaaagtttgggaagaggattcttgtgaaatgcaatgacttgagcttcaaccttcagtgctgcgtagccgagaatgaggagggcccgacaaccaacgtggagccattctttgtgacactgagcctcttcgacatcaaatataatcgcaagataagcgccgactttcacgttgatctgaaccacttctcggtgcgacagatgcttgccaccacatctcctgccctcatgaatgggtctggtcagagtccctccgtgctcaaaggcattctgcatgaggcagccatgcagtacccaaagcagggcattttttccgtcacctgcccgcaccccgatatttttctggttgcacggatcgaaaaggtgctgcagggttccattacccactgtgcagaaccttatatgaagtcctcagactcctcaaaggtcgcccagaaggtactgaagaacgctaagcaggcctgtcagcgacttggacagtaccggatgccctttgcatgggcggcacggacactgtttaaagatgcgagtgggaacttggataaaaatgcgaggttctccgccatttatcgtcaagacagcaacaagttgagcaatgatgatatgctcaagctgctggccgacttccgcaaacccgagaagatggcgaagctgcccgtaattcttggcaacttggacatcaccatcgacaacgtgtcttctgacttcccaaactacgtcaactcgtcctacattcctactaaacagttcgaaacttgcagtaaaacgcccattacttttgaagtcgaggaatttgtcccttgtatacccaagcatactcagccctatacaatctatactaaccatctgtacgtctaccctaaatacttgaagtacgattcccagaagtcatttgctaaagcccggaacatcgccatttgtattgaattcaaggactcagacgaagaggattcacaacccctgaaatgcatttacggcaggcccggaggccccgtgttcactcgatccgctttcgcagcagtgctgcatcaccaccagaacccagaattctacgatgaaatcaaaattgaattaccaactcaattgcacgagaaacaccacctgctcctgacattctttcacgtctcctgtgacaactcttcgaagggatcaacaaagaagcgggacgtggtggaaactcaagttggttacagctggcttcctctgctcaaggatggccgtgtggttacctctgagcagcatattccagtctctgctaacctgccatcaggatacctagggtaccaggaactcggcatggggcggcattatgggcctgagatcaaatgggtcgacggcggcaaacccttgctgaagatctcgacccatttggtgagtactgtttatacgcaggaccagcacctgcacaacttctttcagtattgccagaagacagagtcaggagcccaggccctgggaaatgagctcgtgaagtacctcaagtctctacacgcaatggagggccatgtcatgatagcattcctgccaactattctgaatcagttgttcagggttctaacacgtgcaacacaggaagaagtggcagtgaacgtgacacgcgttattatacatgtggttgcccagtgccacgaagagggacttgagagccatcttcgctcttacgtcaagtatgcatacaaagccgagccctacgtggcgagcgaatacaaaacggtgcacgaggaactcaccaaaagcatgaccaccatcttgaagccgagtgccgactttttaacctctaataagctgttgaaatattcatggttctttttcgacgtgctcattaaaagcatggcacagcacttaatcgaaaacagcaaggtaaagctgctcaggaaccagcgcttcccagcttcataccatcatgccgtggagaccgtcgtgaatatgctgatgccacatattacgcaaaagttcagagacaatcctgaggcctctaaaaatgctaatcatagcctggccgttttcataaagagatgttttaccttcatggaccgtggatttgtgttcaagcagatcaacaattatattagttgctttgctcccggcgacccaaagactctctttgagtacaaattcgagtttctccgggtggtttgtaaccatgagcactacatccctctgaacctgcccatgcctttcggaaagggccggattcagcggtaccaggacctgcagctggactatagtttgacggatgagttttgtcgaaaccacttccttgtggggctgttactgcgtgaggtgggtacagccctgcaggaatttcgtgaagtacgtctgatcgctatttcagtgctgaagaatcttttgatcaaacacagctttgatgatcggtatgccagcagatcccaccaggcccgaattgccacactgtacttgcctttgttcggactgctcatcgagaatgtccaaagaataaatgtacgcgacgtctcccctttccccgtcaacgcaggaatgactgtaaaggacgaatctctggccctccctgcagtcaatccactagtcacgccacagaagggcagcactctcgacaactccttgcacaaggatctgctgggagctatttctggtatcgcttctccctacaccacgtccacgcccaacatcaacagcgtcaggaatgccgactcccgggggagcctgatcagcaccgactccggcaatagccttccagagcgtaattctgagaagtcaaactccctggataagcaccagcaatcctcgactttgggaaattccgtggttcggtgtgacaaacttgaccagtcggaaattaagtctctgctcatgtgcttcttatatattctgaaatcgatgtctgacgatgcactgtttacttactggaataaggctagtactagtgaactcatggacttttttacaatatccgaggtctgtctgcaccagttccaatacatgggcaaaaggtacatcgcccggaccggcatgatgcatgcgcggctccagcagctggggtccctggacaactcgttgacattcaatcactcctatggtcactccgacgcagacgtactccatcagagcttgctggaagcaaacatagccaccgaagtgtgtctcacggccctcgatacgttgagccttttcacactggcctttaaaaatcaactactggctgaccacggtcataacccactcatgaagaaggtgttcgacgtgtacctctgctttttacagaaacatcagtccgaaactgccctcaagaacgtgttcacggccctgagatctttgatttacaagttcccgagcacattctatgaggggagagccgacatgtgcgcagctctctgttacgagatcctcaagtgctgcaactctaagctgtcaagtatacgcaccgaagctagccagttgctctattttcttatgcgtaacaattttgattatactgggaaaaagtcttttgtcagaacccacctccaggtgatcatcagcgtgagccagcttatagccgacgtagttggaattgggggaacgaggtttcagcagagcctgagtataataaacaattgtgctaactcagacaggctaattaaacacaccagcttctctagcgacgtgaaagatttgaccaaacggatccggaccgtcctaatggctacagcccagatgaaagagcacgaaaacgacccagagatgctagtggacctccagtactcgcttgctaagagctacgcctccactccagaactcagaaagacctggctggacagcatggccaggattcacgtgaaaaacggcgacctgagtgaggccgccatgtgttacgtacacgttactgccttagtggctgagtacttaaccagaaaaggggtcttccgtcagggttgtaccgccttcagggtcatcacaccgaatatagatgaagaggcatccatgatggaggacgttggtatgcaggatgtgcacttcaacgaagatgttctgatggaactgctagagcagtgtgcagacgggctgtggaaggccgagagatatgaactcatcgcagatatatacaagttgatcatccccatttacgaaaaaaggcgcgattttgaacgcctcgcccacttgtatgacacacttcaccgggcttactccaaggtgactgaagtgatgcacagcgggcgacggctcttggggacctactttcgcgttgccttctttgggcaggccgcgcaataccagttcaccgactctgagacagacgttgagggtttcttcgaggacgaggatggtaaggagtacatatataaggaacctaagctaaccccgctctctgaaatcagtcagcgcctcctcaaactgtactcagataagttcggctccgaaaatgtgaagatgatacaggattccggaaaggtgaacccgaaggatttggactccaagtatgcttacatccaggtgacacatgtcattcccttttttgatgaaaaggaactgcaagaacgcaaaactgagtttgaaagatcacacaacattaggcgttttatgtttgagatgcccttcacgcagaccggcaaaagacaggggggagtagaagagcagtgtaagagacgcacgatcctcaccgctatccattgtttcccatatgtaaagaagagaattccagtgatgtaccaacaccacactgacttgaatccaattgaggtagccattgatgagatgtcaaagaaagtcgccgaactccgccagttatgcagcagcgccgaggtcgatatgattaagctgcagctcaaacttcaagggtctgtgagcgtgcaagtcaacgccggacccctcgcctatgcacgcgcattcctcgatgataccaacactaagcgctacccagataacaaggtgaagctgctgaaagaagtgtttcgtcagtttgtggaggcctgcggacaggctctggccgtcaacgaacgattgataaaggaggaccagctcgagtatcaagaggagatgaaggccaattaccgggaaatggccaaggagctctctgaaattatgcacgagcaggtaaggaggagtgcaccctggcggaggcgccgggccagctacaggatccctttcacatcctccactccttcggtggggctgcaacaggctcagtggtttacaggttag

SEQ ID NO: 293183 - DNA, 3030 bp, Artificial Sequence
  derived and/or modified sequence
atgccctttgggaagggccgcatccagcgctaccaggccttcctgagccccaccgtggagagcaatgacacccctgtggacctgcagctggactacagcctgacagatgagttctgcaggaaccacttcctggtgggcctgctgctgcgggaggtgggcacagccctgcaggagttccgggaggtgcggctgattgccatctctgtgctgaagaacctgctgatcaagcacagctttgatgacagatatgccagccgcagccaccaggcccgcatcgccaccctgtacctgcccctgtttggcctgctgattgaaaatgtgcagaggatcaacgtgagagatgtgagccccttccctgtgaatgccggcatgacagtgaaggatgagagcctggccctgcctgctgtgaaccccctggtgaccccccagaagggcagcaccctggacaacagcctgcacaaggacctgctgggcgccatctctggaattgccagcccctacaccaccagcacccccaacatcaacagcgtgagaaatgctgacagccggggcagcctcatcagcacagattctggcaacagcctgcctgagaggaacagcgagaagagcaacagcctggacaagcaccagcagagcagcaccctgggcaacagcgtggtgcgctgtgacaagctggaccagagcgagatcaagagcctgctgatgtgcttcctgtacatcctgaagtccatgtctgatgatgccctcttcacctactggaacaaggccagcaccagcgagctgatggacttcttcaccatcagcgaggtgtgcctgcaccagttccagtacatgggcaagcgctacatcgccaggacaggcatgatgcacgcccggctgcagcagctgggcagcctggacaacagcctgaccttcaaccacagctatggccacagtgatgctgatgtgctgcaccagagcctgctggaggccaacatcgccacagaggtgtgcctgacagccctggacaccctgagcctcttcaccctggccttcaagaaccagctgctggccgaccacggccacaaccccctgatgaagaaggtgtttgatgtgtacctgtgcttcctgcagaagcaccagagcgagacagccctgaagaatgtgttcaccgccctgcggagcctcatctacaagttccccagcaccttctatgagggccgggctgacatgtgtgccgccctgtgctatgagatcctgaagtgctgcaacagcaagctgagcagcatcagaacagaggccagccagctgctgtacttcctgatgaggaacaactttgactacaccgggaagaagagctttgtgaggacccacctgcaggtgatcatctctgtgtcccagctgattgctgatgtggtgggcatcggcggcacccgcttccagcagagcctgagcatcatcaacaactgtgccaacagcgacaggctcatcaagcacaccagcttcagcagtgatgtgaaggacctgaccaagaggatcagaacagtgctgatggccacagcccagatgaaggagcatgaaaatgaccctgagatgctggtggacctgcagtacagcctggccaagagctatgccagcaccccagagctgaggaagacctggctggacagcatggcccgcatccacgtgaagaatggagacctgtctgaggccgccatgtgctacgtgcacgtgacagccctggtggccgagtacctgaccaggaagggcgtcttccggcagggctgcacagccttccgggtcatcacccccaacattgatgaggaggcctccatgatggaggatgtgggcatgcaggatgtgcacttcaatgaagatgtgctgatggagctgctggagcagtgtgctgatggcctgtggaaggccgagagatatgagctgattgctgacatctacaagctgatcatccccatctatgagaagagaagagactttgagcggctggcccacctgtatgacaccctgcaccgggcctacagcaaggtgacagaggtgatgcacagcggccgccgcctgctgggcacctacttccgggtggccttcttcggccaggccgcccagtaccagttcacagacagcgagacagatgtggagggcttctttgaagatgaagatggcaaggagtacatctacaaggagcccaagctgacccccctgtctgagatcagccagaggctgctgaagctgtacagcgacaagtttggaagtgaaaatgtgaagatgatccaggacagcggcaaggtgaaccccaaggacctggacagcaaatatgcctacatccaggtgacccacgtgatccccttctttgatgagaaggagctgcaggagaggaagacagaatttgagaggagccacaacatccgccgcttcatgtttgagatgcccttcacccagacaggcaagaggcagggcggcgtggaggagcagtgcaagaggaggaccatcctgacagccatccactgcttcccctacgtgaagaagagaattcctgtgatgtaccagcaccacacagacctgaaccccatcgaggtggccattgatgagatgagcaagaaggtggccgagctgcggcagctgtgcagcagcgctgaggtggacatgatcaagctgcagctgaagctgcagggctctgtgtctgtgcaggtgaatgccggccccctggcctatgcccgggccttcctggatgacaccaacaccaagcgctacccagacaacaaggtgaagctgctgaaggaggtgttccggcagtttgtggaggcctgtggccaggccctggccgtgaatgaaagactcatcaaggaggaccagctggagtaccaggaggagatgaaggccaactaccgggagatggccaaggagctgtctgagatcatgcatgagcaggtgcggcgcagcgccccctggaggagaagaagagccagctaccgcatccccttcaccagcagcacccccagcgtgggcctgcagcaggcccagtggttcaccggctag

SEQ ID NO: 293184 - DNA, 6240 bp, Artificial Sequence
  derived and/or modified sequence
atgagccagccccccctgctgcctgccagcgctgagaccaggaagttcacccgggccctgagcaagccaggcacagctgctgagctgcggcagagcgtgtctgaggtggtgcggggctctgtgctgctggccaagcccaagctgattgagcccctggactatgaaaatgtcatcgtgcagaagaagacccagatcctgaatgactgcctgcgggagatgctgctcttcccctatgatgacttccagacagccatcctgcggcggcagggccgctacatctgcagcacagtgcctgccaaggccgaggaggaggcccagagcctgtttgtgacagagtgcatcaagacctacaacagcgactggcacctggtgaactacaagtatgaggactacagcggggagttccggcagctgcccaacaaggtggtgaagctggacaagctgcctgtgcacgtgtatgaggtggatgaggaggtggacaaggatgaagatgctgccagcctgggcagccagaagggcggcatcaccaagcacggctggctgtacaagggcaacatgaacagcgccatctctgtgaccatgaggagcttcaagaggcgcttcttccacctgatccagctgggagatggcagctacaacctgaacttctacaaggatgagaagatcagcaaggagcccaagggcagcatcttcctggacagctgcatgggcgtggtgcagaacaacaaggtgagaagatttgcctttgagctgaagatgcaggacaagagcagctacctgctggccgctgacagcgaggtggagatggaggagtggatcaccatcctgaacaagatcctgcagctgaactttgaggccgccatgcaggagaagagaaatggagacagccatgaagatgatgagcagagcaagctggagggcagcggcagcggcctggacagctacctgcctgagctggccaagagcgcccgggaggccgagatcaagctgaagtctgagagccgggtgaagctgttctacctggaccctgatgcccagaagctggacttcagcagcgctgagcctgaggtgaagagctttgaggagaagtttgggaagaggatcctggtgaagtgcaatgacctgtccttcaacctgcagtgctgcgtggctgaaaatgaggagggccccaccaccaacgtggagcccttctttgtgaccctgagcctgtttgacatcaagtacaacaggaagatctctgctgacttccacgtggacctgaaccacttctctgtgcggcagatgctggccaccaccagccctgccctgatgaatggcagcggccagagccccagcgtgctgaagggcatcctgcacgaggccgccatgcagtaccccaagcagggcatcttctctgtgacctgcccccacccagacatcttcctggtggccagaattgagaaggtgctgcagggcagcatcacccactgtgccgagccctacatgaagagcagtgacagcagcaaggtggcccagaaggtgctgaagaatgccaagcaggcctgccagaggctgggccagtacaggatgccctttgcctgggccgcccggaccctcttcaaggatgccagcggcaacctggacaagaatgcccgcttcagcgccatctaccggcaggacagcaacaagctgagcaatgatgacatgctgaagctgctggccgacttcaggaagccagagaagatggccaagctgcctgtgatcctgggcaacctggacatcaccatcgacaacgtgtccagtgacttccccaactacgtgaacagcagctacatccccaccaagcagtttgagacctgcagcaagacccccatcacctttgaggtggaggagtttgtgccctgcatccccaagcacacccagccctacaccatctacaccaaccacctgtatgtgtaccccaagtacctgaagtatgacagccagaagagctttgccaaggccaggaacatcgccatctgcatcgagttcaaggacagtgatgaggaggacagccagcccctgaagtgcatctacggccggcctgggggccctgtgttcaccaggtctgcctttgctgctgtgctgcaccaccaccagaaccctgagttctatgatgagatcaagattgagctgcccacccagctgcacgagaagcaccacctgctgctgaccttcttccacgtgtcctgtgacaacagcagcaagggcagcaccaagaagagagatgtggtggagacccaggtgggctacagctggctgcccctgctgaaggatggccgggtggtgaccagcgagcagcacatccctgtgtctgccaacctgcccagcggctacctgggctaccaggagctgggcatgggccgccactacggccctgagatcaagtgggtggatggcggcaagcccctgctgaagatcagcacccacctggtgtccacagtgtacacccaggaccagcacctgcacaacttcttccagtactgccagaagacagagagcggggcccaggccctgggcaatgagctggtgaagtacctgaagagcctgcacgccatggagggccacgtgatgattgccttcctgcccaccatcctgaaccagctgttccgggtgctgacccgggccacccaggaggaggtggccgtgaatgtgaccagggtcatcatccacgtggtggcccagtgccacgaggagggcctggagagccacctgcggagctatgtgaagtatgcctacaaggccgagccctacgtggccagcgagtacaagacagtgcatgaggagctgaccaagtccatgaccaccatcctgaagcccagcgctgacttcctgaccagcaacaagctgctgaagtacagctggttcttctttgatgtgctgatcaagtccatggcccagcacctgattgagaacagcaaggtgaagctgctgaggaaccagcgcttccctgccagctaccaccacgctgtggagaccgtggtgaacatgctgatgccccacatcacccagaagttccgggacaaccctgaggccagcaagaatgccaaccacagcctggccgtgttcatcaagcgctgcttcaccttcatggaccggggctttgtgttcaagcagatcaacaactacatcagctgctttgcccctggggaccccaagaccctgtttgagtacaagtttgagttcctgcgggtggtgtgcaaccacgagcactacatccccctgaacctgcccatgccctttgggaagggccgcatccagcgctaccaggacctgcagctggactacagcctgacagatgagttctgcaggaaccacttcctggtgggcctgctgctgcgggaggtgggcacagccctgcaggagttccgggaggtgcggctgattgccatctctgtgctgaagaacctgctgatcaagcacagctttgatgacagatatgccagccgcagccaccaggcccgcatcgccaccctgtacctgcccctgtttggcctgctgattgaaaatgtgcagaggatcaacgtgagagatgtgagccccttccctgtgaatgccggcatgacagtgaaggatgagagcctggccctgcctgctgtgaaccccctggtgaccccccagaagggcagcaccctggacaacagcctgcacaaggacctgctgggcgccatctctggaattgccagcccctacaccaccagcacccccaacatcaacagcgtgagaaatgctgacagccggggcagcctcatcagcacagattctggcaacagcctgcctgagaggaacagcgagaagagcaacagcctggacaagcaccagcagagcagcaccctgggcaacagcgtggtgcgctgtgacaagctggaccagagcgagatcaagagcctgctgatgtgcttcctgtacatcctgaagtccatgtctgatgatgccctcttcacctactggaacaaggccagcaccagcgagctgatggacttcttcaccatcagcgaggtgtgcctgcaccagttccagtacatgggcaagcgctacatcgccaggacaggcatgatgcacgcccggctgcagcagctgggcagcctggacaacagcctgaccttcaaccacagctatggccacagtgatgctgatgtgctgcaccagagcctgctggaggccaacatcgccacagaggtgtgcctgacagccctggacaccctgagcctcttcaccctggccttcaagaaccagctgctggccgaccacggccacaaccccctgatgaagaaggtgtttgatgtgtacctgtgcttcctgcagaagcaccagagcgagacagccctgaagaatgtgttcaccgccctgcggagcctcatctacaagttccccagcaccttctatgagggccgggctgacatgtgtgccgccctgtgctatgagatcctgaagtgctgcaacagcaagctgagcagcatcagaacagaggccagccagctgctgtacttcctgatgaggaacaactttgactacaccgggaagaagagctttgtgaggacccacctgcaggtgatcatctctgtgtcccagctgattgctgatgtggtgggcatcggcggcacccgcttccagcagagcctgagcatcatcaacaactgtgccaacagcgacaggctcatcaagcacaccagcttcagcagtgatgtgaaggacctgaccaagaggatcagaacagtgctgatggccacagcccagatgaaggagcatgaaaatgaccctgagatgctggtggacctgcagtacagcctggccaagagctatgccagcaccccagagctgaggaagacctggctggacagcatggcccgcatccacgtgaagaatggagacctgtctgaggccgccatgtgctacgtgcacgtgacagccctggtggccgagtacctgaccaggaagggcgtcttccggcagggctgcacagccttccgggtcatcacccccaacattgatgaggaggcctccatgatggaggatgtgggcatgcaggatgtgcacttcaatgaagatgtgctgatggagctgctggagcagtgtgctgatggcctgtggaaggccgagagatatgagctgattgctgacatctacaagctgatcatccccatctatgagaagagaagagactttgagcggctggcccacctgtatgacaccctgcaccgggcctacagcaaggtgacagaggtgatgcacagcggccgccgcctgctgggcacctacttccgggtggccttcttcggccaggccgcccagtaccagttcacagacagcgagacagatgtggagggcttctttgaagatgaagatggcaaggagtacatctacaaggagcccaagctgacccccctgtctgagatcagccagaggctgctgaagctgtacagcgacaagtttggaagtgaaaatgtgaagatgatccaggacagcggcaaggtgaaccccaaggacctggacagcaaatatgcctacatccaggtgacccacgtgatccccttctttgatgagaaggagctgcaggagaggaagacagaatttgagaggagccacaacatccgccgcttcatgtttgagatgcccttcacccagacaggcaagaggcagggcggcgtggaggagcagtgcaagaggaggaccatcctgacagccatccactgcttcccctacgtgaagaagagaattcctgtgatgtaccagcaccacacagacctgaaccccatcgaggtggccattgatgagatgagcaagaaggtggccgagctgcggcagctgtgcagcagcgctgaggtggacatgatcaagctgcagctgaagctgcagggctctgtgtctgtgcaggtgaatgccggccccctggcctatgcccgggccttcctggatgacaccaacaccaagcgctacccagacaacaaggtgaagctgctgaaggaggtgttccggcagtttgtggaggcctgtggccaggccctggccgtgaatgaaagactcatcaaggaggaccagctggagtaccaggaggagatgaaggccaactaccgggagatggccaaggagctgtctgagatcatgcatgagcaggtgcggcgcagcgccccctggaggagaagaagagccagctaccgcatccccttcaccagcagcacccccagcgtgggcctgcagcaggcccagtggttcaccggctag

SEQ ID NO: 293185 - DNA, 3030 bp, Artificial Sequence
  derived and/or modified sequence
atgcccttcggcaagggccggatccagcggtaccaggccttcctgagccctactgtcgaatccaatgacacacctgtggaccttcagctcgactactcactgaccgatgaattctgcagaaatcattttttagtgggcctcctgttgcgggaggtcggaactgccttgcaggaattcagggaagtgcgcctcattgcaatttccgtgctgaagaatctgctgatcaaacatagcttcgatgacaggtatgccagcagatctcatcaggccagaattgccacactctacttacccctcttcgggctgttgatcgagaacgtccagcgcatcaacgttagggacgtttcacccttccctgtgaacgccggaatgacagtgaaagatgaaagtctggctctcccggccgtgaacccactcgtgactcctcagaaaggcagtactcttgacaactcactgcacaaggatctcctgggagctatttcaggcatcgcaagtccttatactacaagcaccccaaatatcaactcagtccggaacgccgattccaggggaagtctgatatccacagactctggaaattctttgcccgagagaaactctgaaaagagcaatagcctggataaacatcagcaaagctctacgttaggtaacagcgtcgtgagatgtgataagcttgaccagtcagaaattaaatctctgctcatgtgcttcctctacatactgaaatcgatgagcgacgacgcattgtttacttactggaacaaggcatccacatctgagctgatggacttcttcactattagcgaggtgtgcctgcatcagtttcagtatatgggcaaacgttacatcgcaagaactggtatgatgcatgcccgactgcaacagttgggttctctggacaacagtcttacattcaaccattcatacggtcactctgacgcagacgtgctgcatcaatctttactagaagccaacatcgctactgaggtttgcctgacagctcttgatacactgagtctctttacattagcctttaaaaaccaactactggcagatcatgggcacaatcccctcatgaagaaggtattcgacgtgtatctctgcttcctccagaagcatcagagcgagaccgcgctgaaaaatgtgttcacagcactcaggagcctcatttacaaattcccttctactttttatgaagggcgcgctgatatgtgcgcagcactttgctacgaaatcctgaagtgctgcaatagcaagctgtcaagcatccgaacggaagccagccaactgctgtatttcttaatgaggaacaatttcgattacactggtaaaaagtcatttgtccgaacacatttacaggtgatcattagtgtgtcgcagctcatcgctgatgtggtgggcattgggggaacccggtttcagcagagcctgagtattatcaataattgtgctaactcagaccggctaattaagcatacgtctttctcttcggatgtaaaagatctaacaaaacggattaggactgtgctcatggccacggctcaaatgaaggaacatgaaaatgacccagaaatgctggtggacctgcagtactcccttgccaagtcatatgcatcgacaccagagttgagaaaaacctggcttgactctatggcgcgcattcacgttaagaacggcgatctgtcagaggcagccatgtgctacgttcacgtaacagccctggtcgcagagtatctcaccagaaaaggagtcttcaggcaaggatgtacggcttttcgggtaatcactcccaacattgatgaagaggcttctatgatggaggacgtcgggatgcaggacgtgcatttcaacgaggatgtcctgatggaattattagagcagtgcgcggatggtctatggaaggccgagcggtatgaactcatcgctgacatttacaaattaattatccccatttatgagaagcgtagagatttcgagagactagcccacctctacgacaccctacacagggcttacagtaaagtcactgaagttatgcacagtggccgacggctcttgggtacctatttccgagtagctttttttggtcaggccgcacagtaccaattcacagactctgagactgatgtggaaggattctttgaagatgaagacggcaaggaatatatttacaaagagccaaaactgacgcccctctcagaaataagccaaagattgctgaagctctactctgacaagttcggttccgagaatgttaaaatgatccaggattctggaaaagtgaacccaaaagatcttgattctaaatatgcatacattcaagtcacccatgtgatccccttcttcgatgaaaaggagctgcaggagcggaaaacggaattcgagcgaagtcacaacattcgcagattcatgtttgagatgccctttacccaaacaggcaaacgccaggggggcgtagaggagcagtgcaagcgccgtacgatcctgacagctatacattgttttccctacgtgaagaaacggattcctgtaatgtaccagcatcacactgatcttaatcctatcgaggtcgctattgacgaaatgtctaaaaaagtggctgaactgagacagctttgtagctccgcggaggtggatatgatcaagctgcagctgaaacttcaggggagcgtgtctgtgcaagtaaacgctggacccttggcttacgccagggcctttctggacgacaccaatactaagaggtaccctgataataaggtcaagttactcaaagaagtttttcggcagttcgtcgaggcttgcggccaagcattggctgttaatgagaggcttataaaagaggatcagttggaataccaagaggagatgaaggcaaattaccgggaaatggccaaggaactgtcggagatcatgcacgagcaggttcggcggagcgcaccctggcgccggcggcgcgcgagctatagaatcccttttacttctagcaccccatctgtcggactgcagcaggcccaatggtttacgggatag

SEQ ID NO: 293186 - DNA, 6240 bp, Artificial Sequence
  derived and/or modified sequence
atgagccagccccccctgctgcccgccagcgccgagacccggaagttcacccgagccctgtcaaagcccggcacagcagccgaattgcggcaaagtgtgagcgaagtcgtccggggttccgttcttctcgccaaacctaagctgatagagccccttgattatgaaaatgtgatagtgcagaaaaagactcagatcctcaacgattgtttaagagagatgctgctatttccctatgatgactttcagactgccatactgcgccggcagggacgatacatatgctcaactgtccccgctaaagcagaagaggaggctcaatctcttttcgtcacagagtgtatcaaaacctacaactcagactggcacctggtaaattacaagtatgaggactacagcggggaatttagacaacttccgaataaggttgttaaactcgacaaactgcccgtccacgtctatgaagtggatgaggaagtggataaggacgaggacgcggccagccttggttctcaaaagggggggatcactaagcatggatggctctataagggcaatatgaactcggccatcagtgtaacgatgaggagcttcaaacgccgtttcttccacctgattcagctgggagacggttcttacaatctgaacttctataaagacgagaaaatatcaaaagaaccaaaaggcagtatcttcctcgattcgtgtatgggagttgtgcagaataacaaggtccggcggtttgcattcgaactcaagatgcaggacaagagctcttacctattggctgcggacagcgaggtggaaatggaggagtggatcacaattctcaataagattctacagctcaacttcgaagccgctatgcaggagaagagaaacggcgactcccacgaggatgacgagcagtcaaagctcgaggggagtggtagtggactggattcatacttaccagagctcgcgaaaagcgccagagaagccgaaatcaaacttaagtcagaaagcagagtgaagctgttctacctggatccagacgcgcaaaagttggatttctcgagcgctgaacccgaggtcaaaagcttcgaggagaagttcggaaagcggattttagtgaagtgtaacgacctaagctttaatcttcaatgttgcgtagccgaaaatgaggaaggtccgactacaaatgtggagccctttttcgtgacacttagcttattcgatattaagtacaatcgtaagatatccgctgattttcatgtggacctcaatcatttctcagttcgccagatgttggccactacgtcacccgccctgatgaatgggagtggccagagcccaagcgtgctcaaggggattctgcacgaagcggccatgcagtatccaaagcagggcatcttctctgtgacatgcccccatccagatatttttctggtggcaaggattgagaaagtgcttcaaggatcgatcactcattgcgctgagccgtatatgaagagttctgactcgagcaaagtagcccagaaagtccttaaaaatgcaaagcaggcatgccagcgtctgggacagtataggatgccatttgcttgggcagcccggaccctgtttaaagacgccagtggtaatttagataagaacgcccggttttctgccatctacagacaagatagcaacaaactgtccaacgatgatatgctgaaactgctggcagattttcgcaagcctgagaaaatggcaaaattgcctgtgatcctgggcaacctggacattactattgacaatgtctccagcgattttcccaactacgtaaattcatcctacatccctactaaacagttcgagacgtgttccaagaccccaatcacattcgaggtggaagagttcgtcccttgtatcccgaagcacacccagccttacactatctatacaaatcatctgtatgtctaccctaagtatcttaagtatgactcgcaaaagtcttttgcaaaggcccgaaacatcgctatttgcatagaatttaaggacagcgatgaagaggattcgcaaccattaaagtgcatctacggaaggcccggaggtccagtcttcacccgctccgccttcgcagccgttctgcatcaccatcagaaccccgaattctacgacgagattaagatcgagttgcccacccagctgcacgaaaaacatcacctcttactgaccttctttcatgtttcttgcgacaattcaagcaagggcagcacaaaaaagagggatgtggttgagacacaggtcggatacagttggctccccctgttgaaggatggacgggtggtcacatcggaacagcatattcctgtgtccgccaatctcccgtcaggctatctcggctaccaggagcttgggatgggtcggcattatggaccagaaattaaatgggtggatggcgggaagcccctcctgaaaattagcacacaccttgtgtccacggtgtacacgcaggaccaacacttacacaacttcttccaatactgccagaaaacagagtctggagcacaggcactgggtaacgagctcgtgaaataccttaagtcgctccatgcgatggaggggcacgtcatgatcgctttcctgccaacgattctgaatcagctttttcgggtcctcactagggcaactcaggaagaggttgccgttaacgtgacccgggtgatcatccatgttgttgcgcagtgtcacgaggagggcctggaatctcatctcagatcttatgtcaagtacgcatacaaagccgaaccatacgtggcgtcagagtacaaaaccgtgcacgaagagctaactaaaagtatgaccaccatcctaaagccgagcgccgacttcctcacaagcaataaattgctgaaatactcctggttcttcttcgatgtcttgattaagtccatggctcaacacttaatagaaaactcaaaagtcaaacttctgcggaaccaaaggtttcctgcttcttatcatcacgccgtcgaaactgtggtgaacatgttaatgcctcacatcacgcagaaatttagggacaaccccgaagcctcgaaaaacgccaaccacagcctcgcggtcttcatcaaacgttgtttcacattcatggaccgcggctttgtctttaagcagattaacaattacatctcctgcttcgcgccgggtgaccctaaaacactttttgagtacaagttcgagtttctgagagtcgtttgcaatcacgagcactacattcccctgaacctgccaatgccgttcggcaaggggaggattcagcggtatcaggatctgcagctggattattctctgaccgatgagttttgtcgaaatcacttcttggtcggtctgcttcttagggaggtcggcaccgctctgcaggagtttcgcgaggttcggttgatcgccataagtgtgttgaagaatttgctcatcaagcacagcttcgacgaccggtacgcaagccgctctcaccaggcccgcatcgcgaccctttatctgcccctcttcggtctgctcattgaaaacgtgcaaaggatcaatgtgcgggatgtgagtccattcccagtgaatgccggcatgacagttaaagacgaatccttggcactgccagccgtgaatcctctggtcactccacagaagggtagcacactggataacagcctgcataaagacctgttaggtgccattagcgggatagcgtccccctataccactagtaccccaaatattaacagtgtgcgaaacgcagactcacgtggcagtttgatttctacagattcaggcaattccctcccagagaggaattccgaaaagtcaaattctctcgataaacaccagcagtcgagcacactcggcaatagcgttgtccgctgcgacaagctagaccaatccgagatcaagtctctgttgatgtgcttcctgtacatcctgaaatcgatgtcagatgacgcattgttcacgtactggaacaaggctagcacttctgagttgatggatttctttactatctcagaagtgtgtctccaccaatttcagtacatgggcaagaggtacatagctcgtactggaatgatgcatgccaggctgcagcagctgggcagcctggacaacagtttgaccttcaaccatagctacggccattccgacgctgacgtactgcatcaatctctcttagaagcaaacatcgccaccgaggtctgccttactgcccttgacaccttgagcctgttcaccttggcgtttaaaaaccagttgctcgccgaccatggccacaacccgctgatgaagaaagtctttgatgtttacctgtgttttctgcagaaacaccagtcggaaacggctctgaaaaacgtgtttacggcacttcgtagtcttatttataagttcccctctactttctatgagggccgcgctgacatgtgcgccgcgctatgctacgagattctgaagtgttgcaatagtaaactgagctctatcaggacagaagcctcgcagctgctgtattttttgatgcgcaataattttgactacacgggcaagaaatccttcgtgaggacgcacctgcaagtgatcatctcggtgtcacaactgattgcggatgtggtgggcataggaggtactagattccaacaaagccttagtattataaataactgcgccaatagcgatcgactgatcaaacacactagcttttcttctgatgtgaaggaccttactaaacgcatcagaactgtgttaatggcaacagcccagatgaaggagcacgaaaatgatcctgagatgctggtagatctgcagtattctttggccaaatcctacgctagcactcctgagctaaggaaaacatggcttgactctatggccagaatccacgtgaagaacggtgatctatcagaagctgctatgtgttatgtccatgtgactgcgcttgtggctgagtacctgacccgcaaaggcgtgtttcgccagggctgtacggccttccgtgttattacccccaacatcgacgaggaggcctcaatgatggaagatgtgggaatgcaggatgtccacttcaacgaggatgttctcatggagctgctggagcagtgcgccgacggcttgtggaaagcagagaggtatgagctgatcgctgatatttataagcttatcatccccatctatgaaaaaagacgggactttgagcggttggcacatctgtatgacaccctgcatagggcctattctaaagtgacagaggtgatgcacagcggcaggcgcttgctcggcacgtatttcagggtcgcgttcttcggacaggcagctcagtaccagttcacggactcagagacagacgttgagggtttctttgaggatgaggatggcaaagaatatatttataaggaaccaaaactgacaccccttagcgagatttcgcagcgcctgctaaagctgtatagtgataagtttggcagcgagaacgtgaagatgatccaagattccggcaaggtgaatcccaaggatctggacagcaagtatgcatacatccaggttacacacgtgattcctttttttgatgagaaggaactgcaagagcgcaaaactgaattcgagaggtcacacaacatcaggagatttatgtttgaaatgccttttacccaaacggggaagcggcaggggggcgtggaagaacaatgcaaaaggcgcacaatcctgacggctattcactgcttcccatacgtcaagaagcgcatccctgtcatgtaccagcaccataccgacctgaacccaatcgaagtcgcaatcgatgagatgtctaagaaagtcgctgagctgcgccagctctgcagtagcgcagaggtggacatgatcaaactccagctgaagctccagggatccgtcagcgtgcaggtgaacgcgggacccctggcatatgcccgggctttcctcgatgataccaatacaaaaaggtacccggacaacaaagttaagttgctgaaggaggtttttagacaattcgtggaggcatgcggccaagccctggcggtgaatgagcgactaatcaaagaggaccagctagaataccaggaagagatgaaggcaaactatagagaaatggctaaggagctctccgaaattatgcatgagcaggttcggagatctgccccctggagaagacggcgcgcatcctatcggattccatttacctcgagcacaccgtccgtgggcttgcagcaggcccaatggttcaccggctag

SEQ ID NO: 293187 - DNA, 3030 bp, Artificial Sequence
  derived and/or modified sequence
atgccctttggaaagggccgaatccagaggtaccaggcgtttctctcaccgactgtggagtctaacgacacccccgtcgacctacaactggattatagtctgacggatgagttttgtcggaaccatttccttgtggggctgctcttaagggaagttgggactgctctgcaggagtttagagaagtcagattaattgctattagtgttctgaaaaacttgctgattaagcacagcttcgacgatcgatacgccagcaggtcccaccaggcacgcattgccactctgtacctgcctctgtttggactgctgatcgagaacgtgcagaggattaatgtgagagatgtgtccccttttcccgtgaacgcgggtatgaccgttaaggacgaatccctcgcattgccagccgtgaacccactcgtcacccctcaaaaaggcagtacactcgataacagtctgcacaaggacctgctgggtgctatctctggcatagccagcccctacacaactagtacccccaacattaattcagtcaggaacgccgactcaagaggtagccttatatcgacagattcaggcaatagcctgccagaacggaattccgaaaaaagcaatagtcttgacaagcaccagcagtccagcaccctggggaattctgttgtgcgttgcgataaattagaccagtccgagattaagagcctcctcatgtgttttctgtacatcctgaagtcaatgtctgacgacgccctgttcacttattggaacaaggcttcgactagcgagctgatggatttcttcactatttctgaagtctgtctccaccagttccaatacatggggaagcggtacatcgccaggacggggatgatgcacgcgcgactgcagcagctgggtagcttggacaactcactcacatttaatcactcctatggccacagcgatgcagacgtcttacaccagtccctgcttgaagcgaacattgcaaccgaagtgtgtctgaccgccttggataccctcagtttatttaccctggcgttcaagaaccagctgctcgcagatcacgggcataatcctcttatgaaaaaggttttcgacgtttatctttgttttctgcagaaacatcagagtgaaacagccctcaaaaacgtgttcaccgcactcaggagcctcatatacaaattcccaagcaccttttacgaaggcagggctgatatgtgcgcggctttgtgctacgaaatcttgaagtgttgtaatagcaagctgagttccatccgcacagaagcaagccagctcctctattttctgatgcgcaacaactttgactatactggaaagaaatcattcgtcagaacccacctacaagtcatcataagtgtgagtcaactcattgctgatgtggtaggaataggaggcaccaggttccagcaaagcctgtccatcattaacaactgtgcaaactcggaccgtctcatcaaacacaccagcttctcttcagacgtgaaggacctgactaaaaggattcgcacagtcctgatggctactgcccagatgaaggaacatgagaatgaccctgagatgctggtggacctgcagtactcattagcaaagagctacgcttcaactccggaactccggaagacctggttggacagtatggctcgcattcatgtaaaaaatggggatttaagcgaagcagccatgtgctacgtgcatgtgactgccctcgtcgcggagtacctcacccggaaaggcgtgttccgccagggatgcaccgcattccgcgtaattacgccaaacattgacgaggaggcctcaatgatggaggatgtcggcatgcaggacgttcatttcaacgaggacgtattgatggaactcttggagcagtgcgccgatggcctgtggaaagctgagcggtatgagctgatcgcggacatctataaactgatcatccctatctatgaaaagaggagggacttcgaaagacttgcccatttgtacgacaccctacatcgcgcttactctaaagtaactgaagtcatgcactccggccgtagattgctcggcacctatttccgagtggcttttttcgggcaggcagcacaatatcagtttacagactccgaaacagacgtggaagggttttttgaggacgaggatggaaaggaatatatttacaaagaacctaaacttactccattgagtgagatctcacagaggctccttaagctgtacagtgataagttcggcagtgaaaatgtcaaaatgatccaggacagcgggaaggtgaatcctaaggacctggactctaaatatgcttatattcaggtgacacatgtgatccccttcttcgatgagaaagagctgcaggaaaggaagacggaatttgaacgctcacacaatatacgccgattcatgttcgaaatgcctttcacccagaccggaaaaagacaaggtggtgtagaagagcagtgcaagcgcaggaccatcctgacagccatccactgttttccatacgtaaaaaagaggataccggtaatgtatcagcatcacactgatctaaaccccatcgaagtggccatcgatgagatgtccaaaaaagtcgctgaactgcgacagttatgctcctctgctgaggtggacatgattaagctccagcttaagttgcagggctccgtcagtgtgcaagtgaacgccggaccactcgcctacgcaagggccttcttagacgatacgaatacgaagagatatccagacaacaaggttaagctcttaaaagaagttttcaggcagtttgtagaggcttgcgggcaggctctggccgtgaacgagcggctgatcaaggaggaccagttggagtatcaagaagaaatgaaggctaattatagggagatggctaaggaattgtccgagatcatgcacgagcaagtcaggagaagcgccccttggcgccgtcgcagggcgtcataccgtatcccgtttactagctcaaccccgtccgtgggattacagcaagcacagtggtttacaggctag

SEQ ID NO: 293188 - DNA, 6239 bp, Artificial Sequence
  derived and/or modified sequence
atgagccagcccccactgctgccagcaagcgccgagacccgaaagtttactcgtgccctctcgaaaccgggtaccgctgccgagctccggcagtctgtgagcgaagtcgttcggggttccgtgctgctcgccaaaccgaagctgatcgaacccttggattacgagaatgtgatagtacagaaaaaaactcagattcttaatgactgcttgcgtgagatgctgctgttcccctatgatgatttccaaacagccatcttaaggcgccagggcagatatatctgctcgactgtgcccgcaaaagctgaagaggaggcacaaagcctttttgttactgaatgcattaagacatacaactccgactggcacctagtgaactataagtatgaggattactcgggggaattccgccagttgcccaataaggtcgttaaattggacaaactcccagtccatgtgtatgaagtggacgaagaagttgataaggacgaggatgccgcttccttggggagccaaaagggcggtattaccaaacatggctggctgtacaagggcaacatgaactccgccatctccgtgacaatgcgaagctttaaacgaagatttttccatctgatccaattaggggacgggtcatacaatctgaatttttataaagacgagaaaatctcaaaggaaccaaaaggtagcatcttcctggactcatgtatgggggtggtgcagaacaataaggtgcgtagatttgccttcgaattaaaaatgcaggataagtcctcttacctgctggccgcagactctgaagtggaaatggaagagtggatcaccatcttaaataaaatcctgcagctaaactttgaggcagccatgcaggaaaagcgcaatggcgattcacacgaggacgacgagcagtctaaactcgagggctctgggagcggcctcgattcatacctgcctgagctcgccaagtctgcccgagaagctgagattaagctgaaaagcgagagccgcgtgaagctgttctatctggatccagatgctcagaagttggacttttcctcggcagagccggaggtcaagtccttcgaggagaagtttggcaagcggatcctcgtcaaatgtaacgacctgagcttcaatctgcagtgctgcgtcgccgagaacgaggagggtccaacgactaatgtagagccattctttgtaaccctctcactgttcgatattaagtacaacagaaaaatatccgccgactttcatgtggacctgaatcacttcagcgtcagacagatgctggcaaccacaagtcctgctctgatgaatggaagcggtcagagcccgagtgtgctcaagggaatcctccacgaggcggctatgcagtatcctaaacaaggcatattctcagtcacctgtcctcaccctgacattttccttgtggcccgaatcgagaaagtgcttcagggaagtataacccattgcgccgaaccttatatgaagtctagcgactctagcaaggtggcacaaaaagttctgaagaacgctaagcaggcatgtcagagactggggcaataccgtatgccatttgcctgggcggctcgcaccctgtttaaggacgccagcggtaacttggacaaaaatgctcggtttagtgctatttacaggcaggattctaataagctgtcaaatgacgacatgttaaaacttttagccgattttcgtaagccggagaaaatggcgaagctcccagtgatactgggcaatttggatataacaattgacaacgtaagttctgactttcccaattatgtgaattcctcctacatccccaccaaacaattcgagacatgctcaaagactcccattacattcgaggttgaggagttcgtgccctgcataccaaaacacacccagccctacaccatctacactaaccatctctacgtctatccaaagtacctgaaatatgactcccagaaatctttcgcaaaggccagaaacatcgcaatctgcattgaatttaaggattccgatgaggaagacagtcagcccctgaaatgtatctatgggaggcccggaggccctgtcttcacccggagcgcctttgcagccgtattgcatcaccatcaaaatcccgagttctacgatgagatcaagattgagctgcccacgcagttgcacgaaaagcatcatttgctgctgaccttctttcacgtctcctgtgataatagttctaagggatcgaccaaaaaaagagacgtggttgagacccaggtgggctattcgtggttgcctctgctgaaggatggtagagtagtcacgtccgaacagcacattcccgtttcggcgaacttgccgagcggatatttggggtatcaagagctaggcatgggcaggcattatgggccagaaattaaatgggtggatggaggcaagcccctgcttaagatttcgacacatctggtttctaccgtttacacccaggatcaacatttacacaactttttccaatattgtcaaaagacggagagcggcgctcaggcacttgggaacgaactggttaagtaccttaaatccttacatgccatggaaggtcatgtgatgatagctttcttacctactatcttgaatcagctcttcagggtcctgacgagggcaacacaggaggaagtggccgtgaatgtcacaagggtcattatccatgtcgtggctcagtgccatgaggagggattggaatcccatctccgaagctacgtaaagtacgcatacaaggcagaaccatatgtagcttccgaatataagactgtgcacgaagagctcaccaagtccatgaccacaatccttaaaccttcggcagattttttaacctcaaataagctcctgaaatatagctggtttttctttgacgtccttattaagtccatggctcaacatctcatcgaaaacagtaaggttaaactactgcgtaatcagaggttcccagcgtcctaccaccatgctgtagagactgtcgtcaatatgctgatgccacacattacgcaaaagttccgtgataacccggaggctagcaagaatgctaaccattctttggctgtgtttatcaaaaggtgcttcacctttatggatagggggttcgtctttaagcagataaacaactatattagctgcttcgctccgggtgatcccaaaaccctctttgagtacaaatttgagttcctgagggtcgtctgcaaccatgagcactacatccctttaaacctgcctatgccgttcgggaaaggcaggatccagcggtaccaggacctgcagttagattatagtctgacggatgagttctgtaggaaccacttcttggttggcctgttgctacgggaggtgggcacagcacttcaggaattccgggaggtgcgtctaattgcaatctccgtccttaaaaatctgctgataaagcatagtttcgatgacagatatgcttctcgatcccaccaggctcgtatagcgacgctgtacctgccattattcggccttctgatcgagaatgtccagaggatcaatgtgcgtgatgtgtccccatttcccgtcaatgccggtatgacagtgaaagatgagtccctggctcttccggctgtgaaccccttggtgactccccagaaggggagcacactggacaacagccttcataaggatctgctaggcgctatatccggaattgctagtccctacacaaccagtaccccgaacatcaactccgtacgcaacgccgatagccggggtagcttaatatcgacagactccggcaattccctcccggagcgcaactcagaaaagagcaatagcctggacaaacatcagcagtcttccaccctgggcaattcggtcgtcagatgtgataaactcgatcagtcagaaataaagtccctcctgatgtgcttcctttacatcctcaaaagtatgtcagacgacgccctgtttacatactggaacaaagcttctacaagcgaacttatggatttttttaccatttcagaagtgtgtctgcatcagtttcaatacatgggaaaaaggtacatcgccaggactggaatgatgcacgccaggttgcaacagctggggtccctcgataacagtctgacctttaatcatagttacgggcacagcgatgccgatgtgctgcaccagagcctcctggaggcaaatatcgcaacggaggtgtgtcttactgcactggacaccctgtcactatttactcttgccttcaagaaccagctgctggccgaccatggccacaaccctttgatgaagaaagtttttgacgtctacctctgctttctccagaagcatcagagcgagaccgcgctgaaaaacgtctttacggccctacgatcccttatctataaatttccctctaccttctatgaaggcagagccgacatgtgtgcggcactctgctatgagattttgaaatgctgcaatagcaagctctcgagcattcggaccgaggcaagtcagcttttatatttcctcatgagaaacaatttcgattacaccggcaagaagtccttcgtcagaacacacctgcaggtgatcatctccgtgagccagctcatcgccgacgtggttggtatcggcggaacgcgcttccagcagagtctctcaattatcaacaactgtgccaatagcgaccgactgattaagcacacaagcttctcttccgatgtgaaagacctcacaaaaaggatccggacggtcctgatggcgacagcccagatgaaagaacacgagaatgatccggaaatgttggtggacctgcaatactctcttgcgaagtcatacgcttcaacccccgagttgagaaagacctggctggatagcatggcgaggattcacgtaaaaaatggcgatctgtcagaggcagctatgtgttatgtgcatgtcactgccctggtcgccgagtacctcactcgcaagggggtgtttcgtcaaggatgtaccgcatttcgggtaataacgcctaatatcgatgaagaggcgagtatgatggaggacgtcggcatgcaggacgtacatttcaatgaagacgtccttatggagctcctggagcaatgcgcggatggactgtggaaggcagaaaggtacgagcttatcgctgacatttacaaactgattatccccatctatgagaaacgcagagactttgagaggctggcacatctctacgacaccctgcatagggcctactcaaaggttaccgaggtgatgcactccggcaggagactgttagggacttattttcgggtggcgttcttcggacaagcagcccagtatcagttcaccgatagtgagacagacgtcgagggattctttgaagacgaagatggaaaggagtatatttacaaggagccgaaactcaccccactctcggaaattagccaacgtctcttaaagttgtacagcgataagttcgggagcgaaaatgttaaaatgattcaggatagtggcaaagtcaatcccaaagacctcgatagcaagtatgcctacatccaggtaacccacgtcatcccattctttgacgagaaagagctccaggaacgtaaaactgagttcgagaggagccataatatacgcagatttatgtttgagatgccgtttacccagactgggaaacgtcagggcggtgtggaagaacaatgtaagaggagaactattttaactgctatccactgtttcccatacgtcaagaaaagaatccctgtgatgtaccaacatcatactgacctcaatcccatcgaggtggccatcgacgaaatgtccaaaaaggtcgccgaactccggcaactttgcagctctgccgaggtggacatgatcaagcttcagctgaagctgcagggcagcgttagcgtgcaagtgaatgccggtccgctcgcgtatgccagggccttcctggacgacacaaataccaagcggtatcctgataataaggttaaactgctgaaggaagtctttagacagtttgtggaggcatgtggacaagccctagccgttaatgagcggctgatcaaggaggaccaattggaatatcaggaagaaatgaaggctaattatagagagatggctaaagagctgagtgagattatgcacgaacaggtccgtagaagtgctccgtggcgtcgtcgacgagccagctatcgcataccatttacttcaagtacccccagtgtggggttgcagcaggcgcagtggttcacaggata

SEQ ID NO: 293189 - protein, 1393 aa, Artificial Sequence
  derived and/or modified sequence
MGCTTSVILFKGIRTVFERNCAYMCKQQGENNALEYTAYNWTKEDSELLISSWLAKPKLIEPLDYENVIVQKKTQILNDCLREMLLFPYDDFQTAILRRQGRYICSTVPAKAEEEAQSLFVTECIKTYNSDWHLVNYKYEDYSGEFRQLPNKVVKLDKLPVHVYEVDEEVDKDEDAASLGSQKGGITKHGWLYKGNMNSAISVTMRSFKRRFFHLIQLGDGSYNLNFYKDEKISKEPKGSIFLDSCMGVVQNNKVRRFAFELKMQDKSSYLLAADSEVEMEEWITILNKILQLNFEAAMQEKRNGDSHEDDEQSKLEGSGSGLDSYLPELAKSAREAEIKLKSESRVKLFYLDPDAQKLDFSSAEPEVKSFEEKFGKRILVKCNDLSFNLQCCVAENEEGPTTNVEPFFVTLSLFDIKYNRKISADFHVDLNHFSVRQMLATTSPALMNGSGQSPSVLKGILHEAAMQYPKQGIFSVTCPHPDIFLVARIEKVLQGSITHCAEPYMKSSDSSKVAQKVLKNAKQACQRLGQYRMPFAWAARTLFKDASGNLDKNARFSAIYRQDSNKLSNDDMLKLLADFRKPEKMAKLPVILGNLDITIDNVSSDFPNYVNSSYIPTKQFETCSKTPITFEVEEFVPCIPKHTQPYTIYTNHLYVYPKYLKYDSQKSFAKARNIAICIEFKDSDEEDSQPLKCIYGRPGGPVFTRSAFAAVLHHHQNPEFYDEIKIELPTQLHEKHHLLLTFFHVSCDNSSKGSTKKRDVVETQVGYSWLPLLKDGRVVTSEQHIPVSANLPSGYLGYQELGMGRHYGPEIKWVDGGKPLLKISTHLVSTVYTQDQHLHNFFQYCQKTESGAQALGNELVKYLKSLHAMEGHVMIAFLPTILNQLFRVLTRATQEEVAVNVTRVIIHVVAQCHEEGLESHLRSYVKYAYKAEPYVASEYKTVHEELTKSMTTILKPSADFLTSNKLLKYSWFFFDVLIKSMAQHLIENSKVKLLRNQRFPASYHHAVETVVNMLMPHITQKFRDNPEASKNANHSLAVFIKRCFTFMDRGFVFKQINNYISCFAPGDPKTLFEYKFEFLRVVCNHEHYIPLNLPMPFGKGRIQRYQDLQLDYSLTDEFCRNHFLVGLLLREVGTALQEFREVRLIAISVLKNLLIKHSFDDRYASRSHQARIATLYLPLFGLLIENVQRINVRDVSPFPVNAGMTVKDESLALPAVNPLVTPQKGSTLDNSLHKDLLGAISGIASPYTTSTPNINSVRNADSRGSLISTDSGNSLPERNSEKSNSLDKHQQSSTLGNSVVRCDKLDQSEIKSLLMCFLYILKSMSDDALFTYWNKASTSELMDFFTISEVCLHQFQYMGKRYIASLTKCVALLLPAWNRNDACQIAAAGQPG

SEQ ID NO: 293190 - DNA, 4182 bp, Artificial Sequence
  derived and/or modified sequence
atgggctgcaccaccagcgtgatcctgttcaagggcatcagaaccgtgttcgagagaaactgcgcctacatgtgcaagcagcagggcgagaacaacgccctggagtacaccgcctacaactggaccaaggaggacagcgagctgctgatcagcagctggctggccaagcccaagctgatcgagcccctggactacgagaacgtgatcgtgcagaagaagacccagatcctgaacgactgcctgagagagatgctgctgttcccctacgacgacttccagaccgccatcctgagaagacagggcagatacatctgcagcaccgtgcccgccaaggccgaggaggaggcccagagcctgttcgtgaccgagtgcatcaagacctacaacagcgactggcacctggtgaactacaagtacgaggactacagcggcgagttcagacagctgcccaacaaggtggtgaagctggacaagctgcccgtgcacgtgtacgaggtggacgaggaggtggacaaggacgaggacgccgccagcctgggcagccagaagggcggcatcaccaagcacggctggctgtacaagggcaacatgaacagcgccatcagcgtgaccatgagaagcttcaagagaagattcttccacctgatccagctgggcgacggcagctacaacctgaacttctacaaggacgagaagatcagcaaggagcccaagggcagcatcttcctggacagctgcatgggcgtggtgcagaacaacaaggtgagaagattcgccttcgagctgaagatgcaggacaagagcagctacctgctggccgccgacagcgaggtggagatggaggagtggatcaccatcctgaacaagatcctgcagctgaacttcgaggccgccatgcaggagaagagaaacggcgacagccacgaggacgacgagcagagcaagctggagggcagcggcagcggcctggacagctacctgcccgagctggccaagagcgccagagaggccgagatcaagctgaagagcgagagcagagtgaagctgttctacctggaccccgacgcccagaagctggacttcagcagcgccgagcccgaggtgaagagcttcgaggagaagttcggcaagagaatcctggtgaagtgcaacgacctgagcttcaacctgcagtgctgcgtggccgagaacgaggagggccccaccaccaacgtggagcccttcttcgtgaccctgagcctgttcgacatcaagtacaacagaaagatcagcgccgacttccacgtggacctgaaccacttcagcgtgagacagatgctggccaccaccagccccgccctgatgaacggcagcggccagagccccagcgtgctgaagggcatcctgcacgaggccgccatgcagtaccccaagcagggcatcttcagcgtgacctgcccccaccccgacatcttcctggtggccagaatcgagaaggtgctgcagggcagcatcacccactgcgccgagccctacatgaagagcagcgacagcagcaaggtggcccagaaggtgctgaagaacgccaagcaggcctgccagagactgggccagtacagaatgcccttcgcctgggccgccagaaccctgttcaaggacgccagcggcaacctggacaagaacgccagattcagcgccatctacagacaggacagcaacaagctgagcaacgacgacatgctgaagctgctggccgacttcagaaagcccgagaagatggccaagctgcccgtgatcctgggcaacctggacatcaccatcgacaacgtgagcagcgacttccccaactacgtgaacagcagctacatccccaccaagcagttcgagacctgcagcaagacccccatcaccttcgaggtggaggagttcgtgccctgcatccccaagcacacccagccctacaccatctacaccaaccacctgtacgtgtaccccaagtacctgaagtacgacagccagaagagcttcgccaaggccagaaacatcgccatctgcatcgagttcaaggacagcgacgaggaggacagccagcccctgaagtgcatctacggcagacccggcggccccgtgttcaccagaagcgccttcgccgccgtgctgcaccaccaccagaaccccgagttctacgacgagatcaagatcgagctgcccacccagctgcacgagaagcaccacctgctgctgaccttcttccacgtgagctgcgacaacagcagcaagggcagcaccaagaagagagacgtggtggagacccaggtgggctacagctggctgcccctgctgaaggacggcagagtggtgaccagcgagcagcacatccccgtgagcgccaacctgcccagcggctacctgggctaccaggagctgggcatgggcagacactacggccccgagatcaagtgggtggacggcggcaagcccctgctgaagatcagcacccacctggtgagcaccgtgtacacccaggaccagcacctgcacaacttcttccagtactgccagaagaccgagagcggcgcccaggccctgggcaacgagctggtgaagtacctgaagagcctgcacgccatggagggccacgtgatgatcgccttcctgcccaccatcctgaaccagctgttcagagtgctgaccagagccacccaggaggaggtggccgtgaacgtgaccagagtgatcatccacgtggtggcccagtgccacgaggagggcctggagagccacctgagaagctacgtgaagtacgcctacaaggccgagccctacgtggccagcgagtacaagaccgtgcacgaggagctgaccaagagcatgaccaccatcctgaagcccagcgccgacttcctgaccagcaacaagctgctgaagtacagctggttcttcttcgacgtgctgatcaagagcatggcccagcacctgatcgagaacagcaaggtgaagctgctgagaaaccagagattccccgccagctaccaccacgccgtggagaccgtggtgaacatgctgatgccccacatcacccagaagttcagagacaaccccgaggccagcaagaacgccaaccacagcctggccgtgttcatcaagagatgcttcaccttcatggacagaggcttcgtgttcaagcagatcaacaactacatcagctgcttcgcccccggcgaccccaagaccctgttcgagtacaagttcgagttcctgagagtggtgtgcaaccacgagcactacatccccctgaacctgcccatgcccttcggcaagggcagaatccagagataccaggacctgcagctggactacagcctgaccgacgagttctgcagaaaccacttcctggtgggcctgctgctgagagaggtgggcaccgccctgcaggagttcagagaggtgagactgatcgccatcagcgtgctgaagaacctgctgatcaagcacagcttcgacgacagatacgccagcagaagccaccaggccagaatcgccaccctgtacctgcccctgttcggcctgctgatcgagaacgtgcagagaatcaacgtgagagacgtgagccccttccccgtgaacgccggcatgaccgtgaaggacgagagcctggccctgcccgccgtgaaccccctggtgaccccccagaagggcagcaccctggacaacagcctgcacaaggacctgctgggcgccatcagcggcatcgccagcccctacaccaccagcacccccaacatcaacagcgtgagaaacgccgacagcagaggcagcctgatcagcaccgacagcggcaacagcctgcccgagagaaacagcgagaagagcaacagcctggacaagcaccagcagagcagcaccctgggcaacagcgtggtgagatgcgacaagctggaccagagcgagatcaagagcctgctgatgtgcttcctgtacatcctgaagagcatgagcgacgacgccctgttcacctactggaacaaggccagcaccagcgagctgatggacttcttcaccatcagcgaggtgtgcctgcaccagttccagtacatgggcaagagatacatcgccagcctgaccaagtgcgtggccctgctgctgcccgcctggaacagaaacgacgcctgccagatcgccgccgccggccagcccggctag

SEQ ID NO: 293191 - DNA, 5592 bp, Artificial Sequence
  derived and/or modified sequence
gactgcttgtcacgaagatggtacagtgggagcctgtttcggaagagccaaggaagaggatgtggaaatggagtagagattgctaaaaaactgaacatccacaccttggggatgggttgcactactagtgtgattctgtttaaaggcatccgcaccgtttttgaaagaaactgtgcttatatgtgcaaacagcaaggagagaataatgcccttgaatatacagcatacaattggacaaaagaagattcagaactattgatctcctcctggctggcaaagccaaagctaattgagccactcgactatgaaaatgtcatcgtccagaagaagactcagatcctgaacgactgtttacgggagatgctgctcttcccttacgatgactttcagacggccatcctgagacgacagggtcgatacatatgctcaacagtgcctgcgaaggcggaagaggaagcacagagcttgtttgttacagagtgcatcaaaacctataactctgactggcatcttgtgaactataaatatgaagattactcaggagagtttcgacagcttccgaacaaagtggtcaagttggataaacttccagttcatgtctatgaagttgacgaggaggtcgacaaagatgaggatgctgcctcccttggttcccagaagggtgggatcaccaagcatggctggctgtacaaaggcaacatgaacagtgccatcagcgtgaccatgaggtcatttaagagacgatttttccacctgattcaacttggcgatggatcctataatttgaatttttataaagatgaaaagatctccaaagaaccaaaaggatcaatatttctggattcctgtatgggtgtcgttcagaacaacaaagtcaggcgttttgcttttgagctcaagatgcaggacaaaagtagttatctcttggcagcagacagtgaagtggaaatggaagaatggatcacaattctaaataagatcctccagctcaactttgaagctgcaatgcaagaaaagcgaaatggcgactctcacgaagatgatgaacaaagcaaattggaaggttctggttccggtttagatagctacctgccggaacttgccaagagtgcaagagaagcagaaatcaaactgaaaagtgaaagcagagtcaaacttttttatttggacccagatgcccagaagcttgacttctcatcagctgagccagaagtgaagtcatttgaagagaagtttggaaaaaggatccttgtcaagtgcaatgatttatctttcaatttgcaatgctgtgttgccgaaaatgaagaaggacccactacaaatgttgaacctttctttgttactctatccctgtttgacataaaatacaaccggaagatttctgccgatttccacgtagacctgaaccatttctcagtgaggcaaatgctcgccaccacgtccccggcgctgatgaatggcagtgggcagagcccatctgtcctcaagggcatccttcatgaagccgccatgcagtatccgaagcagggaatattttcagtcacttgtcctcatccagatatatttcttgtggccagaattgaaaaagtccttcaggggagcatcacacattgcgctgagccatatatgaaaagttcagactcttctaaggtggcccagaaggtgctgaagaatgccaagcaggcatgccaaagactaggacagtatagaatgccatttgcttgggcagcaaggacattgtttaaggatgcatctggaaatcttgacaaaaatgccagattttctgccatctacaggcaagacagcaataagctatccaatgatgacatgctcaagttacttgcagactttcggaaacctgagaagatggctaagctcccagtgattttaggcaatctagacattacaattgataatgtttcctcagacttccctaattatgttaattcatcatacattcccacaaaacaatttgaaacctgcagtaaaactcccatcacgtttgaagtggaggaatttgtgccctgcataccaaaacacactcagccttacaccatctacaccaatcacctttacgtttatcctaagtacttgaaatacgacagtcagaagtcttttgccaaggctagaaatattgcgatttgcattgaattcaaagattcagatgaggaagactctcagccccttaagtgcatttatggcagacctggtgggccagttttcacaagaagcgcctttgctgcagttttacaccatcaccaaaacccagaattttatgatgagattaaaatagagttgcccactcagctgcatgaaaagcaccacctgttgctcacattcttccatgtcagctgtgacaactcaagtaaaggaagcacgaagaagagggatgtcgttgaaacccaagttggctactcctggcttcccctcctgaaagacggaagggtggtgacaagcgagcagcacatcccggtctcggcgaaccttccttcgggctatcttggctaccaggagcttgggatgggcaggcattatggtccggaaattaaatgggtagatggaggcaagccactgctgaaaatttccactcatctggtttctacagtgtatactcaggatcagcatttacataattttttccagtactgtcagaaaaccgaatctggagcccaagccttaggaaacgaacttgtaaagtaccttaagagtctgcatgcgatggaaggccacgtgatgatcgccttcttgcccactatcctaaaccagctgttccgagtcctcaccagagccacacaggaagaagtcgcggttaacgtgactcgggtcattattcatgtggttgcccagtgccatgaggaaggattggagagccacttgaggtcatatgttaagtacgcgtataaggctgagccatatgttgcctctgaatacaagacagtgcatgaagaactgaccaaatccatgaccacgattctcaagccttctgccgatttcctcaccagcaacaaactactgaagtactcatggtttttctttgatgtactgatcaaatctatggctcagcatttgatagagaactccaaagttaagttgctgcgaaaccagagatttcctgcatcctatcatcatgcagtggaaaccgttgtaaatatgctgatgccacacatcactcagaagtttcgagataatccagaggcatctaagaacgcgaatcatagccttgctgtcttcatcaagagatgtttcaccttcatggacaggggctttgtcttcaagcagatcaacaactacattagctgttttgctcctggagacccaaagaccctctttgaatacaagtttgaatttctccgtgtagtgtgcaaccatgaacattatattccgttgaacttaccaatgccatttggaaaaggcaggattcaaagataccaagacctccagcttgactactcattaacagatgagttctgcagaaaccacttcttggtgggactgttactgagggaggtggggacagccctccaggagttccgggaggtccgtctgatcgccatcagtgtgctcaagaacctgctgataaagcattcttttgatgacagatatgcttcaaggagccatcaggcaaggatagccaccctctacctgcctctgtttggtctgctgattgaaaacgtccagcggatcaatgtgagggatgtgtcacccttccctgtgaacgcgggcatgactgtgaaggatgaatccctggctctaccagctgtgaatccgctggtgacgccgcagaagggaagcaccctggacaacagcctgcacaaggacctgctgggcgccatctccggcattgcttctccatatacaacctcaactccaaacatcaacagtgtgagaaatgctgattcgagaggatctctcataagcacagattcgggtaacagccttccagaaaggaatagtgagaagagcaattccctggataagcaccaacaaagtagcacattgggaaattccgtggttcgctgtgataaacttgaccagtctgagattaagagcctactgatgtgtttcctctacatcttaaagagcatgtctgatgatgctttgtttacatattggaacaaggcttcaacatctgaacttatggatttttttacaatatctgaagtctgcctgcaccagttccagtacatggggaagcgatacatagccagtttaacaaagtgtgtggctcttctccttcctgcttggaacaggaatgatgcatgccagattgcagcagctgggcagcctggataactctctcacttttaaccacagctatggccactcggacgcagatgttctgcaccagtcattacttgaagccaacattgctactgaggtttgcctgacagctctggacacgctttctctatttacattggcgtttaagaaccagctcctggccgaccatggacataatcctctcatgaaaaaagtttttgatgtctacctgtgttttcttcaaaaacatcagtctgaaacggctttaaaaaatgtcttcactgccttaaggtccttaatttataagtttccctcaacattctatgaagggagagcggacatgtgtgcggctctgtgttacgagattctcaagtgctgtaactccaagctgagctccatcaggacggaggcctcccagctgctctacttcctgatgaggaacaactttgattacactggaaagaagtcctttgtccggacacatttgcaagtcatcatatctgtcagccagctgatagcagacgttgttggcattgggggaaccagattccagcagtccctgtccatcatcaacaactgtgccaacagtgaccggcttattaagcacaccagcttctcctctgatgtgaaggacttaaccaaaaggatacgcacggtgctaatggccaccgcccagatgaaggagcatgagaacgacccagagatgctggtggacctccagtacagcctggccaaatcctatgccagcacgcccgagctcaggaagacgtggctcgacagcatggccaggatccatgtcaaaaatggcgatctctcagaggcagcaatgtgctatgtccacgtaacagccctagtggcagaatatctcacacggaaagaagcagtccagtgggagccgccccttctcccccacagccatagcgcctgcctgaggaggagccggggaggcgtgtttagacaaggatgcaccgccttcagggtcattaccccaaacatcgacgaggaggcctccatgatggaagacgtggggatgcaggatgtccatttcaacgaggatgtgctgatggagctccttgagcagtgcgcagatggactctggaaagccgagcgctacgagctcatcgccgacatctacaaacttatcatccccatttatgagaagcggagggattttgagaggctggcccatctgtatgacacgctgcaccgggcctacagcaaagtgaccgaggtcatgcactcgggccgcaggcttctggggacctacttccgggtagccttcttcgggcaggtgagcctcctgtccattctgcagactgtcctaagtccttt

SEQ ID NO: 293192 - DNA, 4182 bp, Artificial Sequence
  derived and/or modified sequence
atgggttgcaccacaagcgtgatcctgtttaaaggaattcgaacagttttcgaaagaaattgcgcctatatgtgcaaacagcaaggtgagaacaacgccctcgaatatactgcctacaattggaccaaggaggattctgagttgcttatctcaagctggctggctaagccaaaactgattgaaccactggactatgagaacgtgattgtgcagaagaaaacccaaatcttgaacgattgtttgagagaaatgctcctcttcccatacgatgatttccagactgctatcctgaggcgccaaggccggtacatatgttccacagtgcctgctaaggctgaagaggaggcccagtctctgttcgttacagagtgtatcaaaacttataactcagactggcacctggtgaattataaatatgaggattacagcggagagttcagacagctaccgaataaagtggtgaagcttgacaaacttcccgtccatgtctacgaagtcgatgaagaagttgataaagacgaagatgctgcttctctcgggtcacagaaaggcggaatcactaagcacgggtggctgtacaaaggcaacatgaattctgcgattagtgttaccatgcgctctttcaaacgtagattcttccacctcatccaactgggggatggatcttataacttaaatttttacaaagacgagaaaatctccaaggagcccaagggtagcatcttcctggattcctgtatgggtgtggtgcagaacaataaggttaggcggttcgcgttcgagttaaaaatgcaggacaagtcctcctacctcctggccgccgacagtgaagttgaaatggaagaatggataactatcctgaacaagattctgcagctcaactttgaggctgcaatgcaggaaaaacggaacggtgattcacacgaggacgacgagcaaagcaaactagaaggttctggctcaggtctggactcctacttacccgaattagctaagagtgctcgtgaagccgaaatcaagctgaagagcgagagccgggtgaaattattttacctggatccggatgcacagaagttggacttttcttccgcagaaccagaagtaaagtcgttcgaggagaaattcgggaaacgaattctcgtaaagtgcaatgatctgagtttcaatttgcaatgctgcgtggccgagaacgaagaagggcccaccacaaacgttgaacctttttttgtcacattaagtctgtttgacatcaagtacaacaggaaaatttcagccgactttcacgtggacttaaatcatttcagcgtgcgccagatgctggctactactagccccgcgttgatgaatgggtcaggacagagtccaagtgtcctcaaggggattttgcacgaggctgccatgcagtatcccaaacaaggtatcttcagtgttacatgcccacatccagatatattcctagtggctcggattgagaaggtgctgcagggctctataacccactgcgcggaaccctatatgaaaagctcagacagctctaaggttgcacagaaggtgttgaagaatgcaaagcaggcctgtcagcgtctgggtcagtacaggatgccattcgcgtgggccgcacgcaccctgttcaaagacgcctctggcaatcttgataagaatgctcgtttctcagctatctaccggcaggattcaaacaaactgagtaatgacgatatgctcaaactgttggctgactttcgaaaacccgaaaaaatggcgaagctgccagtcattctcggcaatttggatatcacaatagacaatgtctcttcagattttcctaactacgtgaacagctcctacattcctactaagcaattcgagacttgcagcaagactcccattacctttgaggtcgaagagttcgtgccttgtatccctaaacacactcaaccctacaccatatataccaaccatctatatgtgtaccccaaataccttaaatacgatagtcagaagtcgtttgccaaggcccggaatatcgcgatatgcatcgagttcaaggacagcgacgaggaggattcacagcctcttaagtgtatctacggcagacccggtggccctgtgttcacccggtccgcttttgcggcagtgctgcaccatcatcagaatccggaattttacgatgaaattaagatcgaactaccgacccaacttcacgagaagcaccaccttctgctcacgttctttcacgtgagctgcgataattcctcaaaaggctcaaccaaaaagcgagacgtggtggagactcaggtggggtatagttggctacctcttcttaaagacggccgggtcgtcacctccgagcagcacatcccggtgtcagccaatctcccttctggatatctgggctatcaggagctgggaatgggacgacactacggccctgaaataaagtgggtcgacggtggtaaacccttgctgaaaatctccacccacctggtcagcaccgtttatacccaggaccagcacctgcacaacttcttccaatactgccagaaaactgagtcaggtgcacaggcactgggcaacgagttggttaagtatctcaagtctctccatgccatggagggtcacgttatgattgcctttttgcccaccatcctgaaccaactgtttcgagttcttacgcgtgccacccaggaggaggttgctgtgaacgtgaccagagtcataatccatgtggtcgcccagtgccatgaagaaggcctggagagccacctccggtcctatgtcaagtacgcatacaaagctgagccgtatgttgccagtgagtacaaaacagtacatgaagaactcactaaaagtatgactactatactgaagccatcagcagacttcctgaccagtaacaaactactgaaatactcttggttcttcttcgacgtcttaattaagagcatggcacaacatctgattgaaaactctaaagttaaacttctgagaaaccagcgattcccagcctcttaccaccacgctgtggaaacagtggtgaatatgcttatgccacacatcacccagaagtttcgggacaatccagaagcctctaaaaacgccaaccacagcctggctgtgttcattaagaggtgcttcaccttcatggatcgtggatttgtgttcaaacagatcaataattatatctcatgttttgctcctggagatccgaaaaccctcttcgagtacaaattcgagtttcttcgggtggtgtgtaatcacgaacattacattccgctcaacctgccaatgccctttggtaaggggagaattcaacgatatcaggatttgcagctggattattcgttgaccgacgagttctgtcggaaccattttctcgttggactcctactgcgggaagtcggaacggctcttcaggagttcagggaggtccggctgatagccatctctgtcctgaagaacctactaatcaagcacagcttcgacgaccggtacgccagtcgatcccaccaggcccggattgcaactctttatctgcctctgtttgggctactcattgagaatgtccagagaataaacgtgagagacgtgagcccattccctgtgaacgcgggtatgacggttaaagacgagtcgctggccctgcccgctgtcaaccccctcgttactccgcaaaaagggagcacactagacaattcattgcataaggacctcctgggggccatcagtggaatagcatccccatatacaactagcacaccgaatataaacagcgtgcggaacgccgattcccgcggctcccttattagtactgactctgggaatagcctcccagaaaggaacagtgagaagtcaaattctctggataaacaccagcagtcctcaacgctggggaattcagtggtgcgctgcgacaagctggatcagtcagagatcaagtccctgctgatgtgtttcttatacatattaaagtcaatgtctgacgacgccttgtttacatattggaacaaagcatctactagcgaactaatggacttttttactataagtgaagtgtgtctgcatcagtttcagtacatggggaaaagatacatagcctcactaacgaaatgtgttgctctcctgctgccagcctggaacaggaatgatgcttgccagatcgctgccgccggtcaacctgggtag

SEQ ID NO: 293193 - DNA, 4182 bp, Artificial Sequence
  derived and/or modified sequence
atgggctgcaccaccagcgtcatcctcttcaagggcatcagaacagtgtttgaaagaaactgtgcctacatgtgcaagcagcagggcgagaacaatgccctggagtacacagcctacaactggaccaaggaggacagcgagctgctgatcagctcctggctggccaagcccaagctgattgagcccctggactatgaaaatgtgattgtgcagaagaagacccagatcctgaatgactgcctgcgggagatgctgctcttcccctatgatgacttccagacagccatcctgcggcggcagggccgctacatctgcagcacagtgcctgccaaggccgaggaggaggcccagagcctgtttgtgacagagtgcatcaagacctacaacagcgactggcacctggtgaactacaagtatgaggactacagcggggagttccggcagctgcccaacaaggtggtgaagctggacaagctgcctgtgcacgtgtatgaggtggatgaggaggtggacaaggatgaagatgctgccagcctgggcagccagaagggcggcatcaccaagcacggctggctgtacaagggcaacatgaacagcgccatctctgtgaccatgaggagcttcaagaggcgcttcttccacctgatccagctgggagatggcagctacaacctgaacttctacaaggatgagaagatcagcaaggagcccaagggcagcatcttcctggacagctgcatgggcgtggtgcagaacaacaaggtgagaagatttgcctttgagctgaagatgcaggacaagagcagctacctgctggccgctgacagcgaggtggagatggaggagtggatcaccatcctgaacaagatcctgcagctgaactttgaagctgccatgcaggagaagagaaatggagacagccatgaagatgatgagcagagcaagctggagggcagcggcagcggcctggacagctacctgcctgagctggccaagagcgcccgggaggccgagatcaagctgaagtctgagagccgggtgaagctgttctacctggaccctgatgcccagaagctggacttcagcagcgctgagcctgaggtgaagagctttgaggagaagtttgggaagaggatcctggtgaagtgcaatgacctgtccttcaacctgcagtgctgcgtggccgagaatgaggagggccccaccaccaacgtggagcccttctttgtgaccctgagcctgtttgacatcaagtacaacaggaagatctctgctgacttccacgtggacctgaaccacttctctgtgcggcagatgctggccaccaccagccctgccctgatgaatggaagtggccagagccccagcgtgctgaagggcatcctgcatgaagctgccatgcagtaccccaagcagggcatcttctctgtgacctgcccccacccagacatcttcctggtggcccgcatcgagaaggtgctgcagggcagcatcacccactgtgccgagccctacatgaagagcagtgacagcagcaaggtggcccagaaggtgctgaagaatgccaagcaggcctgccagaggctgggccagtacaggatgccctttgcctgggccgcccggaccctcttcaaggatgccagcggcaacctggacaagaatgcccgcttcagcgccatctaccggcaggacagcaacaagctgagcaatgatgacatgctgaagctgctggccgacttcaggaagccagagaagatggccaagctgcccgtcatcctgggcaacctggacatcaccatcgacaacgtgtccagtgacttccccaactacgtgaacagcagctacatccccaccaagcagtttgagacctgcagcaagacccccatcacctttgaggtggaggagtttgtgccctgcatccccaagcacacccagccctacaccatctacaccaaccacctgtatgtgtaccccaagtacctgaagtatgacagccagaagagctttgccaaggccagaaatattgccatctgcatcgagttcaaggacagtgatgaggaggacagccagcccctgaagtgcatctacggccggcctgggggccctgtgttcaccaggtctgcctttgctgctgtgctgcaccaccaccagaaccctgagttctatgatgagatcaagattgagctgcccacccagctgcacgagaagcaccacctgctgctgaccttcttccacgtgtcctgtgacaacagcagcaagggcagcaccaagaagagagatgtggtggagacccaggtgggctacagctggctgcccctgctgaaggatggccgggtggtgaccagcgagcagcacatccctgtgtctgccaacctgcccagcggctacctgggctaccaggagctgggcatgggccgccactacggccctgagatcaagtgggtggatggcggcaagcccctgctgaagatcagcacccacctggtgtccacagtgtacacccaggaccagcacctgcacaacttcttccagtactgccagaagacagaaagtggggcccaggccctgggcaatgagctggtgaagtacctgaagagcctgcacgccatggagggccacgtgatgattgccttcctgcccaccatcctgaaccagctgttccgggtgctgacccgggccacccaggaggaggtggccgtgaatgtgaccagggtcatcatccacgtggtggcccagtgccacgaggagggcctggagagccacctgcggagctatgtgaagtatgcctacaaggccgagccctacgtggccagcgagtacaagacagtgcatgaggagctgaccaagtccatgaccaccatcctgaagcccagcgctgacttcctgaccagcaacaagctgctgaagtacagctggttcttctttgatgtgctgatcaagtccatggcccagcacctgattgagaacagcaaggtgaagctgctgaggaaccagcgcttccctgccagctaccaccacgctgtggagaccgtggtgaacatgctgatgccccacatcacccagaagttccgggacaaccctgaggccagcaagaatgccaaccacagcctggccgtgttcatcaagcgctgcttcaccttcatggaccggggctttgtgttcaagcagatcaacaactacatcagctgctttgcccctggggaccccaagaccctgtttgagtacaagtttgagttcctgcgggtggtgtgcaaccacgagcactacatccccctgaacctgcccatgccctttgggaagggccgcatccagcgctaccaggacctgcagctggactacagcctgacagatgagttctgcaggaaccacttcctggtgggcctgctgctgcgggaggtgggcacagccctgcaggagttccgggaggtgcggctcatcgccatctctgtgctgaagaacctgctgatcaagcacagctttgatgacagatatgccagccgcagccaccaggccagaattgccaccctgtacctgcccctgtttggcctgctgattgaaaatgtgcagaggatcaacgtgagagatgtgagccccttccctgtgaatgccggcatgacagtgaaggatgagagcctggccctgcctgctgtgaaccccctggtgaccccccagaagggcagcaccctggacaacagcctgcacaaggacctgctgggcgccatcagcggcatcgccagcccctacaccaccagcacccccaacatcaacagcgtgagaaatgctgacagccggggcagcctcatcagcacagacagcggcaacagcctgcctgagagaaattctgagaagagcaacagcctggacaagcaccagcagagcagcaccctgggcaacagcgtggtgcgctgtgacaagctggaccagagcgagatcaagagcctgctgatgtgcttcctgtacatcctgaagtccatgtctgatgatgccctcttcacctactggaacaaggccagcaccagcgagctgatggacttcttcaccatcagcgaggtgtgcctgcaccagttccagtacatgggcaagcgctacatcgccagcctgaccaagtgtgtggccctgctgctgcctgcctggaacagaaatgatgcctgccagattgctgctgctggccagcccggctag

SEQ ID NO: 293194 - DNA, 4182 bp, Artificial Sequence
  derived and/or modified sequence
atgggctgcaccaccagcgtgatcctgttcaagggcatccggaccgtgttcgagcgcaactgtgcctacatgtgtaagcagcagggcgagaataacgctcttgaatacacggcctacaattggactaaagaggactccgagctgctcatttctagctggttggccaaacctaaattgattgaacctctcgactatgagaatgttattgttcagaaaaagactcagatcctcaacgactgccttcgggagatgctcctgttcccttatgatgacttccaaactgccattctaaggaggcaggggcggtacatctgttctactgtgcccgccaaggccgaggaagaagcccaatcccttttcgtgacggagtgtatcaaaacctataacagcgactggcacctggtcaattacaagtacgaggactatagcggcgaatttcgccagcttcctaacaaggtcgtgaaactggacaagcttccggtgcatgtctatgaggtggatgaagaggttgataaagatgaagatgctgcctcactgggatctcaaaagggtggcatcacaaaacacggttggctttacaaggggaatatgaactccgccatctccgtgaccatgcgctcttttaagcggcgctttttccacctgattcagttgggggatggctcttataatctgaatttttacaaggatgagaagatctctaaagagcctaagggaagtatcttcttggacagttgtatgggcgtggtccagaacaacaaggtgcgccggtttgcgttcgagctcaagatgcaggacaaatccagctatttgctcgcagccgattcagaagtggaaatggaagagtggattaccatactgaataagatactgcagctcaatttcgaggcagctatgcaggaaaagaggaatggcgacagccatgaagacgatgagcaatccaaactggagggcagtgggtctggcctagacagctatctccccgagctggcaaaaagcgcgcgagaggctgagatcaaactgaagagcgagtctagagtgaagctcttttacctggatcctgatgctcagaagctggactttagctccgccgaacccgaagtgaaaagcttcgaggagaagttcggcaaacgaatactggttaaatgcaatgatctgtcattcaaccttcagtgctgtgtggctgaaaatgaggagggacctaccaccaacgttgaaccatttttcgttacactgagccttttcgacataaagtacaacaggaagatatcagcagatttccatgtagatttgaatcacttctctgtgcgacaaatgctggctacgacaagccccgccttaatgaacggctccgggcaatcacccagcgtcttgaagggtatcctgcacgaagctgcgatgcagtatcccaagcagggtatcttcagcgtgacatgtccccaccccgatatcttccttgttgccaggatagagaaggtgctacagggctccattactcactgcgcggagccctatatgaagtccagcgactcttcgaaagtggctcagaaagtcctcaagaatgcaaaacaggcttgtcagagattaggccagtatcgtatgcccttcgcctgggccgccagaacactgtttaaggacgccagcggaaacctggataaaaacgcaagattcagcgccatctacaggcaggactctaacaagctttccaatgacgacatgctgaaacttttagctgactttcgtaagcctgagaagatggcaaagctcccggtcatcctgggcaacctggacatcacaattgacaacgtgtcttccgatttcccaaactacgtaaatagtagttatatccccaccaaacagttcgagacttgctctaagaccccaatcaccttcgaggtggaggaatttgttccctgcatcccaaaacacacacaaccttacaccatttacacaaaccatctgtatgtgtatccaaaatatctgaaatacgactctcaaaagagtttcgccaaggcacgcaatatagccatctgtattgagttcaaagactccgacgaggaagattcacagccactgaagtgtatctacggacgcccaggaggcccagtgttcaccaggagtgcattcgcagccgtgcttcaccaccatcagaatcccgaattctatgatgagatcaagattgagctgcctactcagctgcacgagaaacaccatctgttgctgaccttttttcacgtgtcatgcgacaatagtagcaagggttctactaaaaagcgggacgtggtggaaactcaggtgggctacagctggctgccactgctcaaggatggtcgcgttgtgacctcggagcaacatatccccgttagtgcaaacctcccaagtgggtacttaggctatcaagaactggggatggggcgtcactacgggccagaaatcaagtgggtggacggaggtaaacccctgctcaaaatatctactcatcttgtgtctacggtgtatacacaagaccagcacttgcataactttttccagtactgtcaaaaaaccgagtctggggctcaggccctgggaaacgagctcgttaagtacctaaaatctctgcacgccatggagggtcatgtgatgatcgcatttttacccactattttaaatcagttattcagagtgttaaccagagccactcaggaggaggtcgcagtgaatgtcacccgtgttatcatccatgtcgttgcccaatgccacgaggaaggtcttgagagtcatctgaggtcatacgttaaatatgcatacaaggcggagccgtacgtcgcttctgaatacaaaacggtacacgaagaactgaccaaaagtatgacaacaatcctgaagccttcagcagatttccttacatctaacaagttgctgaagtattcttggtttttctttgatgtattgatcaagtctatggcacaacacctgatcgagaactccaaggtcaaactgttgcgcaaccagaggttccctgcgtcctatcaccacgctgtggagactgtggttaatatgctcatgccccatataactcagaagttcagagataatcctgaagcgagtaaaaacgcgaatcatagcttggcagtgtttattaagcggtgctttacctttatggatcgaggattcgtcttcaagcagatcaacaactatatttcatgtttcgcccccggtgacccaaagaccctgtttgaatacaaatttgagttcctgagggtcgtatgcaaccatgaacactacatacccctgaatctgcctatgccatttggtaaaggtcggattcagaggtaccaggacctgcaattggactattcactgacagatgagttttgccgtaaccactttttagttggcttgcttctccgtgaagtggggaccgcccttcaggaatttcgcgaagtaagactgattgctatatccgtgctcaaaaacctcctcattaaacattcttttgacgaccgttacgcgtcgcgctcccaccaggctcggattgccactctctacttgcccctctttggcctgctgattgaaaacgtgcagaggatcaatgtgcgggacgtcagtccctttcccgtgaatgcagggatgactgttaaagacgagtctttggcattgcccgccgtgaatccgttggtgactccccaaaagggcagcactctggacaattcactccataaagaccttcttggcgccatcagtggcatcgcttccccttacaccactagcacccctaacatcaacagcgtcaggaatgctgactcaagggggagcctgatctccaccgattcaggcaacagcctcccagaacgcaattccgagaagtctaactctctggacaagcatcagcagtcatctactctggggaatagcgtcgtgcggtgcgataagctggaccagtctgagataaagtcactcctaatgtgcttcctatatattttgaagtctatgagtgatgatgccctcttcacgtattggaataaggctagcacctctgagttgatggacttcttcaccatcagcgaagtctgcctgcatcagttccagtacatgggtaaacggtacattgcgagtctcacaaagtgcgtcgccctccttctgcccgcatggaatcgcaacgatgcctgccagatagcagcagccgggcagccggggtag

SEQ ID NO: 293195 - DNA, 4182 bp, Artificial Sequence
  derived and/or modified sequence
atgggctgcaccacatccgttattctttttaaaggaatccgcaccgtgtttgaaaggaattgcgcatatatgtgtaaacaacagggtgagaacaatgcactcgagtatacagcctataactggaccaaggaggattctgagctgttgattagttcttggctggccaaacctaagctgatagagccactggactacgagaacgtgattgttcagaaaaagacccagattctgaatgattgccttcgggagatgctgctttttccctacgatgacttccaaaccgcaatcctccgaagacagggcagatatatctgcagtacggtgccagcgaaggctgaagaggaagctcaaagcctgttcgtaacagagtgcatcaagacctacaattccgactggcacctggtcaactataagtacgaagactactcaggagagttccggcaactgcctaataaggtcgtgaaactggacaaattaccagtccacgtgtatgaggtcgacgaggaagtcgataaggatgaggatgctgcgtctctgggctcccagaaaggtggcataactaagcatggatggctatacaaaggaaacatgaactcagcaatatctgtaacgatgcggtccttcaagcgcaggttctttcatttgattcagttgggcgatggatcttacaacctcaatttttacaaagatgaaaagatctccaaagagccgaagggcagcatttttcttgattcatgtatgggggtcgtccagaataataaagtcaggcgatttgcttttgagctgaagatgcaggacaagtccagctacttactcgcagcggattctgaggtggaaatggaagaatggatcaccatcttgaacaagatcttgcagcttaactttgaagcagccatgcaggaaaagaggaacggagactcccatgaggacgatgaacaaagtaaactggagggcagcggaagtggactcgattcctacttgcccgagctggccaagtccgcccgagaggcagagatcaagctgaagtctgaatccagagtaaagctcttctatttggatccagacgcccaaaagctggatttctcttccgccgaacccgaggtgaagagtttcgaggagaagtttgggaagagaattctagtcaagtgtaacgacctcagctttaacttacaatgctgcgtagcagagaatgaagaagggccaactactaacgtggaaccgtttttcgttactttgtcccttttcgacattaagtacaatcggaagatttctgcggatttccacgtggacttgaaccacttttctgtccgccagatgcttgccacgacgtcacccgctctcatgaatggaagtggtcaatctccctctgtgctaaaagggattctgcatgaggccgctatgcagtatcccaaacaagggatcttttccgttacctgtccacatccggatatatttttggtagccaggatcgagaaggttttgcaggggtccatcacacattgtgcagaaccctacatgaaaagctctgactcaagtaaggtggcccagaaggtgctcaagaacgcgaaacaagcatgtcagcgtctcggtcagtatcgtatgccgttcgcatgggccgctaggacactattcaaggacgccagtgggaatttggataagaatgctcgcttttccgctatttacagacaggactctaacaagctatctaacgacgatatgctgaagctcctggccgacttcagaaagcccgagaagatggctaaactgcctgtgatactgggcaatctcgatatcaccatcgacaacgtgtcaagtgacttcccaaattatgtgaattcgagttacatcccgaccaagcaatttgagacatgctccaaaacacccatcacgttcgaggtcgaggagtttgtgccctgtatccccaagcacacacagccttacaccatctatacaaaccacctgtacgtataccctaaatacctgaagtacgacagccagaagtcttttgcaaaagccaggaacatcgctatttgcattgaattcaaggacagtgatgaagaggactcacagccgctgaagtgtatctacgggcgaccagggggtcctgtgttcactagaagcgcattcgccgcagtgttgcaccaccaccagaacccagagttctatgacgagataaagattgaattgccaactcagctccatgagaaacaccacctgctcctcacatttttccatgtcagttgcgataatagctctaaagggtctactaagaaaagagacgttgtggagactcaggtcggatactcctggttaccacttttgaaggatggcagggtggtcacctctgagcagcacatcccagtctcagccaacttgccttctggctatttgggctatcaggaactgggcatgggcaggcactatggacccgaaattaaatgggtggacggcggaaagccactgctaaaaatatcgacacatttggtctctactgtctatacacaggatcagcatctacataacttctttcaatactgtcagaaaacggagagcggagctcaggccctggggaatgaacttgtgaagtacctgaagagcctgcatgcaatggaagggcacgtgatgatcgctttcctccctactatcctgaaccagctgtttcgcgtactgactcgggctacccaggaagaggtggcagttaacgtcacaagggttatcattcacgtcgtagcccaatgccacgaggaagggttagagtcccacctcaggtcatacgtgaaatatgcctataaagcagagccgtatgtggctagcgagtataagactgttcacgaagaactaacgaagtccatgacaaccatcttgaaacccagcgcagatttccttacctctaataaactacttaaatactcctggttctttttcgacgtacttattaagtcaatggctcaacatctcattgagaattctaaggtgaagctactccgcaaccagcgatttcccgcaagttaccaccacgccgtggagacagtagttaatatgttgatgcctcacatcacacagaagtttcgcgacaaccccgaggcttccaagaatgctaaccattctctcgctgtcttcattaaaagatgcttcacatttatggaccgcggattcgtgtttaagcagatcaataactacatctcgtgctttgcaccgggagaccctaagaccctgtttgagtataaatttgagttcctgagagtagtctgtaaccacgagcattacataccactgaatctgccaatgccattcggcaagggccgaatccagaggtaccaggaccttcagctggattattccctcaccgatgagttttgtagaaatcattttctcgtcggcctgttacttcgcgaggtgggtactgccctccaggaatttagagaagtgcgactgattgcaatctctgtattgaaaaacctcctaattaagcattcatttgacgacaggtacgctagcagaagtcaccaggctcggatcgcaactctttacttgcccctgtttggcctcctgatcgaaaacgttcagaggattaacgtcagggatgtgtcccccttccctgtgaacgcagggatgactgttaaagacgagagcctggccctgcccgcagtgaatccactggtaacgccccaaaaggggtcgacactggacaatagcctgcacaaagatctgctgggcgctatctctggcatcgcctccccttataccacgtccacccccaatattaatagtgttcggaatgccgattcccggggaagtctgatctcaactgactcaggaaatagcctacctgagcggaactccgagaagtccaactctctggataagcaccagcaatcgtcgacacttggcaacagcgttgtcagatgcgacaaactcgatcagtcggaaatcaagagcctcttgatgtgctttctctacatccttaagtccatgagcgacgacgccctgtttacatactggaacaaagcctctacgtccgagttaatggactttttcaccatttctgaggtgtgtctccaccagtttcagtacatggggaaacgttatattgcatccctgaccaaatgtgtcgccctgttactaccggcatggaacagaaacgatgcctgccaaattgctgctgcagggcagccgggatag

SEQ ID NO: 293196 - protein, 168 aa, Artificial Sequence
  derived and/or modified sequence
MPATRKPMRYGHTEGHTEVCFDDSGSFIVTCGSDGDVRIWEDLDDDDPKFINVGEKAYSCALKSGKLVTAVSNNTIQVHTFPEGVPDGILTRFTTNANHVVFNGDGTKIAAGSSDFLVKIVDVMDSSQQKTFRGHDAPVLSLSFDPKDIFLASASCDGSVRVWQISDQ

SEQ ID NO: 293197 - DNA, 507 bp, Artificial Sequence
  derived and/or modified sequence
atgcccgccaccagaaagcccatgagatacggccacaccgagggccacaccgaggtgtgcttcgacgacagcggcagcttcatcgtgacctgcggcagcgacggcgacgtgagaatctgggaggacctggacgacgacgaccccaagttcatcaacgtgggcgagaaggcctacagctgcgccctgaagagcggcaagctggtgaccgccgtgagcaacaacaccatccaggtgcacaccttccccgagggcgtgcccgacggcatcctgaccagattcaccaccaacgccaaccacgtggtgttcaacggcgacggcaccaagatcgccgccggcagcagcgacttcctggtgaagatcgtggacgtgatggacagcagccagcagaagaccttcagaggccacgacgcccccgtgctgagcctgagcttcgaccccaaggacatcttcctggccagcgccagctgcgacggcagcgtgagagtgtggcagatcagcgaccagtag

SEQ ID NO: 293198 - DNA, 507 bp, Artificial Sequence
  derived and/or modified sequence
atgcccgcgacgagaaagcctatgcgctacggacacaccgagggccatacagaagtgtgttttgacgacagtggcagcttcatcgtcacctgcggttccgacggcgatgtcaggatctgggaagatctggacgacgatgatccaaaatttattaatgtgggagaaaaagcgtacagctgcgcacttaaatccggcaaactggtgactgctgtgtcaaataatactatacaggtccacacatttcccgagggggtgccggatggtatcctgactaggttcaccacaaacgctaaccatgttgtatttaatggcgacgggacaaagatagcagcaggatcttccgattttctcgtaaaaattgtcgacgtaatggattcttctcagcagaagaccttccgggggcatgacgcccccgtgctgtctctgtccttcgaccccaaagacatatttctggcatcggcgagctgtgacgggtctgttcgcgtttggcagattagtgaccagtag

SEQ ID NO: 293199 - DNA, 507 bp, Artificial Sequence
  derived and/or modified sequence
atgcctgccaccaggaagcccatgagatatggccacacagagggccacacagaggtgtgctttgatgacagcggcagcttcatcgtgacctgtggcagtgatggagatgtgcgcatctgggaggacctggatgatgatgaccccaagttcatcaacgtgggggagaaggcctacagctgtgccctgaagagcggcaagctggtgacagctgtgagcaacaacaccatccaggtgcacaccttccctgagggcgtgcctgatggcatcctgacccgcttcaccaccaatgccaaccacgtggtgttcaatggagatggcaccaagattgctgctggcagcagtgacttcctggtgaagatcgtggatgtgatggacagcagccagcagaagaccttccggggccatgatgcccctgtgctgagcctgagctttgaccccaaggacatcttcctggccagcgccagctgtgatggctctgtgcgggtgtggcagatcagtgaccagtag

SEQ ID NO: 293200 - DNA, 507 bp, Artificial Sequence
  derived and/or modified sequence
atgcccgccacccggaagcccatgcggtacggccacaccgagggccacaccgaggtgtgcttcgacgacagcggctcattcatcgtgacatgcggctccgacggtgatgtgcggatctgggaagaccttgatgatgacgaccccaaatttattaacgtgggggaaaaagcgtattcttgtgctcttaagtccgggaagctagtgaccgcagtgtccaacaacacgatccaagtccacacctttccggaaggcgtgccagacgggattttgacgcgctttacaactaatgctaatcatgtggtgtttaacggagacggaactaagatcgcagctggctcctctgactttctggtcaaaattgtggacgtgatggactcctctcagcagaaaacgtttcgcggccacgacgcaccagtactttctcttagctttgacccgaaagacatttttcttgcctccgcttcatgcgatgggagtgtgagagtgtggcagataagcgatcagtag

SEQ ID NO: 293201 - DNA, 801 bp, Artificial Sequence
  derived and/or modified sequence
aggcgcagtgtggtgagcgagccgaagcgcgggaagcagctcttgtggatcctcagtggcggaggctcggtcacccggttttattgtgacttgtggaagtgatggtgatgtgaggatttgggaagacttggatgatgatgatcctaagttcattaatgttggagaaaaggcatattcatgtgctttgaagagtggaaaactggtcactgcagtttctaataatactattcaagtccacacatttcctgaaggagttccagatggtatattgactcgcttcactacaaatgcaaaccatgtggtctttaatggggatggtactaaaattgctgctggatctagtgattttctagtcaaaattgtggatgtgatggatagcagccaacagaaaacatttcgaggacatgatgcccctgttttaagtctttcctttgatcctaaggacatctttctggcatcagctagttgtgatggatctgtcagagtgtggcaaatttcagatcagacatgtgctattagttggccactgctacaaaaatgcaacgatgtgataaatgcaaaatcaatctgcagacttgcttggcagccaaaaagtgggaagttactggcaattcctgtggaaaaatctgttaagctatatagaagagaatcttggagtcatcaatttgatctttcagataatttcatctctcagaccctcaatatagtaacctggtctccctgtgggcaatatttagctgcaggtagtattaatggtctaatcatagtttggaatgtggaaaccaaagactgcatggaaag

SEQ ID NO: 293202 - DNA, 507 bp, Artificial Sequence
  derived and/or modified sequence
atgcctgccacccggaagccaatgagatacgggcacacggagggccacacagaagtgtgtttcgacgattccggctcgttcatcgtgacgtgcgggagcgacggagacgttagaatttgggaggacttggacgatgacgatccaaaatttattaatgtgggagagaaggcatattcatgtgccctgaaatctggcaagctcgtcacagccgtatctaacaacacaattcaggtgcatacattccctgagggagttccggatgggatcctcacacggttcacgaccaacgcaaatcacgtggtatttaatggtgatggcaccaaaatcgcggcaggctctagtgactttctggtgaaaatcgtggatgtgatggactcaagtcagcaaaaaacattccgaggtcacgatgctcccgttttgagcctgtcttttgatcctaaagacatcttcctggcctctgcctcttgcgatgggtccgttagggtctggcagattagtgatcagtag

SEQ ID NO: 293203 - DNA, 768 bp, Artificial Sequence
  derived and/or modified sequence
agtggcggaggctcggtcacccgggtgagtccccactccggctgcccgcgtccaccaaggagatgcgtgttccctttccggcttattgtctgacagaccctctgccttatcccgctggtgtcactcgggtgggggaaaccgggctgcggagaacgggccctagaggagactaagctctcttcctatccctagcctcgctgcttttctcttttgaaataataagactggcttttataaaacattttcagataggtaaaggaaaacatgcctgccacacggaagccaatgagatatgggcatacagagggacacacggaggtctgttttgatgattctgggagttttattgtgacttgtggaagtgatggtgatgtgaggatttgggaagacttggatgatgatgatcctaagttcattaatgttggagaaaaggcatattcatgtgctttgaagagtggaaaactggtcactgcagtttctaataatactattcaagtccacacatttcctgaaggagttccagatggtatattgactcgcttcactacaaatgcaaaccatgtggtctttaatggggatggtactaaaattgctgctggatctagtgattttctagtcaaaattgtggatgtgatggatagcagccaacagaaaacatttcgaggacatgatgcccctgttttaagtctttcctttgatcctaaggacatctttctggcatcagctagttgtgatggatctgtcagagtgtggcaaatttcagatcag

SEQ ID NO: 293204 - protein, 846 aa, Artificial Sequence
  derived and/or modified sequence
MEAPLRPAADILRRNPQQDYELVQRVGSGTYGDVYKARNVHTGELAAVKIIKLEPGDDFSLIQQEIFMVKECKHCNIVAYFGSYLSREKLWICMEYCGGGSLQDIYHVTGPLSELQIAYVCRETLQGLAYLHTKGKMHRDIKGANILLTDHGDVKLADFGVAAKITATIAKRKSFIGTPYWMAPEVAAVEKNGGYNQLCDIWAVGITAIELGELQPPMFDLHPMRALFLMSKSNFQPPKLKDKTKWSSTFHNFVKIALTKNPKKRPTAERLLTHTFVAQPGLSRALAVELLDKVNNPDNHAHYTEADDDDFEPHAIIRHTIRSTNRNARAERTASEINFDKLQFEPPLRKETEARDEMGLSSDPNFMLQWNPFVDGANTGKSTSKRAIPPPLPPKPRISSYPEDNFPDEEKASTIKHCPDSESRAPQILRRQSSPSCGPVAETSSIGNGDGISKLMSENTEGSAQAPQLPRKKDKRDFPKPAINGLPPTPKVLMGACFSKVFDGCPLKINCATSWIHPDTKDQYIIFGTEDGIYTLNLNELHEATMEQLFPRKCTWLYVINNTLMSLSVGKTFQLYSHNLIALFEHAKKPGLAAHIQTHRFPDRILPRKFALTTKIPDTKGCHKCCIVRNPYTGHKYLCGALQSGIVLLQWYEPMQKFMLIKHFDFPLPSPLNVFEMLVIPEQEYPMVCVAISKGTESNQVVQFETINLNSASSWFTEIGAGSQQLDSIHVTQLERDTVLVCLDKFVKIVNLQGKLKSSKKLASELSFDFRIESVVCLQDSVLAFWKHGMQGKSFKSDEVTQEISDETRVFRLLGSDRVVVLESRPTENPTAHSNLYILAGHENSY

SEQ ID NO: 293205 - DNA, 2541 bp, Artificial Sequence
  derived and/or modified sequence
atggaagctcctttacggccagccgccgacattctcagaaggaatccgcagcaggattacgagctggtccagcgcgttggctcagggacctatggtgacgtctacaaggctaggaatgtccacacaggtgagctggccgcagtaaaaatcataaagctggaacccggagatgatttctcccttatacagcaggaaatctttatggttaaagagtgtaagcactgtaatatcgtggcttattttggctcctacctgtctcgcgagaaactctggatctgtatggaatactgcggtggtggcagcctccaggacatctaccacgtgaccgggccgctctcggaactgcaaattgcctatgtctgccgcgaaactcttcagggtttggcatatctccataccaagggcaagatgcacagggacatcaagggcgccaacatcctgttgaccgaccatggagacgtgaaactggccgacttcggagtcgccgcaaagataactgctacaatcgccaagcggaagtctttcattggcaccccctattggatggcgcctgaggtcgcagcagtggagaaaaatggggggtataaccaactgtgtgacatctgggctgtcggaattaccgccattgagcttggcgaacttcagcccccgatgtttgatctgcatcctatgcgggcattgttcctgatgtccaaatctaactttcagccaccaaagctaaaggataagaccaaatggtcatccacctttcataacttcgtaaagattgcccttaccaagaaccctaagaagagaccaactgctgagcgtttactcactcacacgttcgtggctcagccgggcttgagcagggcgttggcggtggagctgctggataaggtaaacaatccagacaatcatgctcattacacagaggcagatgacgatgacttcgaaccacacgcgattatccgacacacaatacgctcgactaaccggaacgcacgtgccgagagaactgcttccgagatcaattttgacaaattgcagttcgaaccccccttgagaaaggagacggaggcaagggacgaaatgggactgagctctgacccaaactttatgcttcagtggaacccttttgtggacggtgcaaatactgggaagagcacaagcaagcgggctatcccacccccactgccaccaaagccacgtattagctcttaccccgaggacaattttccagatgaggagaaagcctccacgatcaagcattgtccggattccgagagcagggcccctcaaattctgagaaggcagtcttctccttcctgtggccccgtggcagaaacatcatccattggaaacggtgacggcatctctaaacttatgtctgaaaatactgagggaagtgcccaggcaccgcagctgcccagaaagaaggataaacgggattttcccaagcctgccattaatggtctacctccaacacctaaggttctcatgggggcctgtttttcaaaagtgttcgatggatgccccttaaaaattaattgcgccacctcatggattcaccctgataccaaagatcaatatatcatcttcgggacagaggatggtatttataccctaaatctgaacgaacttcacgaggccaccatggagcagctctttccaagaaagtgcacatggttgtacgttataaataatactctgatgagtttatcagtgggaaagacattccaactctattcccataatctcattgccctgtttgaacacgccaaaaagcccgggctggcagcacatatacagacccaccgcttccctgatcgcatcctgcccaggaaatttgccctgaccactaagatccctgatactaagggctgccataagtgttgtattgttcgaaatccatataccggtcacaaatacttatgcggggccttgcagagtgggatcgtgcttttgcagtggtacgaacccatgcaaaagtttatgttgataaagcactttgatttcccccttcccagtcccctgaatgtgtttgaaatgctggttatacctgaacaagaatatcccatggtctgcgttgcaatttctaaaggtaccgagtctaaccaggtcgttcagttcgaaactatcaacctgaactctgcgagtagttggttcaccgagatcggagcagggtcccagcagctcgacagcatacacgtgacacagcttgaacgcgacactgtcctcgtgtgtcttgacaagttcgtgaaaatcgtcaacctgcaagggaaattgaaatcaagcaagaagttggccagtgagctcagcttcgatttcagaatcgagagtgtggtttgtcttcaggactctgtactcgccttctggaaacacggaatgcaaggaaaatcattcaagagtgacgaggtcacacaggaaatcagcgacgagaccagggtctttcgactgcttggcagcgaccgcgtggtggttctggagagccgaccgaccgaaaaccccacagcccactcaaatctgtacattctggcaggccacgagaatagttattag

SEQ ID NO: 293206 - DNA, 2541 bp, Artificial Sequence
  derived and/or modified sequence
atggaggcccccctgcggcctgctgctgacatcctgcggaggaacccccagcaggactatgagctggtgcagagggtgggcagcggcacctatggagatgtgtacaaggccagaaatgtgcacactggagagctggccgctgtgaagatcatcaagctggagcctggagatgacttcagcctcatccagcaggagatcttcatggtgaaggagtgcaagcactgcaacatcgtggcctacttcggcagctacctgagccgggagaagctgtggatctgcatggagtactgcggcggcggcagcctgcaggacatctaccacgtgacaggccccctgtctgagctgcagatcgcctacgtgtgccgggagaccctgcagggcctggcctacctgcacaccaagggcaagatgcaccgggacatcaagggggccaacatcctgctgacagaccatggagatgtgaagctggccgactttggagtggccgccaagatcacagccaccatcgccaagaggaagagcttcatcggcaccccctactggatggcccctgaggtggccgctgtggagaagaatggaggctacaaccagctgtgtgacatctgggccgtgggcatcacagccatcgagctgggggagctgcagccccccatgtttgacctgcaccccatgagggccctcttcctgatgagcaagagcaacttccagccccccaagctgaaggacaagaccaagtggagcagcaccttccacaactttgtgaagatcgccctgaccaagaaccccaagaagaggcccacagctgagcggctgctgacccacacctttgtggcccagcccggcctgagccgggccctggccgtggagctgctggacaaggtgaacaacccagacaaccacgcccactacacagaagcagatgatgatgactttgagccccacgccatcatccgccacaccatccgcagcaccaacagaaatgcccgggcagagaggacagccagcgagatcaactttgacaagctgcagtttgagccccccctgaggaaggagacagaggccagagatgagatgggcctgagcagtgaccccaacttcatgctgcagtggaacccctttgtggatggagccaacacaggcaagagcaccagcaagagggccatccccccacccctgccccccaagccccgcatcagcagctacccagaggacaacttcccagatgaggagaaggccagcaccatcaagcactgcccagattctgagagccgggccccccagatcctgcggcggcagagcagccccagctgtggccctgtggccgagaccagcagcattggaaatggagatggcatcagcaagctgatgtctgagaacacagagggcagcgcccaggccccccagctgcccaggaagaaggacaagagggacttccccaagccagccatcaatggcctgccccccacccccaaggtgctgatgggcgcctgcttcagcaaggtgtttgatggctgccccctgaagatcaactgtgccacctcctggatccacccagacaccaaggaccagtacatcatctttggaacagaagatggcatctacaccctgaacctgaatgagctgcacgaggccaccatggagcagctgttccccaggaagtgcacctggctgtatgtgatcaacaacaccctgatgagcctgtctgtgggcaagaccttccagctgtacagccacaacctgattgccctgtttgagcacgccaagaagccaggcctggccgcccacatccagacccaccgcttcccagaccgcatcctgcccaggaagtttgccctgaccaccaagatcccagacaccaagggctgccacaagtgctgcatcgtgaggaacccctacacaggccacaagtacctgtgtggggccctgcagagcggcatcgtgctgctgcagtggtatgagcccatgcagaagttcatgctgatcaagcactttgacttccccctgcccagccccctgaatgtgtttgagatgctggtgattcctgagcaggagtaccccatggtgtgtgtggccatcagcaagggcacagagagcaaccaggtggtgcagtttgagaccatcaacctgaacagcgccagctcctggttcacagaaattggagctggcagccagcagctggacagcatccacgtgacccagctggagcgggacacagtgctggtgtgcctggacaagtttgtgaagatcgtgaacctgcagggcaagctgaagagcagcaagaagctggccagcgagctgagctttgacttccgcatcgagagcgtggtgtgcctgcaggacagcgtgctggccttctggaagcacggcatgcagggcaagagcttcaagagtgatgaggtgacccaggagatcagtgatgagaccagggtcttccggctgctgggcagtgacagagtggtggtgctggagagccggcccacagagaaccccacagcccacagcaacctgtacatcctggccggccatgaaaattcctactag

SEQ ID NO: 293207 - DNA, 4354 bp, Artificial Sequence
  derived and/or modified sequence
gggtggggaacgtggtgcggcggcggcggcggcggcgactgtacgcgcctccgccgcccccgagaggacgcgccgtgcagcggctgagtggcggcggcggcgacggcaaacccggagctgccggccggcgcgcgggaggaggacgcgggtgcggtctaggaagtaggtcccgggctccgcgctcaacaaagacggggccgcccccattagacggagctgcgggcggaggctccatgttgggaagcggcgccgttcgtgcttgttagcgggaatccgggagccgcggggtgagctggcgggggccgggccctaagtgaagatggaggccccgctgcggcctgccgcggacatcctgaggcggaacccgcagcaggactacgaactcgtccagagggtcggcagcggcacctacggggacgtctataaggccagaaatgtacacacaggagagctggctgcagtaaaaatcattaaattggagcctggagatgatttttctttgattcaacaagaaatatttatggttaaagaatgtaaacattgtaacatcgttgcctactttgggagttatcttagtcgggaaaaactatggatttgtatggaatactgtggtggcggatcacttcaagatatttaccatgttactggaccattatcagaattgcaaatagcctatgtatgcagagaaaccttacagggtcttgcctatttgcatactaaaggcaaaatgcatagagatatcaaaggtgctaatattttattgacagaccatggcgatgtaaaattagctgactttggtgtggctgcaaaaataacagctaccattgcaaaacgaaaatctttcattggcaccccttactggatggccccagaagttgcagcagtagagaagaatggtggctacaaccaactctgtgatatctgggcagtaggaataacagcaattgaacttggagaacttcagccacctatgtttgatctccacccaatgagggctctcttcttaatgtcaaaaagtaattttcagcctccaaaactaaaggacaaaacaaaatggtcatcaacattccataattttgtcaaaatagcactaaccaaaaacccaaaaaaaagaccaactgctgaaagacttctgactcacacttttgttgcacagccaggtctctctagagccctagcagttgaactgttagacaaagtgaacaatccagataaccacgcacattacactgaagcagatgacgatgactttgagccccatgcaatcattcgtcataccattagatctacaaacaggaatgccagagctgaacggacagcttcagaaataaattttgacaaattacaatttgaacctcctctgagaaaagaaacagaagcacgagatgaaatgggattgtcatcagacccaaatttcatgttacagtggaatccttttgttgatggtgcaaatactggcaaatcaacctcaaaacgtgcaataccacctcccctacctcctaagccaaggataagcagttaccctgaagacaactttccggatgaagaaaaagcatcaaccataaaacattgtcctgattcagaaagcagagctccccaaattctcagaagacagagtagcccaagttgtgggcctgtggcagagacttcttctattggaaatggtgatggtatttcaaaactgatgagtgaaaatacagaaggatcagcacaagcaccacagttaccacgaaaaaaggacaaacgagacttccctaaaccagccatcaatggccttccacccaccccaaaagttctgatgggagcatgcttttcaaaagtttttgatggctgtcctttgaaaattaattgtgcaacatcctggatacatcctgatacaaaagatcagtacattatttttggaactgaagatggtatttacacactgaatctcaatgagctacatgaggcaacgatggaacagttatttccacggaagtgtacttggctgtatgttatcaataatactttaatgtcattatcagtaggaaaaacctttcagctctactctcacaatcttatagctttgtttgaacatgccaaaaaaccaggattagctgcccatattcaaactcacaggtttccagaccgaatactaccaagaaaattcgctttaacaacaaagattcctgatacaaaaggctgccacaaatgttgcatagtcagaaacccttacacgggacataaatacctctgtggagctttacagtctggaattgttttacttcagtggtatgagccaatgcagaaattcatgttgataaagcactttgattttcctttgccaagtcctttgaatgtttttgaaatgctggtgatacctgaacaggaataccctatggtctgtgtagctattagcaaaggcactgaatcgaatcaggtagttcagtttgagacaatcaatttgaactctgcatcttcatggtttacagaaattggtgcaggcagccagcagttagattccattcatgtaacacagttggagagagataccgttttagtgtgtttagacaaatttgtgaaaattgtaaatctacaaggaaaattaaaatcaagtaagaaactggcctctgagttaagttttgattttcgcattgaatctgtagtatgccttcaagacagtgtgttggctttctggaaacatgggatgcagggtaaaagcttcaagtcagatgaggttacccaggagatttcagatgaaacaagagttttccgcttattaggatcagacagggttgtcgttttggaaagtaggccaacagaaaatcctactgcacacagcaatctctacatcttggctggacatgaaaatagttactaagcaacagaaactgatctcaaatgacaggaaaatgaatatactccattgaaaggaaaaataaggaaattcaatacaaactgcactatgatttgctttaactattatgggttatattgcaaatgatctgtactttagggtagaattcaatattttctgcagctggaaacagctagtctatctcttgccactgtgtggtggttatatcaagtttgcttaataaaagctatgagacaaatagtcctctagttccaggaaacacagtctttttttaaaaaaaacaatgtttgtaacaagggtgccatggtatttttagataactcgtgattatcttaagagaggtaaatttagtgatcattttatatcatgtcttattccttcttaatgaacataatttgttaaattctcaagcaaggttttcacttttatattggccattctgtatgtttttgtaaaacagaatatttaatccttatttattaatctcttgctggagtggtgtaatgtatctaacttttagcaaaggagggttgcagagcagcttaaattttttttataatgtataagaattttgtttatcttttaagagtagtaaagtactttgagtgtttgggggttcaacacacacatgcaattttgcttaacaaaagtattttataatacagtttcatacagaattaccttaaaagggagtcttatgttttcaactacagatagttgtaagggatcatacagaagatattgatgatagttgaaatattcttagaaggggtgtgtatgtctagctgtgtctaccatgtgtatgtattcttgacaagcagtataaaatacctgtgatttttctttacattagggataatgcataaggaattaatcttcatatatattatcatccctaatgtagcagggggaagtatttaattgcccatgatatgtattttacttatactatgccagagaggaaactataaagtaattacacatgtaatcttgggtttttcacatatgtaggtattcattttgagtaggttgaagaagaaaaaaaatatttaaatgaattgaattcctgatgggatagtatcaataagtatttaaaagccagtattctaaaaataataaagggtagggtcatttttgagtttgtttttcttttgctattgttaatattcaaaattaaagtgttacattggtacctgttgtcttaatgcatttattgagaacagcattgagatgatgaacaaggggttagcaatagcaaactctataattattttgactaattacttaagaggaaaacagtataagtatctcattcagtatttagcaattctgtaaaataagtattatctctatttttcagatgaggaagtaagggtttagcaaggttaagagatctatccaatttacacagcaagttagtagttgagcctgaccatgagtcttctgactctgttcttttcactatgcaatacgcaaacaataaaatgttatacaaat

SEQ ID NO: 293208 - DNA, 2541 bp, Artificial Sequence
  derived and/or modified sequence
atggaggcccccctgcggcccgccgccgacatcctgcggcggaacccacaacaagattacgagcttgttcagagagtcggctcaggtacatatggagacgtgtacaaggccaggaatgtgcacactggcgagcttgctgcagtcaaaatcattaagctcgagcccggcgacgacttctccctgatacagcaagagatatttatggttaaagagtgcaagcattgcaacatcgtggcctatttcggaagctacttgtcgagggagaaactgtggatttgcatggaatactgcggaggcggttcccttcaagacatctaccatgtgacaggaccactgagcgagcttcagatcgcctacgtgtgtcgggagaccctgcagggcctcgcctatctgcacacaaagggcaaaatgcaccgggatatcaagggagcaaatattctgctgactgaccacggggacgtgaagctagcagactttggggttgcagcaaagatcaccgccacgattgccaagcggaaaagtttcatcggaactccttactggatggctccagaagtcgcagctgttgaaaagaatggggggtataatcaattgtgtgacatatgggccgtaggtattactgccatcgaactcggggagctgcagcctccaatgttcgatttgcaccccatgagagccctatttcttatgagtaagtccaatttccagcctcctaaacttaaagataaaaccaagtggtcaagtaccttccacaatttcgtcaagatcgccttaaccaaaaacccaaagaagagaccaacggccgagcggctccttacacacacctttgttgcacagcctggcctgtctcgagcactcgccgtggagctactcgacaaggtgaacaatccggataaccacgcccactacacggaagccgacgatgacgatttcgagcctcatgctatcataaggcatacaattagatccaccaaccgaaacgcgcgagctgagcgtacagcttctgagatcaattttgataagctgcagtttgagccaccgttaaggaaggaaaccgaggctcgcgacgagatgggactcagcagcgacccgaacttcatgctccagtggaatccatttgttgatggtgctaatacaggaaagagcactagcaagcgtgccatcccaccgccactgccccctaagccaaggatttccagttaccccgaggataacttccccgacgaagagaaggcttccacaatcaagcattgcccagatagcgagagccgggcccctcaaattctgaggcgccagagctctccgtcctgcggacctgtggctgagacttcctcaattgggaacggtgacgggatcagtaagctgatgtcagaaaacaccgaaggctcagcgcaagcgccccaactcccaagaaagaaagacaaaagggactttccaaagcctgctattaatggcttacctcctacgcccaaagtactgatgggggcatgctttagtaaagtgttcgatggttgtcctctgaaaatcaattgcgccacaagctggatccaccctgatacgaaggatcaatacataatttttgggacagaggatggcatttatactctgaacttaaacgagttacatgaggctacaatggaacaattattcccacggaagtgtacctggctctacgtgatcaacaacacactgatgtccctgagcgtggggaagaccttccagctgtactcccacaatttaattgcgctgtttgaacacgctaagaagcccgggttggcagcacatatccagacacacagattccccgaccgcatcttgcctagaaagtttgcccttacgacaaaaatccccgataccaagggatgtcacaaatgttgcatcgtgcgcaacccttacacgggacacaagtatctgtgcggagccctgcagagtgggatcgttttgctccagtggtacgagccgatgcagaaatttatgctgatcaaacatttcgattttccgctcccctccccgctgaacgtttttgaaatgttagtaattcccgagcaggagtatcccatggtgtgtgtggccatatcaaagggcacagaaagtaaccaggtcgtgcagttcgagaccattaacctgaactcagcctcctcatggttcacggaaatcggagcaggcagccagcagctcgactccattcacgttacacagctagaacgcgacacggtgcttgtttgccttgataagttcgtgaagatcgtcaacctgcagggtaaactgaaatcttcaaagaagcttgctagcgaactgtccttcgattttagaatcgagagcgtcgtgtgcttgcaagattccgtgctagccttttggaaacatggaatgcaggggaagagctttaaatccgatgaggttactcaggagataagtgatgaaacacgagtgtttcgcctgcttggatccgatagggtagtggtgctggagagtcggcctacagagaacccgacggctcacagcaatctgtatatcctagccgggcatgaaaacagctactag

SEQ ID NO: 293209 - DNA, 2541 bp, Artificial Sequence
  derived and/or modified sequence
atggaggcacccctccgtcccgcagccgatatattgagaagaaatccgcaacaggattatgagcttgtgcaaagggtgggcagtggcacctatggagacgtatataaagcacgcaatgtccataccggagagctggctgcagtgaagattattaagcttgagcccggtgatgatttctctctgattcagcaggagattttcatggtgaaggaatgtaaacattgtaatatcgtggcatactttggatcctacttgtctcgggagaaattgtggatctgcatggagtactgcggcggaggctctttgcaggatatttaccacgtcacaggcccactaagcgagctgcagatcgcttacgtgtgtagagaaacgctgcaggggttagcctatctgcatactaagggcaaaatgcacagagacataaagggagccaatatcctgttgaccgatcatggggacgttaaactggccgattttggtgtggccgctaaaatcacggctactatagccaagcgcaagagtttcatcgggactccctactggatggcccctgaagtcgcagctgttgaaaagaatggcggatataaccagttatgtgatatttgggccgtcggtattacagccatagagttgggagagctgcaaccccctatgtttgacttacaccccatgagggctctgtttctgatgtctaagagcaacttccagccgccaaaactgaaggacaagacaaaatggtcaagcaccttccacaactttgtgaagatagctctaaccaagaaccctaaaaagcgcccaaccgctgaacgccttctcactcacacatttgtcgcccagccaggcctcagtcgggcattagctgtggaactgctcgacaaggtcaacaatccagacaaccatgcccattacaccgaagctgacgacgacgactttgaaccacacgccattattcggcacaccatacggagtactaaccgcaacgcgagggctgagcgcacagcatctgaaatcaattttgacaagctccagtttgaaccacccctgaggaaggaaaccgaggctcgcgacgaaatgggtctgtcgtccgaccctaacttcatgttgcagtggaacccattcgttgacggtgcaaacaccggaaagtctacgtccaagagggccatacccccacccctccctcccaaaccccgtatcagcagttacccagaggataattttccggacgaggagaaggcttctacaatcaaacactgtcccgactccgaatcaagagcccctcagattctgcgcaggcagtcaagtccttcatgcgggccagtcgcagaaacctcctcaatcggtaacggggacggtatttctaaacttatgtcagagaatactgagggtagcgcacaggctcctcagctcccccgtaaaaaggacaagagagacttccccaaaccggctatcaacggcctaccacctacccccaaagtcctcatgggggcatgtttttcgaaagttttcgacggttgtccgctcaaaattaattgtgcaacaagctggattcatccagacacgaaagaccagtacatcatcttcgggacggaggatgggatctacaccctgaacctgaacgaattgcacgaagccactatggagcagctctttccgcgaaagtgcacctggctgtacgtaatcaacaataccctgatgtctctgtctgtgggaaaaacgtttcagctgtactcacacaacctgatcgcgctattcgagcacgccaagaagcccggacttgctgctcacattcaaactcatcgcttcccggaccggattctgccgagaaagtttgcgctcacaaccaagattcccgatacaaagggctgccataagtgctgcattgttagaaacccctatactgggcataagtacctgtgcggggcattacagagtgggattgtactcctccagtggtatgagcctatgcagaaattcatgcttatcaaacattttgacttccccctgcctagcccgctgaacgtgttcgaaatgctcgttattcccgagcaagaatacccaatggtgtgcgtcgctatctccaagggtaccgagagcaatcaggtagttcagtttgagacaattaacctgaatagtgcctcaagttggttcacggagattggcgctggctcgcaacagttggacagcattcatgtaactcagcttgagcgcgacactgttctggtgtgtttagacaaatttgttaaaatcgtcaatcttcagggcaagcttaaaagcagcaagaaactcgcttcagagctctctttcgattttaggatcgagtccgtagtgtgcctgcaggactcagtgctggctttctggaagcacgggatgcaggggaagagtttcaagagcgacgaggttactcaggaaatatcagatgagactagggtcttccggttgctgggctccgatcgggtggttgtgctggaatccagaccaaccgagaatccaactgcacactcaaatctctatatcctcgcgggtcatgaaaatagctactag

SEQ ID NO: 293210 - DNA, 2541 bp, Artificial Sequence
  derived and/or modified sequence
atggaagcccctctcagacctgctgccgacattctccgcagaaacccccaacaggactatgagctggtgcagagggtcggttcgggtacttacggcgacgtctacaaagctcgtaacgtgcacaccggcgaacttgcggctgttaaaatcataaagcttgaacctggagatgatttttccctgattcaacaggagatattcatggtgaaagaatgcaaacactgtaatatcgtggcatacttcggctcgtacctgtcccgtgagaagctgtggatatgcatggagtattgtggcgggggctctctgcaggatatttaccatgtcactggtcctctctctgaattgcagatagcatacgtctgtagagaaacactgcagggactcgcgtacctacataccaaaggtaagatgcatcgcgatatcaaaggcgccaacattctgctgacggaccacggggacgtcaagcttgctgatttcggtgttgctgctaagatcacggccacgattgccaaaagaaagtcttttattgggactccatactggatggctcccgaagtagccgcagtggagaagaatggcggatacaaccagctatgtgatatctgggcggtgggcatcaccgccatagaactgggcgagctgcagcctccaatgttcgatctccatcccatgagggccctgttcctgatgagcaaaagtaatttccagccgcctaagctgaaagataaaaccaaatggtcatccactttccacaattttgtcaaaatcgcgcttaccaagaatccgaaaaaaaggcctaccgctgagcgactattgactcacaccttcgtcgctcagccaggacttagcagagcgctggcagtggagcttctcgacaaggtcaacaacccagataaccatgctcactatactgaagcagatgacgatgactttgaaccccacgcgataatacggcacactattcgatcgactaatcgcaatgcaagagccgaaagaacagcctcggagattaatttcgacaagctacagttcgagccacccctacggaaggagacagaggctagggacgagatgggtctttcctctgaccccaatttcatgttgcagtggaacccttttgtggatggtgctaatacggggaagagtacatcaaagagagctatacctcccccccttccgccgaagccccgcatcagcagctaccccgaagataacttccctgatgaagagaaggcatccactattaaacattgtccggattcagagagccgggcaccgcaaatcctccgccgtcagagctcccctagctgtggcccagtggccgaaacatctagcatcgggaacggcgacggaatttctaaactcatgagcgagaacacagagggatctgcccaagctccacagctccctaggaaaaaagacaaacgcgatttccccaagcctgctattaatggcctacctcctacccccaaagtgctaatgggtgcttgcttctctaaagtgttcgatggatgtcctcttaaaattaactgtgccacttcttggatacaccccgatacaaaggaccagtacataattttcgggactgaggatggcatttatacactgaatttgaatgaactacatgaggccacaatggagcagttgtttccccggaagtgcacttggttgtacgtcattaataacacactgatgagtctttcggtgggcaaaaccttccaactgtacagccacaatctcattgccctcttcgaacacgcgaaaaagcctggtctggcagcccacattcagacacatcgctttccggataggatcctccccaggaaatttgctctgaccaccaagattccagatacaaaaggctgccataagtgctgcattgtcaggaatccctatacagggcacaagtacctatgcggtgccctccagagtggtatcgtcttactgcaatggtatgaacctatgcagaaatttatgctgattaaacacttcgatttccctttgccatctccactcaacgtgttcgaaatgctggttataccagaacaggaatatccaatggtttgtgttgccatctccaaagggaccgaatccaatcaggtggttcagtttgagactatcaatcttaatagcgcatcatcctggtttacagagataggggcaggaagccagcagcttgactctatccatgtcacacagctggaaagagacactgtgttagtctgtttggacaaattcgtgaaaatcgtgaacctccagggcaaactgaaatcttcaaagaaactggcctcagagctttccttcgacttccgaattgaaagtgtggtctgcctgcaagatagtgttctggcattttggaagcatggcatgcagggcaaaagcttcaagtcagatgaagtaactcaagagatttccgatgagacacgcgtcttccgactgcttgggagtgaccgcgttgtggtgctggagtctcgccccaccgaaaatcctacagctcattcaaacctctacattttggcgggccacgaaaatagctattag

SEQ ID NO: 293211 - DNA, 2541 bp, Artificial Sequence
  derived and/or modified sequence
atggaggctccgctccgtccggcagcggatatactacgccgcaacccacagcaggactacgaacttgttcagagagtcggcagcggcacttacggcgatgtctataaagctcgaaacgttcatactggggagttggcagctgtcaaaatcattaagcttgaacctggtgatgacttcagtctgattcagcaagaaatcttcatggttaaagaatgtaaacactgtaatatagtagcttattttggctcttatctgtcacgtgagaaattatggatttgtatggagtattgcgggggcggaagcctgcaggacatctatcacgttacgggaccgctttctgaactccagatcgcctacgtgtgccgagaaactctgcaaggactcgcctacttgcacacaaaaggaaaaatgcatcgagacattaaaggcgccaatatcctcctcacagatcacggcgatgtgaagctggccgattttggcgtagccgcaaaaattaccgccactatagctaagagaaaatccttcatcggtactccctattggatggctcccgaagtggcagccgtcgaaaaaaacggaggttacaatcaactctgcgacatatgggcagttgggatcaccgccattgaactgggcgaactccagcctcctatgttcgacctacaccccatgcgagccctgttccttatgtccaaatcaaatttccagcctccaaagttaaaagacaagaccaagtggagcagcacattccacaactttgtcaaaatcgcccttacaaaaaaccccaaaaagagaccaacagccgagcgcttgctgactcacacttttgtggcccagccgggcctgtcccgtgctttagccgtggaactgctagataaagtaaacaacccagacaatcacgctcattatactgaagccgacgacgacgacttcgaacctcatgcaatcatccgacacaccataagaagtactaaccgcaacgcacgagccgagcgcaccgcctctgaaatcaacttcgacaaactccaatttgagccacctctgcgaaaagagacggaggcacgagatgaaatgggacttagttcagaccccaacttcatgcttcagtggaatccctttgtggacggggcgaatactggcaaatcaacctcgaagagagcaatcccgccacctttaccacccaagccgagaatctcttcgtaccccgaagataattttccagatgaagagaaggcctccaccatcaaacattgtcctgattccgagtctagagctccacagatcctgagaagacaatcaagtccttcctgcgggccggtcgcagagacctcaagcataggaaacggagatggaatttcaaaactgatgtcagaaaacaccgaaggatcagcgcaagcccctcaactccctcgaaagaaggataaaagggacttccctaaacccgctattaacggcctgccacctactcccaaagtgttgatgggagcgtgtttcagcaaagtctttgacggctgcccccttaagatcaactgcgccacaagctggatacaccctgacaccaaagatcaatacatcatcttcggaaccgaagacggaatctacactctgaacctgaacgaactgcacgaggccaccatggaacaactcttccctcggaagtgcacatggctgtacgtgattaataacacactgatgtcactgtctgtgggaaaaacttttcagctgtactcacataatctcatcgccctgtttgaacacgcaaagaaacctggactggctgcccatattcagactcatcggttcccagatcggattttgccccgtaagttcgccctcactacaaagattccagataccaaaggctgccacaaatgctgtatcgttcgcaacccatacactggtcataaatacctctgcggggccctgcaaagcggaattgtgttgctgcagtggtacgaacccatgcaaaagtttatgctcattaagcactttgactttccacttcctagcccccttaatgttttcgaaatgttagtaattcctgaacaggaatatccgatggtatgtgtggccatcagcaaaggaaccgaatctaaccaagttgtgcagttcgaaaccattaacctgaattctgcatcatcctggtttacagaaataggggcaggctcccagcagctagattctattcacgtgacacagttagaaagggacacagtcttagtgtgcttggacaagttcgtcaaaatcgtgaacctacaagggaaactgaaaagttcgaagaagctagcatccgagctcagctttgactttaggatcgagtctgtggtttgtctgcaggatagtgtcttggcattttggaagcacggcatgcaaggaaaatcgttcaagagtgatgaggtaacacaagagatctccgacgaaactagagtgttccgcctgctgggttctgacagagtggtcgtgcttgagtctagaccaaccgaaaatccgaccgcccattcaaacctatacatacttgctggccatgaaaattcttattag

SEQ ID NO: 293212 - DNA, 2541 bp, Artificial Sequence
  derived and/or modified sequence
atggaggcccccctgagacccgccgccgacatcctgagaagaaacccccagcaggactacgagctggtgcagagagtgggcagcggcacctacggcgacgtgtacaaggccagaaacgtgcacaccggcgagctggccgccgtgaagatcatcaagctggagcccggcgacgacttcagcctgatccagcaggagatcttcatggtgaaggagtgcaagcactgcaacatcgtggcctacttcggcagctacctgagcagagagaagctgtggatctgcatggagtactgcggcggcggcagcctgcaggacatctaccacgtgaccggccccctgagcgagctgcagatcgcctacgtgtgcagagagaccctgcagggcctggcctacctgcacaccaagggcaagatgcacagagacatcaagggcgccaacatcctgctgaccgaccacggcgacgtgaagctggccgacttcggcgtggccgccaagatcaccgccaccatcgccaagagaaagagcttcatcggcaccccctactggatggcccccgaggtggccgccgtggagaagaacggcggctacaaccagctgtgcgacatctgggccgtgggcatcaccgccatcgagctgggcgagctgcagccccccatgttcgacctgcaccccatgagagccctgttcctgatgagcaagagcaacttccagccccccaagctgaaggacaagaccaagtggagcagcaccttccacaacttcgtgaagatcgccctgaccaagaaccccaagaagagacccaccgccgagagactgctgacccacaccttcgtggcccagcccggcctgagcagagccctggccgtggagctgctggacaaggtgaacaaccccgacaaccacgcccactacaccgaggccgacgacgacgacttcgagccccacgccatcatcagacacaccatcagaagcaccaacagaaacgccagagccgagagaaccgccagcgagatcaacttcgacaagctgcagttcgagccccccctgagaaaggagaccgaggccagagacgagatgggcctgagcagcgaccccaacttcatgctgcagtggaaccccttcgtggacggcgccaacaccggcaagagcaccagcaagagagccatccccccccccctgccccccaagcccagaatcagcagctaccccgaggacaacttccccgacgaggagaaggccagcaccatcaagcactgccccgacagcgagagcagagccccccagatcctgagaagacagagcagccccagctgcggccccgtggccgagaccagcagcatcggcaacggcgacggcatcagcaagctgatgagcgagaacaccgagggcagcgcccaggccccccagctgcccagaaagaaggacaagagagacttccccaagcccgccatcaacggcctgccccccacccccaaggtgctgatgggcgcctgcttcagcaaggtgttcgacggctgccccctgaagatcaactgcgccaccagctggatccaccccgacaccaaggaccagtacatcatcttcggcaccgaggacggcatctacaccctgaacctgaacgagctgcacgaggccaccatggagcagctgttccccagaaagtgcacctggctgtacgtgatcaacaacaccctgatgagcctgagcgtgggcaagaccttccagctgtacagccacaacctgatcgccctgttcgagcacgccaagaagcccggcctggccgcccacatccagacccacagattccccgacagaatcctgcccagaaagttcgccctgaccaccaagatccccgacaccaagggctgccacaagtgctgcatcgtgagaaacccctacaccggccacaagtacctgtgcggcgccctgcagagcggcatcgtgctgctgcagtggtacgagcccatgcagaagttcatgctgatcaagcacttcgacttccccctgcccagccccctgaacgtgttcgagatgctggtgatccccgagcaggagtaccccatggtgtgcgtggccatcagcaagggcaccgagagcaaccaggtggtgcagttcgagaccatcaacctgaacagcgccagcagctggttcaccgagatcggcgccggcagccagcagctggacagcatccacgtgacccagctggagagagacaccgtgctggtgtgcctggacaagttcgtgaagatcgtgaacctgcagggcaagctgaagagcagcaagaagctggccagcgagctgagcttcgacttcagaatcgagagcgtggtgtgcctgcaggacagcgtgctggccttctggaagcacggcatgcagggcaagagcttcaagagcgacgaggtgacccaggagatcagcgacgagaccagagtgttcagactgctgggcagcgacagagtggtggtgctggagagcagacccaccgagaaccccaccgcccacagcaacctgtacatcctggccggccacgagaacagctactag

SEQ ID NO: 293213 - protein, 622 aa, Artificial Sequence
  derived and/or modified sequence
MNKLNFHNNRVMQDRRSVCIFLPNDESLNIIINVKILCHQLLVQVCDLLRLKDCHLFGLSVIQNNEHVYMELSQKLYKYCPKEWKKEASKVRQYEVTWGIDQFGPPMIIHFRVQYYVENGRLISDRAARYYYYWHLRKQVLHSQCVLREEAYFLLAAFALQADLGNFKRNKHYGKYFEPEAYFPSWVVSKRGKDYILKHIPNMHKDQFALTASEAHLKYIKEAVRLDDVAVHYYRLYKDKREIEASLTLGLTMRGIQIFQNLDEEKQLLYDFPWTNVGKLVFVGKKFEILPDGLPSARKLIYYTGCPMRSRHLLQLLSNSHRLYMNLQPVLRHIRKLEENEEKKQYRESYISDNLDLDMDQLEKRSRASGSSAGSMKHKRLSRHSTASHSSSHTSGIEADTKPRDTGPEDSYSSSAIHRKLKTCSSMTSHGSSHTSGVESGGKDRLEEDLQDDEIEMLVDDPRDLEQMNEESLEVSPDMCIYITEDMLMSRKLNGHSGLIVKEIGSSTSSSSETVVKLRGQSTDSLPQTICRKPKTSTDRHSLSLDDIRLYQKDFLRIAGLCQDTAQSYTFGCGHELDEEGLYCNSCLAQQCINIQDAFPVKRTSKYFSLDLTHDEVPEFVV

SEQ ID NO: 293214 - protein, 264 aa, Artificial Sequence
  derived and/or modified sequence
MDQLEKRSRASGSSAGSMKHKRLSRHSTASHSSSHTSGIEADTKPRDTGPEDSYSSSAIHRKLKTCSSMTSHGSSHTSGVESGGKDRLEEDLQDDEIEMLVDDPRDLEQMNEESLEVSPDMCIYITEDMLMSRKLNGHSGLIVKEIGSSTSSSSETVVKLRGQSTDSLPQTICRKPKTSTDRHSLSLDDIRLYQKDFLRIAGLCQDTAQSYTFGCGHELDEEGLYCNSCLAQQCINIQDAFPVKRTSKYFSLDLTHDEVPEFVV

SEQ ID NO: 293215 - protein, 61 aa, Artificial Sequence
  derived and/or modified sequence
MNKLNFHNNRVMQDRRSVCIFLPNDESLNIIINVKILCHQLLVQVCDLLRLKDCHLFGLSV

SEQ ID NO: 293216 - DNA, 1869 bp, Artificial Sequence
  derived and/or modified sequence
atgaacaagctgaacttccacaacaacagagtgatgcaggacagaagaagcgtgtgcatcttcctgcccaacgacgagagcctgaacatcatcatcaacgtgaagatcctgtgccaccagctgctggtgcaggtgtgcgacctgctgagactgaaggactgccacctgttcggcctgagcgtgatccagaacaacgagcacgtgtacatggagctgagccagaagctgtacaagtactgccccaaggagtggaagaaggaggccagcaaggtgagacagtacgaggtgacctggggcatcgaccagttcggcccccccatgatcatccacttcagagtgcagtactacgtggagaacggcagactgatcagcgacagagccgccagatactactactactggcacctgagaaagcaggtgctgcacagccagtgcgtgctgagagaggaggcctacttcctgctggccgccttcgccctgcaggccgacctgggcaacttcaagagaaacaagcactacggcaagtacttcgagcccgaggcctacttccccagctgggtggtgagcaagagaggcaaggactacatcctgaagcacatccccaacatgcacaaggaccagttcgccctgaccgccagcgaggcccacctgaagtacatcaaggaggccgtgagactggacgacgtggccgtgcactactacagactgtacaaggacaagagagagatcgaggccagcctgaccctgggcctgaccatgagaggcatccagatcttccagaacctggacgaggagaagcagctgctgtacgacttcccctggaccaacgtgggcaagctggtgttcgtgggcaagaagttcgagatcctgcccgacggcctgcccagcgccagaaagctgatctactacaccggctgccccatgagaagcagacacctgctgcagctgctgagcaacagccacagactgtacatgaacctgcagcccgtgctgagacacatcagaaagctggaggagaacgaggagaagaagcagtacagagagagctacatcagcgacaacctggacctggacatggaccagctggagaagagaagcagagccagcggcagcagcgccggcagcatgaagcacaagagactgagcagacacagcaccgccagccacagcagcagccacaccagcggcatcgaggccgacaccaagcccagagacaccggccccgaggacagctacagcagcagcgccatccacagaaagctgaagacctgcagcagcatgaccagccacggcagcagccacaccagcggcgtggagagcggcggcaaggacagactggaggaggacctgcaggacgacgagatcgagatgctggtggacgaccccagagacctggagcagatgaacgaggagagcctggaggtgagccccgacatgtgcatctacatcaccgaggacatgctgatgagcagaaagctgaacggccacagcggcctgatcgtgaaggagatcggcagcagcaccagcagcagcagcgagaccgtggtgaagctgagaggccagagcaccgacagcctgccccagaccatctgcagaaagcccaagaccagcaccgacagacacagcctgagcctggacgacatcagactgtaccagaaggacttcctgagaatcgccggcctgtgccaggacaccgcccagagctacaccttcggctgcggccacgagctggacgaggagggcctgtactgcaacagctgcctggcccagcagtgcatcaacatccaggacgccttccccgtgaagagaaccagcaagtacttcagcctggacctgacccacgacgaggtgcccgagttcgtggtgtag

SEQ ID NO: 293217 - DNA, 2972 bp, Artificial Sequence
  derived and/or modified sequence
agaggggtgaccagagagcccaacgcctggtgctcaagactttctccgagctatgaaacccacgtagtcgaacaccgtgatgcttctcctgcagggcgtgtgatgaggaggcgagcttggctttggagtgctgggaacctgaggaattgccaaggacccagagcccagccctgaccaccagagtgcccaaaacacaatgaacaaattgaattttcataacaacagagtcatgcaagaccgccgcagtgtgtgcattttccttcccaacgatgaatctctgaacatcatcataaatgttaagattctgtgtcaccagttgctggtccaggtttgtgacctgctcaggctaaaggactgccacctctttggactcagtgttatacaaaataatgaacatgtgtatatggagttgtcacaaaagctttacaaatattgtccaaaagaatggaagaaagaggccagcaaggtacgacaatacgaagtcacttggggtatcgaccaatttgggcctcctatgatcatccacttccgtgtgcagtactatgtggaaaatggcagattgatcagtgacagagcagcaagatactattattactggcacctgagaaaacaagttcttcattctcagtgtgtgctccgagaggaggcctacttcctgctggcagcctttgccctgcaggctgatcttgggaacttcaaaaggaataagcactatggaaaatacttcgagccagaggcttacttcccatcttgggttgtttccaagagggggaaggactacatcctgaagcacattccaaacatgcacaaagatcagtttgcactaacagcttccgaagctcatcttaaatatatcaaagaggctgtccgactggatgacgtcgctgttcattactacagattgtataaggataaaagggaaattgaagcatcgctgactcttggattgaccatgaggggaatacagatttttcagaatttagatgaagagaaacaattactttatgatttcccctggacaaatgttggaaaattggtgtttgtgggtaagaaatttgagattttgccagatggcttgccttctgcccggaagctcatatactacacggggtgccccatgcgctccagacacctcctgcaacttctgagcaacagccaccgcctctatatgaatctgcagcctgtcctgcgccatatccggaagctggaggaaaacgaagagaagaagcagtaccgggaatcttacatcagtgacaacctggacctcgacatggaccagctggaaaaacggtcgcgggccagcgggagcagtgcgggcagcatgaaacacaagcgcctgtcccgtcattccaccgccagccacagcagttcccacacctcgggcattgaggcagacaccaagccccgggacacggggccagaagacagctactccagcagtgccatccaccgcaagctgaaaacctgcagctcaatgaccagtcatggcagctcccacacctcaggggtggagagtggcggcaaagaccggctggaagaggacttacaggacgatgaaatagagatgttggttgatgacccccgggatctggagcagatgaatgaagagtctctggaagtcagcccagacatgtgcatctacatcacagaggacatgctcatgtcgcggaagctgaatggacactctgggttgattgtgaaagaaattgggtcttccacctcgagctcttcagaaacagttgttaagcttcgtggccagagtactgattctcttccacagactatatgtcggaaaccaaagacctccactgatcgacacagcttgagcctcgatgacatcagactttaccagaaagacttcctgcgcattgcaggtctgtgtcaggacactgctcagagttacacctttggatgtggccatgaactggatgaggaaggcctctattgcaacagttgcttggcccagcagtgcatcaacatccaagatgcttttccagtcaaaagaaccagcaaatacttttctctggatctcactcatgatgaagttccagagtttgttgtgtaaagtccgtctgtgtgcagctgtacaggcagcttactgtttgctagaggatgcgaaagtcataagttctttacatattacttgtgccatatcttcttcaccctaaacatagctctttctttataatatttgtgatgatggaaacaaaagccttggaacaattgcactttaagtattacacagaagtaaaagaactacagaaaatgtacagcaagacaagtgcccggaagttcactgatccttcagaaggaaatgcgctttactgattgcaaagccttcagaatattggagtgtggtgtgtttgctcatctgatgctttttagttcagttacatgtaacatcacatttttttatcacgtgaaagatgttagatttgtttgcttataaattttttaccactcccacataaaatgctcatagtttgggagaggaaagagggaagattctctcttcttttaacagagagatgattgctctgtatacccattgcttcctccctgaggctgtcccaaagtgaacactgatggagtggtcaaaatcataaggttgtagcaagccaaagatacgtatgtgacagaagcacataagcaataagcagaaaaccagaagtgcatgctgtgatgcctgtgactccttcatcccgctcagtgccatgtcctcttttgtgatcttccagaaagctccaggattcatttgagttccacatccaagtaacagatgaattatattcatgttgtaatgcattttgtggagtttacaaaaccagtgtctgttaaaactttggaaaatgtcttagaaaacgttggtgcttggtgatgctttatttgtttaattatcaagaacaaattatggcaatgctagtttctgcttaaccaaaatactctgtgtatatattatacatatataaata

SEQ ID NO: 293218 - DNA, 1869 bp, Artificial Sequence
  derived and/or modified sequence
atgaacaagcttaattttcacaataatagagtgatgcaggatcgaagaagcgtatgcatattcttacctaacgacgagtcattaaacatcattataaatgtgaagatcctctgtcaccagctgctggtccaggtttgtgatcttctgcggctaaaggattgccatctattcgggttgagcgtgattcaaaacaatgagcacgtttacatggagctgagtcagaaattgtacaaatattgtcccaaagagtggaagaaggaggcctccaaagtgaggcagtatgaggtgacctgggggatcgatcagttcggcccacccatgatcatccatttcagggtgcagtattatgtggagaacggccgtctcatttctgatcgggccgcccgatattactattactggcaccttcgcaagcaggttctgcacagccagtgtgttttgcgtgaggaggcctatttcctcctggctgcgttcgcgctccaggctgacctaggcaatttcaaaagaaacaaacactatggcaagtacttcgagcccgaggcttacttcccaagctgggttgtgtctaaacgagggaaggattacattctaaaacacatccctaacatgcacaaagatcagtttgcgctgactgcaagcgaagcccacctgaaatacattaaggaagccgtgagattggatgatgttgcagtgcactattacaggctttacaaggataagagggagattgaagcgagtcttacgctgggccttaccatgaggggcattcaaatttttcagaaccttgacgaagaaaaacagttactctacgacttcccctggacgaatgtggggaagctggtattcgttggcaaaaagttcgagatcttgccggatgggctcccatctgcccggaagctaatatactataccgggtgccccatgcggtctcgtcatttgttgcagctgctgagcaattctcacaggctgtacatgaacttgcaacccgtgctccgccacattaggaaacttgaagagaatgaggagaaaaagcagtacagagagtcctacattagcgataacctagacctggacatggatcagttggagaagcgatcgagggccagcgggagctctgccggctcgatgaagcacaagcgactctccaggcatagtacagcgagccactcttcttctcatacttctgggatagaagccgatacaaaaccgcgcgacacgggccctgaggattcttactctagttccgctatccatcgcaagctgaagacctgctccagcatgacctctcatgggagttcacacaccagcggggtcgaatctgggggaaaggacaggctggaagaagacctgcaggacgatgaaatagagatgttagtagacgacccccgagacttggaacaaatgaatgaggaaagcttggaagtgtcacctgatatgtgtatctatattaccgaggacatgctcatgtcgcgcaaactgaacggccactcagggctaattgtaaaggaaatcggcagctccacaagctccagttccgagactgttgtgaagctgagagggcagtcgacagacagcttgccccagaccatttgtcgcaaacctaagacatcaacggataggcatagtctgagtctagacgatatcagactgtatcaaaaagacttcttgaggattgcgggcctctgtcaggacactgcacaaagttacacctttgggtgtgggcatgagctcgatgaggagggactgtattgtaatagttgtttggcgcaacaatgcatcaatatccaggacgccttcccagtgaagaggactagtaagtacttctctttagacctgactcatgacgaggtacccgaattcgtcgtgtag

SEQ ID NO: 293219 - DNA, 1869 bp, Artificial Sequence
  derived and/or modified sequence
atgaacaagctgaacttccacaacaacagagtgatgcaggacagaagatctgtgtgcatcttcctgcccaatgatgagagcctgaacatcatcatcaacgtgaagatcctgtgccaccagctgctggtgcaggtgtgtgacctgctgcggctgaaggactgccacctgtttggcctgagcgtcatccagaacaatgaacatgtgtacatggagctgagccagaagctgtacaagtactgccccaaggagtggaagaaggaggccagcaaggtgcggcagtatgaggtgacctggggcatcgaccagtttggaccacccatgatcatccacttccgggtgcagtactacgtggagaatggccgcctcatcagtgacagagctgcccgctactactactactggcacctgaggaagcaggtgctgcacagccagtgtgtgctgcgggaggaggcctacttcctgctggccgcctttgccctgcaggccgacctgggcaacttcaagaggaacaagcactacggcaagtactttgagcctgaggcctacttccccagctgggtggtgtccaagaggggcaaggactacatcctgaagcacatccccaacatgcacaaggaccagtttgccctgacagccagcgaggcccacctgaagtacatcaaggaggccgtgcggctggatgatgtggccgtgcactactaccgcctgtacaaggacaagcgggagattgaggccagcctgaccctgggcctgaccatgaggggcatccagatcttccagaacctggatgaggagaagcagctgctgtatgacttcccctggaccaacgtgggcaagctggtgtttgtgggcaagaagtttgagatcctgcctgatggcctgcccagcgccaggaagctgatctactacacaggctgccccatgaggagccgccacctgctgcagctgctgagcaacagccaccggctgtacatgaacctgcagcctgtgctgcggcacatcaggaagctggaggagaatgaggagaagaagcagtaccgggagagctacatcagtgacaacctggacctggacatggaccagctggagaagaggagccgggccagcggcagcagcgctggctccatgaagcacaagaggctgagccgccacagcacagccagccacagcagcagccacaccagcggcattgaagctgacaccaagccccgggacaccggcccagaagattcctacagcagcagcgccatccacaggaagctgaagacctgcagctccatgaccagccacggcagcagccacaccagcggcgtggagagcggcggcaaggaccggctggaggaggacctgcaggatgatgaaattgagatgctggtggatgacccccgggacctggagcagatgaatgaggagagcctggaggtgtccccagacatgtgcatctacatcacagaggacatgctgatgagcaggaagctgaatggccacagcggcctcatcgtgaaggagatcggcagcagcaccagcagcagcagcgagaccgtggtgaagctgcggggccagagcacagacagcctgccccagaccatctgcaggaagcccaagaccagcacagacagacacagcctgagcctggatgacatccggctgtaccagaaggacttcctgagaattgctggcctgtgccaggacacagcccagagctacaccttcggctgcggccacgagctggatgaggagggcctgtactgcaacagctgcctggcccagcagtgcatcaacatccaggatgccttccctgtgaagaggaccagcaagtacttcagcctggacctgacccatgatgaggtgcctgagtttgtggtgtag

SEQ ID NO: 293220 - DNA, 1869 bp, Artificial Sequence
  derived and/or modified sequence
atgaacaagctgaacttccacaacaaccgggtgatgcaggaccggcgaagtgtttgtatcttccttcctaacgacgagtcactcaacatcatcatcaatgtgaaaattctctgccaccagctgctggtgcaagtgtgcgacctcctccgactgaaggattgccacctatttggcctgagtgtgatacagaataatgaacacgtctacatggagttgtcacagaagctctacaagtattgccctaaggaatggaaaaaggaggcaagcaaggtgcggcagtatgaggttacctgggggatcgatcagttcggccccccaatgattatccatttccgagtgcagtattatgtggagaatggtcgcttaatttctgacagggccgccaggtactattattattggcacctgcgtaaacaggtgctgcactctcaatgcgtgcttagagaagaggcttacttcctactcgctgccttcgccttgcaggccgatttaggcaattttaagcggaacaaacattacggcaaatattttgagcctgaagcttatttcccttcttgggtggtgtcaaaaagaggcaaagattacatcttgaaacacatcccaaatatgcataaagatcaatttgcccttactgcttcagaggcacacttaaagtacatcaaggaagccgtgaggctggacgacgtggctgtgcactattatagactgtataaggataaacgagaaatcgaggccagcctaacactggggcttactatgaggggaatccagatcttccagaatctggacgaagaaaagcagctcctttacgacttcccttggacaaacgtggggaagctagtctttgtcgggaagaagtttgagattctacccgatgggctgccatcagcccgaaagctcatttattatacagggtgtcccatgaggagtaggcatttattgcagctgttgagtaactcacatagactgtacatgaacttacagcccgtactgcgtcatatcaggaagctggaagaaaatgaagaaaaaaagcaataccgcgaaagctacatttccgacaacttggacctggacatggaccaactggagaaaaggagccgcgcaagtggttctagcgccggcagcatgaagcacaaacggctctctaggcattctactgcgtcccattccagcagccacacaagcggaattgaggccgacaccaaacccagggataccggacctgaggactcatattcttcctcagccatccaccgaaagctcaagacctgttcctcgatgaccagccacgggagctcacacacttcaggagtcgagtctggggggaaagataggcttgaggaagacctccaggacgatgagattgagatgctggtggatgatccccgcgacctcgagcagatgaatgaagaaagcctagaagtgagcccagatatgtgcatttatatcaccgaggacatgcttatgtctaggaaactgaacggccacagcggtcttatcgtgaaagaaatcggcagctctactagtagctcctccgaaactgtggtcaaactccgcgggcagtctacagattccctgccacagaccatttgccggaaaccaaagactagcactgataggcactccctgtctttggacgacatcaggctgtatcagaaagatttccttagaatagcaggactctgccaagataccgcccagagctacacattcgggtgtggccacgaattagacgaggaggggctgtactgtaatagctgcctagctcagcagtgcattaatatccaagatgccttcccagttaaacgcacaagcaaatacttctccctcgatctcacccatgatgaggtccctgagtttgtcgtatag

SEQ ID NO: 293221 - DNA, 1869 bp, Artificial Sequence
  derived and/or modified sequence
atgaataaactgaacttccacaacaatcgagtgatgcaggatagaaggtctgtgtgtattttcttaccaaacgacgagtctctgaatatcattattaacgtaaagatactctgtcaccagttgctggtccaggtctgcgatctcctgcgcctgaaggactgccatctgtttggtctcagcgtgatccagaataacgagcacgtttatatggagctctctcagaaactttataagtactgtccaaaggagtggaaaaaggaagcgtccaaggtgcggcagtatgaagtgacttgggggatcgaccaatttggtccccctatgatcatccacttcagagttcagtactatgttgagaacggacggctgatctccgaccgcgcagcccgttactattactactggcatttgcggaaacaggtgttgcactctcaatgcgtgttgcgcgaggaggcttattttttgttagcagcttttgctctccaggcagatttgggcaacttcaagcgaaataaacactatggaaaatactttgaaccagaggcctattttccctcctgggtcgttagcaagcggggaaaagattatatcctcaaacatatccccaatatgcacaaagaccagtttgccctgaccgcatccgaggctcatctgaaatatatcaaagaagcagtccggctggacgacgttgccgtgcattattaccgactctacaaagataaaagggaaatcgaagcgtcccttacactggggctgaccatgcggggtatacagatcttccagaacctggatgaggagaaacagctcttatacgattttccttggaccaatgtcggaaaactcgttttcgtgggtaaaaaatttgagatcctaccggatgggttaccctcagctaggaaacttatatattacaccggatgtcctatgagaagcagacacctcttgcagctgctgagcaattctcatagactgtatatgaacctgcagcccgtgctgcggcacatccggaagttagaggagaacgaagagaagaagcagtatcgcgagtcctacatctctgataatttggatcttgacatggatcagttagaaaaaagatccagggcgtccggaagctctgcgggttcaatgaagcacaaaaggttgtcaagacactctacggcttctcattcttcctcccacacctctgggatcgaggcagataccaaaccaagagacactggccctgaagacagttacagcagcagcgctatacatcggaagttaaagacttgtagctcaatgacttctcacggttcttcccacacatctggcgtcgagtcaggtgggaaggatcgactagaggaggacctgcaggacgatgagatagagatgctggtggatgatccacgggacctggagcagatgaacgaggaaagcctggaagtgtccccagacatgtgtatctacatcactgaggatatgttaatgtctcggaagctgaatggccactcgggcttgatcgtgaaggagattgggtcctctacctcaagtagttcggaaacagtggtcaaattgcggggacagtccactgattctctccctcaaaccatctgccgcaaacctaaaacctccacagataggcacagcctcagtctggatgatatccgactctaccaaaaagattttctgcggattgccggtctatgtcaggacactgcccagtcctataccttcggttgcggacacgaactagatgaggaaggactctattgcaactcctgtctggcccagcagtgtataaacattcaagacgcctttcccgtcaaaagaacttccaaatatttcagcctggacttaacccatgatgaggttcccgagttcgttgtttag

SEQ ID NO: 293222 - protein, 614 aa, Artificial Sequence
  derived and/or modified sequence
MNKLNFHNNRVMQDRRSVCIFLPNDESLNIIINVKILCHQLLVQVCDLLRLKDCHLFGLSVIQNNEHVYMELSQKLYKYCPKEWKKEASKGIDQFGPPMIIHFRVQYYVENGRLISDRAARYYYYWHLRKQVLHSQCVLREEAYFLLAAFALQADLGNFKRNKHYGKYFEPEAYFPSWVVSKRGKDYILKHIPNMHKDQFALTASEAHLKYIKEAVRLDDVAVHYYRLYKDKREIEASLTLGLTMRGIQIFQNLDEEKQLLYDFPWTNVGKLVFVGKKFEILPDGLPSARKLIYYTGCPMRSRHLLQLLSNSHRLYMNLQPVLRHIRKLEENEEKKQYRESYISDNLDLDMDQLEKRSRASGSSAGSMKHKRLSRHSTASHSSSHTSGIEADTKPRDTGPEDSYSSSAIHRKLKTCSSMTSHGSSHTSGVESGGKDRLEEDLQDDEIEMLVDDPRDLEQMNEESLEVSPDMCIYITEDMLMSRKLNGHSGLIVKEIGSSTSSSSETVVKLRGQSTDSLPQTICRKPKTSTDRHSLSLDDIRLYQKDFLRIAGLCQDTAQSYTFGCGHELDEEGLYCNSCLAQQCINIQDAFPVKRTSKYFSLDLTHDEVPEFVV

SEQ ID NO: 293223 - DNA, 1845 bp, Artificial Sequence
  derived and/or modified sequence
atgaacaagctgaacttccacaacaacagagtgatgcaggacagaagaagcgtgtgcatcttcctgcccaacgacgagagcctgaacatcatcatcaacgtgaagatcctgtgccaccagctgctggtgcaggtgtgcgacctgctgagactgaaggactgccacctgttcggcctgagcgtgatccagaacaacgagcacgtgtacatggagctgagccagaagctgtacaagtactgccccaaggagtggaagaaggaggccagcaagggcatcgaccagttcggcccccccatgatcatccacttcagagtgcagtactacgtggagaacggcagactgatcagcgacagagccgccagatactactactactggcacctgagaaagcaggtgctgcacagccagtgcgtgctgagagaggaggcctacttcctgctggccgccttcgccctgcaggccgacctgggcaacttcaagagaaacaagcactacggcaagtacttcgagcccgaggcctacttccccagctgggtggtgagcaagagaggcaaggactacatcctgaagcacatccccaacatgcacaaggaccagttcgccctgaccgccagcgaggcccacctgaagtacatcaaggaggccgtgagactggacgacgtggccgtgcactactacagactgtacaaggacaagagagagatcgaggccagcctgaccctgggcctgaccatgagaggcatccagatcttccagaacctggacgaggagaagcagctgctgtacgacttcccctggaccaacgtgggcaagctggtgttcgtgggcaagaagttcgagatcctgcccgacggcctgcccagcgccagaaagctgatctactacaccggctgccccatgagaagcagacacctgctgcagctgctgagcaacagccacagactgtacatgaacctgcagcccgtgctgagacacatcagaaagctggaggagaacgaggagaagaagcagtacagagagagctacatcagcgacaacctggacctggacatggaccagctggagaagagaagcagagccagcggcagcagcgccggcagcatgaagcacaagagactgagcagacacagcaccgccagccacagcagcagccacaccagcggcatcgaggccgacaccaagcccagagacaccggccccgaggacagctacagcagcagcgccatccacagaaagctgaagacctgcagcagcatgaccagccacggcagcagccacaccagcggcgtggagagcggcggcaaggacagactggaggaggacctgcaggacgacgagatcgagatgctggtggacgaccccagagacctggagcagatgaacgaggagagcctggaggtgagccccgacatgtgcatctacatcaccgaggacatgctgatgagcagaaagctgaacggccacagcggcctgatcgtgaaggagatcggcagcagcaccagcagcagcagcgagaccgtggtgaagctgagaggccagagcaccgacagcctgccccagaccatctgcagaaagcccaagaccagcaccgacagacacagcctgagcctggacgacatcagactgtaccagaaggacttcctgagaatcgccggcctgtgccaggacaccgcccagagctacaccttcggctgcggccacgagctggacgaggagggcctgtactgcaacagctgcctggcccagcagtgcatcaacatccaggacgccttccccgtgaagagaaccagcaagtacttcagcctggacctgacccacgacgaggtgcccgagttcgtggtgtag

SEQ ID NO: 293224 - DNA, 186 bp, Artificial Sequence
  derived and/or modified sequence
atgaacaagctgaacttccacaacaacagagtgatgcaggacagaagaagcgtgtgcatcttcctgcccaacgacgagagcctgaacatcatcatcaacgtgaagatcctgtgccaccagctgctggtgcaggtgtgcgacctgctgagactgaaggactgccacctgttcggcctgagcgtgtag

SEQ ID NO: 293225 - DNA, 4768 bp, Artificial Sequence
  derived and/or modified sequence
cttgaaggaagggtgttgggtgaactaacactattttctcctgccctttcccccaatctcaatccctttctctccaaacattcttccttgagcaccccactctggcactcaaaaagccatgggaatgggaaagaagtggctggaagtaaacagcctgcttactcacagcaactgaaaattttgtttcgacgattctggttccaggggcaggagctgaagattaatgcctggagtctgccccattctgagagcagcagcctggctcctggtggctccagcagcagccttcatatctgtttttttcttatgaagcttcttctggttggaaacttgtcaaatttcatcagctatgaaacccacgtagtcgaacaccgtgatgcttctcctgcagggcgtgtgatgaggaggcgagcttggctttggagtgctgggaacctgaggaattgccaaggacccagagcccagccctgaccaccagagtgcccaaaacacaatgaacaaattgaattttcataacaacagagtcatgcaagaccgccgcagtgtgtgcattttccttcccaacgatgaatctctgaacatcatcataaatgttaagattctgtgtcaccagttgctggtccaggtttgtgacctgctcaggctaaaggactgccacctctttggactcagtgttatacaaaataatgaacatgtgtatatggagttgtcacaaaagctttacaaatattgtccaaaagaatggaagaaagaggccagcaagggtatcgaccaatttgggcctcctatgatcatccacttccgtgtgcagtactatgtggaaaatggcagattgatcagtgacagagcagcaagatactattattactggcacctgagaaaacaagttcttcattctcagtgtgtgctccgagaggaggcctacttcctgctggcagcctttgccctgcaggctgatcttgggaacttcaaaaggaataagcactatggaaaatacttcgagccagaggcttacttcccatcttgggttgtttccaagagggggaaggactacatcctgaagcacattccaaacatgcacaaagatcagtttgcactaacagcttccgaagctcatcttaaatatatcaaagaggctgtccgactggatgacgtcgctgttcattactacagattgtataaggataaaagggaaattgaagcatcgctgactcttggattgaccatgaggggaatacagatttttcagaatttagatgaagagaaacaattactttatgatttcccctggacaaatgttggaaaattggtgtttgtgggtaagaaatttgagattttgccagatggcttgccttctgcccggaagctcatatactacacggggtgccccatgcgctccagacacctcctgcaacttctgagcaacagccaccgcctctatatgaatctgcagcctgtcctgcgccatatccggaagctggaggaaaacgaagagaagaagcagtaccgggaatcttacatcagtgacaacctggacctcgacatggaccagctggaaaaacggtcgcgggccagcgggagcagtgcgggcagcatgaaacacaagcgcctgtcccgtcattccaccgccagccacagcagttcccacacctcgggcattgaggcagacaccaagccccgggacacggggccagaagacagctactccagcagtgccatccaccgcaagctgaaaacctgcagctcaatgaccagtcatggcagctcccacacctcaggggtggagagtggcggcaaagaccggctggaagaggacttacaggacgatgaaatagagatgttggttgatgacccccgggatctggagcagatgaatgaagagtctctggaagtcagcccagacatgtgcatctacatcacagaggacatgctcatgtcgcggaagctgaatggacactctgggttgattgtgaaagaaattgggtcttccacctcgagctcttcagaaacagttgttaagcttcgtggccagagtactgattctcttccacagactatatgtcggaaaccaaagacctccactgatcgacacagcttgagcctcgatgacatcagactttaccagaaagacttcctgcgcattgcaggtctgtgtcaggacactgctcagagttacacctttggatgtggccatgaactggatgaggaaggcctctattgcaacagttgcttggcccagcagtgcatcaacatccaagatgcttttccagtcaaaagaaccagcaaatacttttctctggatctcactcatgatgaagttccagagtttgttgtgtaaagtccgtctgtgtgcagctgtacaggcagcttactgtttgctagaggatgcgaaagtcataagttctttacatattacttgtgccatatcttcttcaccctaaacatagctctttctttataatatttgtgatgatggaaacaaaagccttggaacaattgcactttaagtattacacagaagtaaaagaactacagaaaatgtacagcaagacaagtgcccggaagttcactgatccttcagaaggaaatgcgctttactgattgcaaagccttcagaatattggagtgtggtgtgtttgctcatctgatgctttttagttcagttacatgtaacatcacatttttttatcacgtgaaagatgttagatttgtttgcttataaattttttaccactcccacataaaatgctcatagtttgggagaggaaagagggaagattctctcttcttttaacagagagatgattgctctgtatacccattgcttcctccctgaggctgtcccaaagtgaacactgatggagtggtcaaaatcataaggttgtagcaagccaaagatacgtatgtgacagaagcacataagcaataagcagaaaaccagaagtgcatgctgtgatgcctgtgactccttcatcccgctcagtgccatgtcctcttttgtgatcttccagaaagctccaggattcatttgagttccacatccaagtaacagatgaattatattcatgttgtaatgcattttgtggagtttacaaaaccagtgtctgttaaaactttggaaaatgtcttagaaaacgttggtgcttggtgatgctttatttgtttaattatcaagaacaaattatggcaatgctagtttctgcttaaccaaaatactctgtgtatatattatacatatataaatacatgggattgtgtatgtctatatgtgtttaaagcttactatgtcttcattttggcttccatgactatcttttatacatggaattccttaagattgagaatatgtcactgagtgaatgatacctgcagacagtcagttgatatatgtagagttcagaatgactgttttctcatgtgcctttggccatgattctcaacactgattgtataacagaattttggggggagcttttaaaaaataatgactgagtctcccaccagaccgattacatcattctcttgtggcgggacccaagtagaattgccttttcttttaaagttctccagatggagctaatatgcaacaaagttgaaaaccactgatcctgggggtgtcttgttaattttgaagtaaaagtgtacagaagacgtagtgtatgagaaagggccatttttaagacagttacctgttgtgctgctgttacaatatataatgaaaccaagtcaggggagtgaatttatcaatcttttgatgtaaagtaaaaacgtagttcacacttcaggagagaacttcatagcacaatgtctttctataagatatttttaatgatttagtattttacaacatttgtttaccatattttgatataccatttttttctatctgcccagttttattaaaaaaactatatattattttctaaagaaacaatcatatttttatacaaaattatgttttcaggtaacgaaatagatgtagggtacagtggaacataagcagtgttacccctggctgggagtcagtattatacaacaaatggtgagctggaacatgccctgtctgtgctgtccctcctgtgctgggtcgcggatgtgtaggcaacattgccttatcacgctaggttcacctgacactttaaaaggaaaaaaagttccatagagttctgtggtcacaaaattgttttgcttttatcaaatactttaatagaaccaaagttgcagatattggaatgtatggaagtatctcagtctctgcataagaggattaaagtatgaaaggatcatttaatgactgttttacttataagtcattaagtaatccaccatttcttatggatgatgcttaagcctggtgaggtttgtactctaaggagcccagatcataatgcagtgcatttccttagcccttagagtttcttgcaaacatttaaaaaaagacatatttaagaaagaaagataaagaaaaaacatatttaattactgtaaacaggtactgctttatgtttattttctctctacttcaaccaaaatcagatctttgaggttttgctgacattgttggtggttttgcacatgttctttctaattggatttatgaatagttctatgggttttcaaagatgaatcatgctaagaacacttctgctttttgatccactgtttgcagcagaattatatatatgtataggaaaaatccactttgaataatccatgttttgtatttggaaattgtttttaaaaataaaaaggaaaggaaatatataaa

SEQ ID NO: 293226 - DNA, 4828 bp, Artificial Sequence
  derived and/or modified sequence
ggggcggggcggacgcggagcgcccctctggctggcggggccaaggggctgagaggagtggggcaggctcggcgccggtaggaagagtcagaggggtgaccagagagcccaacgcctggtgctcaagactttctccgagctatgaaacccacgtagtcgaacaccgtgatgcttctcctgcagggcgtgtgatgaggaggcgagcttggctttggagtgctgggaacctgaggaattgccaaggacccagagcccagccctgaccaccagagtgcccaaaacacaatgaacaaattgaattttcataacaacagagtcatgcaagaccgccgcagtgtgtgcattttccttcccaacgatgaatctctgaacatcatcataaatgttaagattctgtgtcaccagttgctggtccaggtttgtgacctgctcaggctaaaggactgccacctctttggactcagtgttatacaaaataatgaacatgtgtatatggagttgtcacaaaagctttacaaatattgtccaaaagaatggaagaaagaggccagcaagggtatcgaccaatttgggcctcctatgatcatccacttccgtgtgcagtactatgtggaaaatggcagattgatcagtgacagagcagcaagatactattattactggcacctgagaaaacaagttcttcattctcagtgtgtgctccgagaggaggcctacttcctgctggcagcctttgccctgcaggctgatcttgggaacttcaaaaggaataagcactatggaaaatacttcgagccagaggcttacttcccatcttgggttgtttccaagagggggaaggactacatcctgaagcacattccaaacatgcacaaagatcagtttgcactaacagcttccgaagctcatcttaaatatatcaaagaggctgtccgactggatgacgtcgctgttcattactacagattgtataaggataaaagggaaattgaagcatcgctgactcttggattgaccatgaggggaatacagatttttcagaatttagatgaagagaaacaattactttatgatttcccctggacaaatgttggaaaattggtgtttgtgggtaagaaatttgagattttgccagatggcttgccttctgcccggaagctcatatactacacggggtgccccatgcgctccagacacctcctgcaacttctgagcaacagccaccgcctctatatgaatctgcagcctgtcctgcgccatatccggaagctggaggaaaacgaagagaagaagcagtaccgggaatcttacatcagtgacaacctggacctcgacatggaccagctggaaaaacggtcgcgggccagcgggagcagtgcgggcagcatgaaacacaagcgcctgtcccgtcattccaccgccagccacagcagttcccacacctcgggcattgaggcagacaccaagccccgggacacggggccagaagacagctactccagcagtgccatccaccgcaagctgaaaacctgcagctcaatgaccagtcatggcagctcccacacctcaggggtggagagtggcggcaaagaccggctggaagaggacttacaggacgatgaaatagagatgttggttgatgacccccgggatctggagcagatgaatgaagagtctctggaagtcagcccagacatgtgcatctacatcacagaggacatgctcatgtcgcggaagctgaatggacactctgggttgattgtgaaagaaattgggtcttccacctcgagctcttcagaaacagttgttaagcttcgtggccagagtactgattctcttccacagactatatgtcggaaaccaaagacctccactgatcgacacagcttgagcctcgatgacatcagactttaccagaaagacttcctgcgcattgcaggtctgtgtcaggacactgctcagagttacacctttggatgtggccatgaactggatgaggaaggcctctattgcaacagttgcttggcccagcagtgcatcaacatccaagatgcttttccagtcaaaagaaccagcaaatacttttctctggatctcactcatgatgaagttccagagtttgttgtgtaaagtccgtctgtgtgcagctgtacaggcagcttactgtttgctagaggatgcgaaagtcataagttctttacatattacttgtgccatatcttcttcaccctaaacatagctctttctttataatatttgtgatgatggaaacaaaagccttggaacaattgcactttaagtattacacagaagtaaaagaactacagaaaatgtacagcaagacaagtgcccggaagttcactgatccttcagaaggaaatgcgctttactgattgcaaagccttcagaatattggagtgtggtgtgtttgctcatctgatgctttttagttcagttacatgtaacatcacatttttttatcacgtgaaagatgttagatttgtttgcttataaattttttaccactcccacataaaatgctcatagtttgggagaggaaagagggaagattctctcttcttttaacagagagatgattgctctgtatacccattgcttcctccctgaggctgtcccaaagtgaacactgatggagtggtcaaaatcataaggttgtagcaagccaaagatacgtatgtgacagaagcacataagcaataagcagaaaaccagaagtgcatgctgtgatgcctgtgactccttcatcccgctcagtgccatgtcctcttttgtgatcttccagaaagctccaggattcatttgagttccacatccaagtaacagatgaattatattcatgttgtaatgcattttgtggagtttacaaaaccagtgtctgttaaaactttggaaaatgtcttagaaaacgttggtgcttggtgatgctttatttgtttaattatcaagaacaaattatggcaatgctagtttctgcttaaccaaaatactctgtgtatatattatacatatataaatacatgggattgtgtatgtctatatgtgtttaaagcttactatgtcttcattttggcttccatgactatcttttatacatggaattccttaagattgagaatatgtcactgagtgaatgatacctgcagacagtcagttgatatatgtagagttcagaatgactgttttctcatgtgcctttggccatgattctcaacactgattgtataacagaattttggggggagcttttaaaaaataatgactgagtctcccaccagaccgattacatcattctcttgtggcgggacccaagtagaattgccttttcttttaaagttctccagatggagctaatatgcaacaaagttgaaaaccactgatcctgggggtgtcttgttaattttgaagtaaaagtgtacagaagacgtagtgtatgagaaagggccatttttaagacagttacctgttgtgctgctgttacaatatataatgaaaccaagtcaggggagtgaatttatcaatcttttgatgtaaagtaaaaacgtagttcacacttcaggagagaacttcatagcacaatgtctttctataagatatttttaatgatttagtattttacaacatttgtttaccatattttgatataccatttttttctatctgcccagttttattaaaaaaactatatattattttctaaagaaacaatcatatttttatacaaaattatgttttcaggtaacgaaatagatgtagggtacagtggaacataagcagtgttacccctggctgggagtcagtattatacaacaaatggtgagctggaacatgccctgtctgtgctgtccctcctgtgctgggtcgcggatgtgtaggcaacattgccttatcacgctaggttcacctgacactttaaaaggaaaaaaagttccatagagttctgtggtcacaaaattgttttgcttttatcaaatactttaatagaaccaaagttgcagatattggaatgtatggaagtatctcagtctctgcataagaggattaaagtatgaaaggatcatttaatgactgttttacttataagtcattaagtaatccaccatttcttatggatgatgcttaagcctggtgaggtttgtactctaaggagcccagatcataatgcagtgcatttccttagcccttagagtttcttgcaaacatttaaaaaaagacatatttaagaaagaaagataaagaaaaaacatatttaattactgtaaacaggtactgctttatgtttattttctctctacttcaaccaaaatcagatctttgaggttttgctgacattgttggtggttttgcacatgttctttctaattggatttatgaatagttctatgggttttcaaagatgaatcatgctaagaacacttctgctttttgatccactgtttgcagcagaattatatatatgtataggaaaaatccactttgaataatccatgttttgtatttggaaattgtttttaaaaataaaaaggaaaggaaatatataaagctgttatttattctgcatttcttacatatctatcgcttgtcagtatacccgttttggtatatattgcctctgcacatctacatttgtatatgcaacagtgagctttatatctacataaactgtaaataatcctttctgtgaaaggatcatcatatcaagatgataccaaaagtatgtaaaaagaaacctgcattattttgtaattatttcttatagatatttcatggtaagattagcagtcaataaagttacttttttgcctttaaa

SEQ ID NO: 293227 - DNA, 1679 bp, Artificial Sequence
  derived and/or modified sequence
agaggctgggaagtccgggattgaggggccagcatctaccaagggccttcttgttacttcatcccatgatggaaggtggaagggtaaagagaggagaagaagcagtaccgggaatcttacatcagtgacaacctggacctcgacatggaccagctggaaaaacggtcgcgggccagcgggagcagtgcgggcagcatgaaacacaagcgcctgtcccgtcattccaccgccagccacagcagttcccacacctcgggcattgaggcagacaccaagccccgggacacggggccagaagacagctactccagcagtgccatccaccgcaagctgaaaacctgcagctcaatgaccagtcatggcagctcccacacctcaggggtggagagtggcggcaaagaccggctggaagaggacttacaggacgatgaaatagagatgttggttgatgacccccgggatctggagcagatgaatgaagagtctctggaagtcagcccagacatgtgcatctacatcacagaggacatgctcatgtcgcggaagctgaatggacactctgggttgattgtgaaagaaattgggtcttccacctcgagctcttcagaaacagttgttaagcttcgtggccagagtactgattctcttccacagactatatgtcggaaaccaaagacctccactgatcgacacagcttgagcctcgatgacatcagactttaccagaaagacttcctgcgcattgcaggtctgtgtcaggacactgctcagagttacacctttggatgtggccatgaactggatgaggaaggcctctattgcaacagttgcttggcccagcagtgcatcaacatccaagatgcttttccagtcaaaagaaccagcaaatacttttctctggatctcactcatgatgaagttccagagtttgttgtgtaaagtccgtctgtgtgcagctgtacaggcagcttactgtttgctagaggatgcgaaagtcataagttctttacatattacttgtgccatatcttcttcaccctaaacatagctctttctttataatatttgtgatgatggaaacaaaagccttggaacaattgcactttaagtattacacagaagtaaaagaactacagaaaatgtacagcaagacaagtgcccggaagttcactgatccttcagaaggaaatgcgctttactgattgcaaagccttcagaatattggagtgtggtgtgtttgctcatctgatgctttttagttcagttacatgtaacatcacatttttttatcacgtgaaagatgttagatttgtttgcttataaattttttaccactcccacataaaatgctcatagtttgggagaggaaagagggaagattctctcttcttttaacagagagatgattgctctgtatacccattgcttcctccctgaggctgtcccaaagtgaacactgatggagtggtcaaaatcataaggttgtagcaagccaaagatacgtatgtgacagaagcacataagcaataagcagaaaaccagaagtgcatgctgtgatgcctgtgactccttcatcccgctcagtgccatgtcctcttttgtgatcttccagaaagctccaggattcatttgagttccacatccaagtaacagatgaattatattcatgttgtaatgca

SEQ ID NO: 293228 - DNA, 569 bp, Artificial Sequence
  derived and/or modified sequence
tcaagactttctccgaggtatgaacaagaaccaggcgtctgggccctttccgctcgccccatcgctcagccgccgcgccccggacgcccgctgtgccccctgccggcggggcggcggcgggactgggtttcgggagggtttctggaagtcgcgagtcccagcgaaggcagtgcaccgctctccgcctctttcttcgccttcttctcgctcccttagctctgggtgtcgggcaccggtgctatgaaacccacgtagtcgaacaccgtgatgcttctcctgcagggcgtgtgatgaggaggcgagcttggctttggagtgctgggaacctgaggaattgccaaggacccagagcccagccctgaccaccagagtgcccaaaacacaatgaacaaattgaattttcataacaacagagtcatgcaagaccgccgcagtgtgtgcattttccttcccaacgatgaatctctgaacatcatcataaatgttaagattctgtgtcaccagttgctggtccaggtttgtgacctgctcaggctaaaggactgccacctctttggactcagtgttat

SEQ ID NO: 293229 - DNA, 1845 bp, Artificial Sequence
  derived and/or modified sequence
atgaataaactgaacttccacaacaatcgggttatgcaggaccgtaggtcagtctgtatattcctccctaatgacgaaagcctcaacatcatcatcaatgtgaaaatcctatgccaccagctgttggtccaagtctgcgatttattgcggctcaaggactgtcacctattcggcctgtcggtcatacagaataacgagcacgtgtatatggagctgagccaaaaattgtataaatactgtccaaaggaatggaaaaaggaagccagcaaaggaatagatcagttcggtccacctatgattattcattttcgcgtgcaatactatgtggaaaatggcaggctgatttctgacagagcagcacggtactactattactggcacctgcgaaaacaggtgctgcatagtcaatgcgtgttaagagaagaggcttatttcctgttagcggcgttcgcactgcaggctgacctgggtaatttcaagagaaacaaacactatgggaagtattttgaacccgaggcgtatttcccttcctgggtagtcagcaaacgtggcaaagactatatactgaaacatattcctaatatgcacaaagatcaattcgcgctgacagctagtgaagctcaccttaaatacatcaaggaggccgtacgcctggatgacgtggcagttcactactatagactctataaggacaaacgagaaattgaagcatcactgaccctgggactcaccatgcgcggaatacagatctttcaaaatctcgatgaagaaaagcagcttctatatgatttcccctggacgaatgtcggcaagttggtgtttgttggcaaaaagttcgaaatcctccccgacggacttcctagcgcacgtaagctgatctactatactgggtgtcctatgagatctcgtcatctacttcagctactatctaatagtcatcgcctttacatgaacctccagcctgtgctgagacacattcgcaagttggaggaaaacgaggagaaaaaacagtatcgcgagtcctacattagcgataatctcgacctggacatggatcaactggaaaagcggagccgcgcttcaggctcttctgcaggaagtatgaaacataaaaggttaagccgacactctactgcttcacactctagtagccacacgagcgggatagaggcagatacgaaaccccgcgatactgggcccgaggacagctattctagttccgccattcataggaaactcaagacatgctcatcaatgacatctcacggatcgtctcatacatcgggagtcgaatcaggcggaaaggataggctcgaggaggacttacaggacgatgagatcgaaatgctcgttgatgacccgcgggatctggagcagatgaatgaggaaagcttggaggtcagccctgacatgtgcatatatattaccgaggatatgctgatgtctagaaagctgaacggtcattcaggacttatcgtaaaagaaattggcagtagcacctctagctcctcagaaacagtggtgaagctgaggggccagagtacagattcattgccccagacgatttgtcgcaagcctaaaacttccaccgaccgacatagcctatcccttgatgatattcggctataccagaaagatttcctgcgaatcgcaggtctgtgccaggacaccgctcagtcatacaccttcgggtgcggccacgagttagacgaggaaggattgtactgcaactcatgccttgctcagcaatgcatcaatatacaggacgctttccccgttaaaaggacatccaaatacttctctttagatctgactcacgacgaagtgccggagttcgttgtatag

SEQ ID NO: 293230 - DNA, 1845 bp, Artificial Sequence
  derived and/or modified sequence
atgaataaactgaacttccataacaatcgagtgatgcaggacaggaggtccgtgtgcatctttctacccaatgacgagagcctgaatattattataaatgttaagattctgtgccaccagcttcttgtgcaggtgtgcgacttgctgaggctcaaggactgccacctgttcggactgagcgttatacaaaacaacgaacacgtctacatggaattgtcccaaaaattatacaagtactgtcctaaggagtggaaaaaggaggcttctaagggaatcgatcagtttgggcctcccatgataatccatttcagggtgcagtactatgtggagaatgggcggctaatctctgatagggctgccagatactattattattggcacctgagaaaacaggtgctccactctcagtgtgtactcagggaggaggcatatttcttgctggcggcctttgccctgcaggcggatctggggaattttaagcgcaacaagcactatgggaaatacttcgaacccgaggcttacttcccgagttgggttgtttctaagaggggcaaagactatatactcaagcacatcccgaacatgcacaaagatcagtttgcattaaccgcttcggaggctcatctgaagtacattaaagaagctgttagattggacgacgtagcagtccattactatagactgtataaggataagagggagatagaggcgagtcttacgctcgggctcacaatgcgtgggatccagatatttcaaaatctcgacgaagagaagcaactcctgtatgattttccctggactaacgtggggaaactggttttcgtcggtaaaaaattcgaaatcttgccggacggcctgccctcagcccggaaactgatttactacacaggatgtccgatgcggagcagacacctgctgcagttgctgagcaactcccacagattatacatgaatctgcagccagttctgcgacacatcaggaaactggaggagaacgaggagaagaaacaatatcgggagtcttacatttcggataatctggatttggacatggaccagctcgaaaagagatctcgcgcctctggatccagcgctgggtctatgaagcacaagaggcttagcagacactccacagcatcacatagtagtagccacacctcaggcatcgaggctgatacgaagcctagagatactggaccagaggactcctattcctctagcgctatacatcggaagttaaagacatgctcgtcaatgacctcgcatggctccagccataccagcggtgtcgagagcggtggaaaggataggctggaggaggacctccaagacgacgaaattgagatgttggtagatgaccccagggacctggaacagatgaacgaagaaagtttggaagtgagtccggatatgtgtatctatataaccgaggacatgctgatgagccggaagcttaacggacatagcggacttatcgtgaaggaaatcgggtcctcaacgagtagttcaagtgagactgtggttaagctccggggccagtcaacagatagtttgccccagacaatatgtaggaagccaaaaacatcaactgaccggcactccctaagtctggacgacataagactttaccagaaagattttcttcggatcgccgggttgtgccaagatactgcccaatcctacacgttcgggtgcggccacgagttggacgaggaaggcctctattgcaacagttgtcttgcccaacagtgcattaacatccaggacgcattccctgtgaaacgtacatccaagtatttcagtctggacctgacccacgatgaggtgccagagttcgttgtctag

SEQ ID NO: 293231 - DNA, 186 bp, Artificial Sequence
  derived and/or modified sequence
atgaacaagttaaacttccacaataacagagtaatgcaagaccggcggagtgtatgtattttcctccctaacgacgaaagtctgaatatcataatcaacgtaaagatcctctgtcatcagttattagtgcaagtgtgcgacctgctaagattgaaggattgtcatttgtttgggctgtccgtatag

SEQ ID NO: 293232 - DNA, 1845 bp, Artificial Sequence
  derived and/or modified sequence
atgaacaagctgaacttccacaacaacagagtgatgcaggacagaagatctgtgtgcatcttcctgcccaatgatgagagcctgaacatcatcatcaacgtgaagatcctgtgccaccagctgctggtgcaggtgtgtgacctgctgcggctgaaggactgccacctgtttggcctgagcgtcatccagaacaatgaacatgtgtacatggagctgagccagaagctgtacaagtactgccccaaggagtggaagaaggaggccagcaagggcatcgaccagtttggaccacccatgatcatccacttccgggtgcagtactacgtggagaatggccgcctcatcagtgacagagctgcccgctactactactactggcacctgaggaagcaggtgctgcacagccagtgtgtgctgcgggaggaggcctacttcctgctggccgcctttgccctgcaggccgacctgggcaacttcaagaggaacaagcactacggcaagtactttgagcctgaggcctacttccccagctgggtggtgtccaagaggggcaaggactacatcctgaagcacatccccaacatgcacaaggaccagtttgccctgacagccagcgaggcccacctgaagtacatcaaggaggccgtgcggctggatgatgtggccgtgcactactaccgcctgtacaaggacaagcgggagattgaggccagcctgaccctgggcctgaccatgaggggcatccagatcttccagaacctggatgaggagaagcagctgctgtatgacttcccctggaccaacgtgggcaagctggtgtttgtgggcaagaagtttgagatcctgcctgatggcctgcccagcgccaggaagctgatctactacacaggctgccccatgaggagccgccacctgctgcagctgctgagcaacagccaccggctgtacatgaacctgcagcctgtgctgcggcacatcaggaagctggaggagaatgaggagaagaagcagtaccgggagagctacatcagtgacaacctggacctggacatggaccagctggagaagaggagccgggccagcggcagcagcgctggctccatgaagcacaagaggctgagccgccacagcacagccagccacagcagcagccacaccagcggcattgaagctgacaccaagccccgggacaccggcccagaagattcctacagcagcagcgccatccacaggaagctgaagacctgcagctccatgaccagccacggcagcagccacaccagcggcgtggagagcggcggcaaggaccggctggaggaggacctgcaggatgatgaaattgagatgctggtggatgacccccgggacctggagcagatgaatgaggagagcctggaggtgtccccagacatgtgcatctacatcacagaggacatgctgatgagcaggaagctgaatggccacagcggcctcatcgtgaaggagatcggcagcagcaccagcagcagcagcgagaccgtggtgaagctgcggggccagagcacagacagcctgccccagaccatctgcaggaagcccaagaccagcacagacagacacagcctgagcctggatgacatccggctgtaccagaaggacttcctgagaattgctggcctgtgccaggacacagcccagagctacaccttcggctgcggccacgagctggatgaggagggcctgtactgcaacagctgcctggcccagcagtgcatcaacatccaggatgccttccctgtgaagaggaccagcaagtacttcagcctggacctgacccatgatgaggtgcctgagtttgtggtgtag

SEQ ID NO: 293233 - DNA, 186 bp, Artificial Sequence
  derived and/or modified sequence
atgaacaagctgaacttccacaacaacagagtgatgcaggacagaagatctgtgtgcatcttcctgcccaatgatgagagcctgaacatcatcatcaacgtgaagatcctgtgccaccagctgctggtgcaggtgtgtgacctgctgcggctgaaggactgccacctgtttggcctgtctgtgtag

SEQ ID NO: 293234 - DNA, 1845 bp, Artificial Sequence
  derived and/or modified sequence
atgaacaagctgaacttccacaacaaccgggtgatgcaggaccggaggagtgtctgtattttcttacccaacgatgagtccctgaatattattatcaacgtcaaaattttgtgccatcaattgctggtccaagtgtgtgatttgctgagactcaaggactgtcacctcttcggtctgagtgtgatccagaacaatgaacacgtctatatggagctgagtcaaaagttgtataagtactgccctaaggaatggaaaaaagaggctagcaagggaattgaccagttcgggccacctatgataatccactttcgcgtccagtactacgtagagaacggtaggctgatttccgatcgagctgcccgctactattactattggcatctccgcaaacaggtgctgcactctcagtgcgtgctccgcgaggaggcctactttctgctcgccgcattcgcgttgcaggctgatttgggcaacttcaaacgtaataaacattacgggaagtacttcgagcctgaagcatatttcccgagctgggtcgttagcaaaagaggaaaggattacatattgaaacacatccccaacatgcacaaggatcagtttgctctaaccgcgtctgaggcacacctgaaatatattaaggaggcagtgagacttgacgacgtcgccgtccattattatcggctgtacaaagacaagagagagattgaggccagtctgaccctgggtctgaccatgcgcggcatccagatttttcagaatctggatgaggagaaacaattgctgtatgatttcccctggacaaacgtagggaaactggtgttcgttggcaagaaattcgaaatcttacccgacggtcttccaagtgcccgaaaacttatatactatacaggctgccctatgcggagccgacaccttctgcaactgctgtctaatagtcaccgcctgtatatgaacctgcagcccgtgctgagacacatccggaaactcgaagagaacgaagagaaaaaacagtacagagagtcatacatctctgataacttggatctcgacatggatcagctggagaagcgatccagagccagcggatcaagtgccggttccatgaaacataaaagactgagccggcatagcaccgccagccatagctcctctcacacatcaggcatcgaggctgacacgaagccccgcgacaccgggccagaagacagttatagttcatccgcgatccatcgcaagctcaagacatgcagctccatgacctcacatggatcttcccacacttcgggggtggaatccggcggcaaggatagacttgaagaggacctacaagacgatgagatcgagatgttggtcgatgatccccgcgacctggagcaaatgaacgaggagagtctggaggtttcccccgatatgtgcatatatataacagaagacatgctgatgtctagaaaactcaacgggcattctggcttgattgtaaaagagattgggagctctacaagctcctcctctgagactgtagtcaagctgaggggtcagagcaccgatagcctgccgcagaccatctgtcgcaagcccaagacatcgacagacagacattcgctgtccttggacgacatcagattgtatcagaaggattttcttaggatagcaggtctatgtcaggacaccgctcagtcctatactttcggctgtggccatgagctggacgaggagggactgtactgcaactcatgcctcgctcagcaatgtattaacattcaggacgcgtttccagtcaaaagaacttcaaagtattttagccttgatctgacccatgacgaggtgccagagtttgttgtatag

SEQ ID NO: 293235 - DNA, 1845 bp, Artificial Sequence
  derived and/or modified sequence
atgaacaagctgaacttccacaacaaccgggtgatgcaggaccggagatccgtgtgcattttcctgcccaatgatgaaagtctcaacattatcataaacgttaagattctctgtcaccaactgctggtgcaggtctgcgatctactgcggctcaaggattgccacctcttcgggttgtctgtgattcagaacaacgaacatgtttacatggaactgtctcaaaagttatacaagtattgcccaaaggagtggaagaaggaagctagcaaaggcattgatcagtttggccctccaatgataatccacttccgggtgcaatattatgtggaaaatggccggctgatctctgacagggctgcccggtattactattactggcacctcaggaagcaggtgttgcattcccagtgtgtgctgagagaggaagcctatttcctcctggcggctttcgctcttcaggcagatttagggaatttcaaacgtaacaagcattacgggaaatacttcgagccagaggcctacttccctagctgggtggtgtccaagagaggaaaggattacattttgaaacacatcccgaatatgcacaaggaccaattcgctctcaccgcgtcagaggcacacctcaagtatatcaaagaggccgtacgactggacgacgtcgctgtccactattataggctgtataaagataaaagggagattgaagcaagcctcacattaggccttacaatgcggggtattcagatctttcagaaccttgatgaggaaaagcaactcctctatgacttcccctggacaaatgttggaaaacttgtttttgtcggcaaaaagtttgagatccttccagacggcctccctagcgctaggaagctgatatattatactgggtgccctatgaggtccaggcacttgctgcagttactatccaattctcaccgcctctatatgaatctccagccagtgctgcgccacatcagaaaactcgaggagaacgaagaaaaaaagcagtatcgtgagtcttatatctcggataatctcgatctggatatggaccagctcgagaagcgatctagagcgtccggttcaagcgccggatccatgaagcacaagcgactgagccgtcattccactgcttcacactcttcttctcacactagcggtattgaagccgacacaaaaccgcgggacacaggccctgaagacagttattcatccagcgccatccatcgaaagttaaagacgtgtagctccatgaccagccacggctccagccatacaagcggggtggagagtgggggcaaagataggctcgaagaggacttgcaagacgacgagattgaaatgctggtcgacgaccctcgggacctagagcagatgaacgaagagagccttgaggtttctccagacatgtgcatttatattacggaggacatgctgatgtcgaggaagttaaacgggcacagcggactgattgtcaaggagatcggtagcagtacaagtagctcatccgaaacagtggttaaattaagaggccagtctacagattccctgccccaaacgatctgcaggaagcccaaaactagcactgatagacattcgctctcactcgatgacatccgcctctaccagaaagactttttgcgaatcgccgggctctgtcaggacacagcgcagtcatatacctttggctgcggtcacgaattagatgaggagggactgtattgcaatagctgtctggcccaacagtgtataaacattcaagacgctttccccgtgaagagaacttccaagtacttctcacttgatctcacccacgacgaagttcccgagtttgtggtgtag

SEQ ID NO: 293236 - DNA, 186 bp, Artificial Sequence
  derived and/or modified sequence
atgaacaagctgaacttccacaacaaccgggtgatgcaggaccggaggagtgtttgcattttccttccgaacgatgaatctctgaatataattattaatgtcaaaatcctgtgtcaccagctgctggtccaggtctgcgacctgttgagacttaaagactgccatctgttcggactctcagtttag

SEQ ID NO: 293237 - DNA, 1845 bp, Artificial Sequence
  derived and/or modified sequence
atgaataagttaaactttcacaataatcgggtcatgcaggatagaaggtcagtgtgcattttcctgccgaatgacgaatcgctcaatataatcattaacgtgaaaatcctgtgtcaccaattactagtgcaggtgtgtgacttactgagactgaaggattgccacctgtttgggctgtctgttattcagaataatgaacacgtgtacatggaattatcccagaaactctacaagtactgtcccaaggaatggaagaaggaggccagtaaagggatcgaccagttcggtccccctatgatcatccacttccgggtgcaatattatgtggaaaatgggaggctgatctcagatcgcgctgcccgttattattattactggcacttgcgcaagcaggtgctgcactcacaatgcgtcctgagagaagaggcctattttttgctggccgcatttgcactgcaagccgaccttggcaactttaaacgcaacaagcattacggcaagtactttgaacctgaagcgtactttccctcgtgggtcgtatccaaacggggaaaagactacattcttaaacatattcctaacatgcacaaagaccagttcgcgctcaccgcctctgaggctcatctgaagtacattaaagaggctgtgcgactcgatgatgtggccgtgcactactaccggctatataaggacaagagggaaatcgaagcatcactgacacttgggttgaccatgcgagggatccagatcttccagaatctggatgaagagaagcaactgctttacgactttccttggacaaacgtcggaaagctcgtattcgtgggaaaaaaatttgagatcctgcctgacgggttgccctccgccaggaagctgatttactatacaggatgccccatgagaagccggcatttactgcagctcctgagtaactcacaccgactctatatgaatctccaacctgtacttcgccatatccgcaagctggaggagaatgaggagaagaagcaatatcgggaatcctatattagtgataacttggacctggacatggatcagttagagaagcggagccgcgctagcgggtctagcgctggctccatgaagcacaagagactctctcgacatagtacagcctcccactcttcttcacataccagcgggatcgaagcagacacaaaacccagagatacaggccctgaagactcatacagctcttctgccatacatagaaagcttaaaacctgttcttcgatgacgagtcatggcagcagtcacacctctggagttgagtctggcggaaaagatagactcgaagaagacctccaggatgacgagatcgagatgcttgtggacgacccaagagacctggaacagatgaatgaggagagtctggaggtttcgccagatatgtgcatttacatcaccgaggatatgctgatgtcgcgaaagctgaacggccatagcggattgatcgtgaaggagattggctcctcaacgtcttcgagttcagagacagttgttaagctgagaggtcagtctacagactctctgccacagaccatctgtcggaagcccaagactagtacagatcgacattctttgagtctcgacgatatacggctgtatcagaaggattttctccgaatcgcagggctctgccaggacactgcgcagtcatacaccttcggttgcggccacgaactggatgaagaaggactctattgtaactcatgtctggcgcagcagtgtattaacattcaagatgcatttcccgtgaagcggacttccaaatattttagcctggacctaactcacgatgaagtacccgaattcgtggtttag

SEQ ID NO: 293238 - DNA, 1845 bp, Artificial Sequence
  derived and/or modified sequence
atgaataagctcaactttcacaacaatcgtgtgatgcaagatagaagatccgtttgcattttcctccctaacgatgagtccctaaatataattattaatgtgaaaattttgtgccaccagctgctggtgcaggtgtgtgatcttctgagactgaaagactgtcacctttttggtctatcagtgatccagaacaatgagcatgtttacatggagctctctcagaagctgtataaatattgtcctaaagaatggaaaaaggaggcaagcaagggcatagaccagtttggcccacctatgatcattcacttcagggtacagtactatgttgagaacgggcgtttgatcagcgatcgcgcagctcgctactactattactggcaccttagaaagcaggtgctccattcacagtgcgttctcagggaagaggcttactttctcctcgccgctttcgcgctgcaggctgacctgggaaactttaagagaaataaacattacggtaaatattttgagccagaggcatattttccctcgtgggtggtgagtaaaagaggaaaagactatattcttaaacacattcctaatatgcacaaagatcagtttgcacttaccgcaagcgaggcacacttgaaatatatcaaggaagcagtgagactagatgatgtagctgtccattattatcgcttgtacaaagacaagcgtgaaattgaggcctccctgaccctcgggctgactatgcgaggcatccagatcttccagaatctagatgaggagaaacagttgctctatgactttccctggacaaacgtgggcaaattggtattcgtcggaaagaaattcgaaatcttgccggatgggctgccctccgccagaaagctcatctactataccgggtgtccaatgcgctctaggcatctgttacagctgctgagtaattctcataggttgtatatgaatctgcagccagtgctcagacatatccggaaactcgaagagaatgaagagaagaagcagtatagggaaagctacataagcgacaatctggatctggacatggatcagcttgaaaaacgcagcagggcatcaggctcctcagcgggatccatgaaacataagagactaagcaggcacagcacggcttcccattcgagctcccatacgagcgggatcgaggccgataccaaaccccgagataccggacccgaggatagttatagcagttccgccatccatcgcaaattgaaaacctgttctagtatgacgtcccatggatccagccacacaagcggggttgagtctggcggaaaggaccgcctggaggaagatctgcaagacgatgaaatagagatgctcgttgacgaccctagagacttggaacagatgaatgaggagtctctggaagtgtctccagacatgtgtatttacatcaccgaagatatgctgatgagccgcaagcttaacggccattctgggctaatcgtgaaggagatcggaagttcaacttccagttctagcgagaccgtggttaagctgcgcggacagtcaaccgacagcctgccccagactatctgccgaaaaccaaaaacatctaccgataggcattccctatctctggacgacattaggctctaccagaaggactttctgaggatcgcaggtttatgccaggataccgcccagtcatatacattcgggtgtggccatgaattggacgaagaaggcctgtattgtaactcctgccttgctcagcagtgcattaacatccaggacgcttttcctgtgaagcggacttctaaatatttctctttggacttgacgcacgatgaggtccccgaattcgtggtatag

SEQ ID NO: 293239 - DNA, 186 bp, Artificial Sequence
  derived and/or modified sequence
atgaataagctgaactttcacaacaaccgagttatgcaggaccgccgatcagtctgcatcttcctacccaacgacgaaagcttaaacattatcatcaatgtgaagattctctgccatcaattgttagtccaggtgtgtgatttgcttcgtttaaaggactgccatctgtttggtctctctgtttag

SEQ ID NO: 293240 - protein, 174 aa, Artificial Sequence
  derived and/or modified sequence
MVAGWPATPPAMMPGQIPDPSVTTGSLPGLGPLTGLPSSALTVEELKYADIRNLGAMIAPLHFLEVKLGKRPQPVKSELDEEEERRKRRREKNKVAAARCRNKKKERTEFLQRESERLELMNAELKTQIEELKQERQQLILMLNRHRPTCIVRTDSVKTPESEGNPLLEQLEKK

SEQ ID NO: 293241 - DNA, 4007 bp, Artificial Sequence
  derived and/or modified sequence
gccccagcccagccccgcggggaggctcccgcagcccagggacctcgagctttccccgcgccgggcgctgcagccgggcccctcccgcgaggcgcccggcagcctgaggcttccttttggttcccgccccgggacgggaggctccgtccgctccctggacagccggggtgctccctccttctccctcccgcgctctcctcccccgtccgtttgcagggaggtgctctcctcgggcggcggggaaggcggggctggcctgccactcctcctgctatgatgcctgggcagatcccggacccttcggtgaccacaggctccctgccagggcttggccccctgaccgggctccccagctcggccctgactgtggaggagctgaaatacgctgacatccgcaacctcggggccatgattgcacccttgcacttcctggaggtgaaactgggcaagaggccccagcccgtgaaaagtgagctagatgaggaagaggagcgaaggaaaaggcgccgggagaagaacaaagtcgcagcagcccgatgccggaacaagaagaaggagcgcacggagtttctgcagcgggaatccgagcggctggaactcatgaacgcagagctgaagacccagattgaggagctgaagcaggagcggcagcagctcatcctgatgctgaaccgacaccgccccacctgcatcgtccggaccgacagtgtcaagacccccgagtcagaaggcaacccactgctcgagcagctcgagaagaagtgaccatgggctgggaggaggtggaggaggaggaagaggagaaggaaaagtgacgaagagagaggaggaggggggccccagatggcccttcctttggtgcatgaaaaactgtacaatgaggttcagcacagccagcatcagccgagcttttttgtgaaactcagatcagccacccaggaggaagagcgggctgaggaaacccagagggaccaagcgctgagaccaaagttgaccctcgggtagggttgtcctgcctggggccccacttgaaggaggcaggacagaggcaccgaggccagggagacgcccaacgaggcagccctgggctcttctctggcctcttcaccagggcacccatccaaggaacctccgaacagccaggaaaagccatgagttgcaaccaaaacgcggctgaggatggaactcagaatgaaactgcaacccacctgcccccagccctgcccctcgccctgatgcgaagctggagaggggcgtgctgcggggccctgatgcccccacccacctcggtccagcgcggccctgcccaggaggcggcagccgggcgcaccctcgccagccctgctggagtttgctgtgggcactgaggcgcgggcgcccttccaaagcacatactcaccgaatgtttacagactggctgtcctggcagggctttcaactgcacatgttttttatactttcctttttttttttttttttaatattttttacaaaaaaaaagattttatacaagcaatatatatatggatttctataatcactcgatgtgatacagtataaatatgctatggtttgtttgttatgaacagatagccaccagttacggccgttgtgtgtaactcctaagtactgtagtctctgggtgtcgggggtggccagggcgggggcggggtgcatttccatccttgtaaacccttcatagtactcagtcctgtatcgctcagtaaacattgctcttacttacatagccgccttgcgtggtgtctgcctggggaatgggtgcaaggccctctcagggtcggagactgtttggagcctctgctataggcctgttcattttcacaacagctctcctatttcacagatgaggaagctaaggctcagagacattaagccacctgcagttactattttgagagcagtcagagtgttcgctcactctgcagatgttttctgagggcctgttgtgtgtgccaggccctgagaattcactggaggatgaaacagacctaagtcttgcccttgtggggcctccagtaaggagtgaatcctgtgcttgctccataagttgtctcatttcgtcttcatggcagccttgccagggaacagcacttgtccccaattcacagatggcgaattagaggtccagggaattaaactcgcagacaccatttgttgaagacttattttgtgacaagcagacatagtctcttcccttctcacaagagcacaaactaggcacgattcttctcattttacagatggtttaactgaggctcagagaaggtaagcgacttatccaaggtaacccagctagcaagggatagagctggtgtttgaactctccctccagaggcctgtgactctcctcctgtcaccaacccactatgattgtcctcatggttgaataggaagcttatgaggccacagttatagatttagtttctgggaaggctggatagagttccaggttgtcccatgatcacagagtgaaccaactaccctggtcaatgtgtgtctgacccagggaagggtgtggatggcttctctgccccctcacctcgacagctgaatccctgccacccagggccggagcagctcagtggcattcactcagtgcctgctgtgtacctggcactcggcagttctcaaggcatgtcacgcatgaggaaggcgggagaggtgtttttagcttccttgtatactgaagcttgcaaaggctacagtttacccaactaaacttgactcctgcattctaatcatgtgttctttctcctccatccctggacttaggataactagttgctggtgatgacttcgtgtcaagaacagcagtgaacctgggttgcttcccaaattgtggacgaggccttctgggatgggcagaagtggagaatggtgattaacacacctgtgatccctccctcgctcactcctctcagtttccctccacccaacacacttggtgtggactcccctgcaccccgccctagaaacaggacctggtcctctcactgtcagctgtggcagaaggttgtggcagcgggttgccttctgtctcgggggtcttgaggctgtcggtccggacgatgcaggtgaggcagtgtcagttctgcatcaggaacccctcgcgctgtaatcctttgatatttttcaagccatgagaaaaatgaagtggacttaccagggtccctccagtgacctagtggatgttcttacaggactgccgtgtgccactggctgtggcttccctggtcctgtgcttggccaccgggagctggcatctccaaaatagagcctccttagcctgtgcaggtgggctgtcttccaaagtcaccacaccagtgacttgtgctgtgcggagccttcctcaccaggaccactggctgctcctgtggctagaagtcacaattataggcttcattgcaagagccagcatttgagtttcttctgggcacctgccactgtgcatgtgtgacctcaactgctttgtgcaccctgactggggggtaggtgctagcgttccaacattacagatgagaaaaccgaggcacacagaagaggtaacctgcccaaggtcacaggtgttaggtggcagagccaagatgttattgtcagtctgacttcaggtgcataaaacctgaggctgagcctccccatgagaggaaaaatgtgtttgtggtgtgacctcagttgccagggaacttgtgcaggaagccgggagagatggcacagacccacctgtgctcacagtacatgttaagaattcccaagtctcaggcaaaccatctccaagggtgttcacagaagacacaccttaaaggcaaacgggttcatgatgtaatcttctattgactagctgtgaacctcatttttcttatctgtgaagtgggaacagtaataatccaagtctttttatggagttatcaagatcaaaaaaggaatggatatacaaagtgttttgtgaaataaaagctccctaaaatggtaaaaaaaaaaaaaaaaaa

SEQ ID NO: 293242 - DNA, 1700 bp, Artificial Sequence
  derived and/or modified sequence
ctgaagagggccttttgctgctcgccttcactctcagtcttggggccttccccatcatcttgcttctcgccttctggatctcctcgacttttggaagccgcgtgacctacgtcattcagattccaagagagaggtcatcctgggtgattccttagctccaagaagaggcttggtggttgattctccaagattcatggtagcaggctggcctgccactcctcctgctatgatgcctgggcagatcccggacccttcggtgaccacaggctccctgccagggcttggccccctgaccgggctccccagctcggccctgactgtggaggagctgaaatacgctgacatccgcaacctcggggccatgattgcacccttgcacttcctggaggtgaaactgggcaagaggccccagcccgtgaaaagtgagctagatgaggaagaggagcgaaggaaaaggcgccgggagaagaacaaagtcgcagcagcccgatgccggaacaagaagaaggagcgcacggagtttctgcagcgggaatccgagcggctggaactcatgaacgcagagctgaagacccagattgaggagctgaagcaggagcggcagcagctcatcctgatgctgaaccgacaccgccccacctgcatcgtccggaccgacagtgtcaagacccccgagtcagaaggcaacccactgctcgagcagctcgagaagaagtgaccatgggctgggaggaggtggaggaggaggaagaggagaaggaaaagtgacgaagagagaggaggaggggggccccagatggcccttcctttggtgcatgaaaaactgtacaatgaggttcagcacagccagcatcagccgagcttttttgtgaaactcagatcagccacccaggaggaagagcgggctgaggaaacccagagggaccaagcgctgagaccaaagttgaccctcgggtagggttgtcctgcctggggccccacttgaaggaggcaggacagaggcaccgaggccagggagacgcccaacgaggcagccctgggctcttctctggcctcttcaccagggcacccatccaaggaacctccgaacagccaggaaaagccatgagttgcaaccaaaacgcggctgaggatggaactcagaatgaaactgcaacccacctgcccccagccctgcccctcgccctgatgcgaagctggagaggggcgtgctgcggggccctgatgcccccacccacctcggtccagcgcggccctgcccaggaggcggcagccgggcgcaccctcgccagccctgctggagtttgctgtgggcactgaggcgcgggcgcccttccaaagcacatactcaccgaatgtttacagactggctgtcctggcagggctttcaactgcacatgttttttatactttcctttttttttttttttttaatattttttacaaaaaaaaagattttatacaagcaatatatatatggatttctataatcactcgatgtgatacagtataaatatgctatggtttgtttgttatgaacagatagccaccagttacggccgttgtgtgtaactcctaagtactgtagtctctgggtgtcgggggtggccagggcgggggcggggtgcatttccatccttgtaaacccttcatagtactcagtcctgtatcgctcagtaaacattgctcttacttacata

SEQ ID NO: 293243 - DNA, 5401 bp, Artificial Sequence
  derived and/or modified sequence
gccccagcccagccccgcggggaggctcccgcagcccagggacctcgagctttccccgcgccgggcgctgcagccgggcccctcccgcgaggcgcccggcagcctgaggcttccttttggttcccgccccgggacgggaggctccgtccgctccctggacagccggggtgctccctccttctccctcccgcgctctcctcccccgtccgtttgcagggaggtgctctcctcgggcggcggggaaggcggggctggcctgccactcctcctgctatgatgcctgggcagatcccggacccttcggtgaccacaggctccctgccagggcttggccccctgaccgggctccccagctcggccctgactgtggaggagctgaaatacgctgacatccgcaacctcggggccatgattgcacccttgcacttcctggaggtgaaactgggcaagaggccccagcccgtgaaaagtgagctagatgaggaagaggagcgaaggaaaaggcgccgggagaagaacaaagtcgcagcagcccgatgccggaacaagaagaaggagcgcacggagtttctgcagcgggaatccgagcggctggaactcatgaacgcagagctgaagacccagattgaggagctgaagcaggagcggcagcagctcatcctgatgctgaaccgacaccgccccacctgcatcgtccggaccgacagtgtcaagacccccgagtcagaaggcaacccactgctcgagcagctcgagaagaagtgaccatgggctgggaggaggtggaggaggaggaagaggagaaggaaaagtgacgaagagagaggaggaggggggccccagatggcccttcctttggtgcatgaaaaactgtacaatgaggttcagcacagccagcatcagccgagcttttttgtgaaactcagatcagccacccaggaggaagagcgggctgaggaaacccagagggaccaagcgctgagaccaaagttgaccctcgggtagggttgtcctgcctggggccccacttgaaggaggcaggacagaggcaccgaggccagggagacgcccaacgaggcagccctgggctcttctctggcctcttcaccagggcacccatccaaggaacctccgaacagccaggaaaagccatgagttgcaaccaaaacgcggctgaggatggaactcagaatgaaactgcaacccacctgcccccagccctgcccctcgccctgatgcgaagctggagaggggcgtgctgcggggccctgatgcccccacccacctcggtccagcgcggccctgcccaggaggcggcagccgggcgcaccctcgccagccctgctggagtttgctgtgggcactgaggcgcgggcgcccttccaaagcacatactcaccgaatgtttacagactggctgtcctggcagggctttcaactgcacatgttttttatactttcctttttttttttttttttaatattttttacaaaaaaaaagattttatacaagcaatatatatatggatttctataatcactcgatgtgatacagtataaatatgctatggtttgtttgttatgaacagatagccaccagttacggccgttgtgtgtaactcctaagtactgtagtctctgggtgtcgggggtggccagggcgggggcggggtgcatttccatccttgtaaacccttcatagtactcagtcctgtatcgctcagtaaacattgctcttacttacatagccgccttgcgtggtgtctgcctggggaatgggtgcaaggccctctcagggtcggagactgtttggagcctctgctataggcctgttcattttcacaacagctctcctatttcacagatgaggaagctaaggctcagagacattaagccacctgcagttactattttgagagcagtcagagtgttcgctcactctgcagatgttttctgagggcctgttgtgtgtgccaggccctgagaattcactggaggatgaaacagacctaagtcttgcccttgtggggcctccagtaaggagtgaatcctgtgcttgctccataagttgtctcatttcgtcttcatggcagccttgccagggaacagcacttgtccccaattcacagatggcgaattagaggtccagggaattaaactcgcagacaccatttgttgaagacttattttgtgacaagcagacatagtctcttcccttctcacaagagcacaaactaggcacgattcttctcattttacagatggtttaactgaggctcagagaaggtaagcgacttatccaaggtaacccagctagcaagggatagagctggtgtttgaactctccctccagaggcctgtgactctcctcctgtcaccaacccactatgattgtcctcatggttgaataggaagcttatgaggccacagttatagatttagtttctgggaaggctggatagagttccaggttgtcccatgatcacagagtgaaccaactaccctggtcaatgtgtgtctgacccagggaagggtgtggatggcttctctgccccctcacctcgacagctgaatccctgccacccagggccggagcagctcagtggcattcactcagtgcctgctgtgtacctggcactcggcagttctcaaggcatgtcacgcatgaggaaggcgggagaggtgtttttagcttccttgtatactgaagcttgcaaaggctacagtttacccaactaaacttgactcctgcattctaatcatgtgttctttctcctccatccctggacttaggataactagttgctggtgatgacttcgtgtcaagaacagcagtgaacctgggttgcttcccaaattgtggacgaggccttctgggatgggcagaagtggagaatggtgattaacacacctgtgatccctccctcgctcactcctctcagtttccctccacccaacacacttggtgtggactcccctgcaccccgccctagaaacaggacctggtcctctcactgtcagctgtggcagaaggttgtggcagcgggttgccttctgtctcgggggtcttgaggctgtcggtccggacgatgcaggtgaggcagtgtcagttctgcatcaggaacccctcgcgctgtaatcctttgatatttttcaagccatgagaaaaatgaagtggacttaccagggtccctccagtgacctagtggatgttcttacaggactgccgtgtgccactggctgtggcttccctggtcctgtgcttggccaccgggagctggcatctccaaaatagagcctccttagcctgtgcaggtgggctgtcttccaaagtcaccacaccagtgacttgtgctgtgcggagccttcctcaccaggaccactggctgctcctgtggctagaagtcacaattataggcttcattgcaagagccagcatttgagtttcttctgggcacctgccactgtgcatgtgtgacctcaactgctttgtgcaccctgactggggggtaggtgctagcgttccaacattacagatgagaaaaccgaggcacacagaagaggtaacctgcccaaggtcacaggtgttaggtggcagagccaagatgttattgtcagtctgacttcaggtgcataaaacctgaggctgagcctccccatgagaggaaaaatgtgtttgtggtgtgacctcagttgccagggaacttgtgcaggaagccgggagagatggcacagacccacctgtgctcacagtacatgttaagaattcccaagtctcaggcaaaccatctccaagggtgttcacagaagacacaccttaaaggcaaacgggttcatgatgtaatcttctattgactagctgtgaacctcatttttcttatctgtgaagtgggaacagtaataatccaagtctttttatggagttatcaagatcaaaaaaggaatggatatacaaagtgttttgtgaaataaaagctccctaaaatggtaattattttgtcctctgttagtgtcggtagttattgatatctacatagtacaggttatttaaatatgttttattctgtaaagatgggctgccaagtttgtgttctgaccctgtacgtggtccctatggtgtgatgaatgcctgggatcgcagactcctggatctgttcagctcctgactggtcacaaccagccatgctggatgcatcattccctccctgggcctcagtgtgccctcctgccaggtggtcacacataagacctgtgccacctctgcccagggttcctatgagaatcaatcgagttgatgaatgcaaccatggcctgagaaagacaagacgctttagctatcagatgggcagaaacaagtatgtgttggtaagaatatggattaaaggttgggaggccaagatgggtggatcatgaggtcagaagattgagaccaccctggataacacggtgaaaccctgtctctactaataatacaaaaaattagccgggcatggtggcacgtgcctgtagtcccagctactcgggaggctgaggcaggagaatcacttggacctgggaggtggaggttgcagtgagccaagattgcgccactgcactccagcctgggtgacagagcgagactccatctcaaaaaaaacaaaacaaaaaaaatgtggattaaaggaaacttagatatgctgccagtgagaaactgtgcaaagcaatttggaaataaccagtaaaactaaagctaaacgcatcctttgacctagcagttttcctcctagtcttgggaggaactctagcacaggggcaaaaggaaatgtacaagaatgttcactgatggctttgtttgtatttttaaaaagttgaaaacaacctaaatgatgatcagcataagaacaaataaattgtggtattttcctaaaattgaatattactcaacaggtaaaaaagaatgaaccagagctatatgtatcaatatggataaatctcagaaacctactgttgagatggagggtaggggagtgaactgcggaaggataccacttatgtcatatttctaactaaatgtatacgttgatactttattgtttatggctacacacacatctgggtaatagaggtataaaagcctgcacaagaatgctgtcaatatcacaatcagtcatagggagtgctcctgggagggccgcggagaggagggaactagggatgccactgcaagggtaagtaggacgctggacttcaacttcaactatacacataacatttcatttatttttttaaaatccccatcaaatgtagaatgacaggatttttcagaggtgggtgatgtgtgcacagatgtgggctatcttctccacactcctctgtatatttgatattctttgcaataaaagagaacaagccacaatacaaa

SEQ ID NO: 293244 - DNA, 3775 bp, Artificial Sequence
  derived and/or modified sequence
cccgggggcgccgcctccccccgcaccttctgcacggctggcctgccactcctcctgctatgatgcctgggcagatcccggacccttcggtgaccacaggctccctgccagggcttggccccctgaccgggctccccagctcggccctgactgtggaggagctgaaatacgctgacatccgcaacctcggggccatgattgcacccttgcacttcctggaggtgaaactgggcaagaggccccagcccgtgaaaagtgagctagatgaggaagaggagcgaaggaaaaggcgccgggagaagaacaaagtcgcagcagcccgatgccggaacaagaagaaggagcgcacggagtttctgcagcgggaatccgagcggctggaactcatgaacgcagagctgaagacccagattgaggagctgaagcaggagcggcagcagctcatcctgatgctgaaccgacaccgccccacctgcatcgtccggaccgacagtgtcaagacccccgagtcagaaggcaacccactgctcgagcagctcgagaagaagtgaccatgggctgggaggaggtggaggaggaggaagaggagaaggaaaagtgacgaagagagaggaggaggggggccccagatggcccttcctttggtgcatgaaaaactgtacaatgaggttcagcacagccagcatcagccgagcttttttgtgaaactcagatcagccacccaggaggaagagcgggctgaggaaacccagagggaccaagcgctgagaccaaagttgaccctcgggtagggttgtcctgcctggggccccacttgaaggaggcaggacagaggcaccgaggccagggagacgcccaacgaggcagccctgggctcttctctggcctcttcaccagggcacccatccaaggaacctccgaacagccaggaaaagccatgagttgcaaccaaaacgcggctgaggatggaactcagaatgaaactgcaacccacctgcccccagccctgcccctcgccctgatgcgaagctggagaggggcgtgctgcggggccctgatgcccccacccacctcggtccagcgcggccctgcccaggaggcggcagccgggcgcaccctcgccagccctgctggagtttgctgtgggcactgaggcgcgggcgcccttccaaagcacatactcaccgaatgtttacagactggctgtcctggcagggctttcaactgcacatgttttttatactttcctttttttttttttttttaatattttttacaaaaaaaaagattttatacaagcaatatatatatggatttctataatcactcgatgtgatacagtataaatatgctatggtttgtttgttatgaacagatagccaccagttacggccgttgtgtgtaactcctaagtactgtagtctctgggtgtcgggggtggccagggcgggggcggggtgcatttccatccttgtaaacccttcatagtactcagtcctgtatcgctcagtaaacattgctcttacttacatagccgccttgcgtggtgtctgcctggggaatgggtgcaaggccctctcagggtcggagactgtttggagcctctgctataggcctgttcattttcacaacagctctcctatttcacagatgaggaagctaaggctcagagacattaagccacctgcagttactattttgagagcagtcagagtgttcgctcactctgcagatgttttctgagggcctgttgtgtgtgccaggccctgagaattcactggaggatgaaacagacctaagtcttgcccttgtggggcctccagtaaggagtgaatcctgtgcttgctccataagttgtctcatttcgtcttcatggcagccttgccagggaacagcacttgtccccaattcacagatggcgaattagaggtccagggaattaaactcgcagacaccatttgttgaagacttattttgtgacaagcagacatagtctcttcccttctcacaagagcacaaactaggcacgattcttctcattttacagatggtttaactgaggctcagagaaggtaagcgacttatccaaggtaacccagctagcaagggatagagctggtgtttgaactctccctccagaggcctgtgactctcctcctgtcaccaacccactatgattgtcctcatggttgaataggaagcttatgaggccacagttatagatttagtttctgggaaggctggatagagttccaggttgtcccatgatcacagagtgaaccaactaccctggtcaatgtgtgtctgacccagggaagggtgtggatggcttctctgccccctcacctcgacagctgaatccctgccacccagggccggagcagctcagtggcattcactcagtgcctgctgtgtacctggcactcggcagttctcaaggcatgtcacgcatgaggaaggcgggagaggtgtttttagcttccttgtatactgaagcttgcaaaggctacagtttacccaactaaacttgactcctgcattctaatcatgtgttctttctcctccatccctggacttaggataactagttgctggtgatgacttcgtgtcaagaacagcagtgaacctgggttgcttcccaaattgtggacgaggccttctgggatgggcagaagtggagaatggtgattaacacacctgtgatccctccctcgctcactcctctcagtttccctccacccaacacacttggtgtggactcccctgcaccccgccctagaaacaggacctggtcctctcactgtcagctgtggcagaaggttgtggcagcgggttgccttctgtctcgggggtcttgaggctgtcggtccggacgatgcaggtgaggcagtgtcagttctgcatcaggaacccctcgcgctgtaatcctttgatatttttcaagccatgagaaaaatgaagtggacttaccagggtccctccagtgacctagtggatgttcttacaggactgccgtgtgccactggctgtggcttccctggtcctgtgcttggccaccgggagctggcatctccaaaatagagcctccttagcctgtgcaggtgggctgtcttccaaagtcaccacaccagtgacttgtgctgtgcggagccttcctcaccaggaccactggctgctcctgtggctagaagtcacaattataggcttcattgcaagagccagcatttgagtttcttctgggcacctgccactgtgcatgtgtgacctcaactgctttgtgcaccctgactggggggtaggtgctagcgttccaacattacagatgagaaaaccgaggcacacagaagaggtaacctgcccaaggtcacaggtgttaggtggcagagccaagatgttattgtcagtctgacttcaggtgcataaaacctgaggctgagcctccccatgagaggaaaaatgtgtttgtggtgtgacctcagttgccagggaacttgtgcaggaagccgggagagatggcacagacccacctgtgctcacagtacatgttaagaattcccaagtctcaggcaaaccatctccaagggtgttcacagaagacacaccttaaaggcaaacgggttcatgatgtaatcttctattgactagctgtgaacctcatttttcttatctgtgaagtgggaacagtaataatccaagtctttttatggagttatcaagatcaaaaaaggaatggatatacaaagtgttttgtgaaataaaagctccctaaaatggt

SEQ ID NO: 293245 - DNA, 631 bp, Artificial Sequence
  derived and/or modified sequence
ggacgctcggcggccgcgacggggggcgctggcggcggcggacgctgcagcggcggcggggctggcgccgcggcggctcccgggccgggacaggcctgggcaccgggcggagctccgcggccgggcggcagcggcgcggagcgggcacggcgcctgcagccgggccccggccccgggggcgccgcctccccccgcaccttctgcacggctggcctgccactcctcctgctatgatgcctgggcagatcccggacccttcggtgaccacaggctccctgccagggcttggccccctgaccgggctccccagctcggccctgactgtggaggagctgaaatacgctgacatccgcaacctcggggccatgattgcacccttgcacttcctggaggtgaaactgggcaagaggccccagcccgtgaaaagtgagctagatgaggaagaggagcgaaggaaaaggcgccgggagaagaacaaagtcgcagcagcccgatgccggaacaagaagaaggagcgcacggagtttctgcagcgggaatccgagcggctggaactcatgaacgcagagctgaagacccagattgaggagctgaagcaggagcggcagcagctcatcctgatgctgaaccg

SEQ ID NO: 293246 - DNA, 525 bp, Artificial Sequence
  derived and/or modified sequence
atggtggccggttggcctgccacaccaccagcaatgatgccagggcagatcccggatccctctgttacgaccggcagtttgccgggtctgggtcctctgacaggcctgccttcttccgcccttactgtggaggaactgaaatatgcagatataagaaacctcggcgccatgatcgctcccttgcactttttagaggttaagctcgggaagcgacctcaaccggtcaagtctgaactcgatgaagaggaagagcgccggaagcgccgtagggaaaaaaacaaagttgcggctgcccggtgtcgcaataaaaagaaagaacgcaccgagttcttacagcgtgaaagcgagagactggagctgatgaacgcggaactcaagacacagatcgaagaactgaaacaggagcgtcagcagcttatcctgatgctaaataggcacaggccgacttgtatcgtgcgaactgattccgttaagacaccggagtccgaggggaatcctcttcttgaacagcttgagaagaagtag

SEQ ID NO: 293247 - DNA, 525 bp, Artificial Sequence
  derived and/or modified sequence
atggtggccggctggccagccaccccaccagccatgatgcctggccagatcccagaccccagcgtgaccaccggcagcctgcccggcctgggccccctgaccggcctgcccagcagcgccctgactgtggaggagctgaagtatgctgacatccggaacctgggcgccatgattgcccccctgcacttcctggaggtgaagctgggcaagaggccccagcctgtgaagtctgagctggatgaggaggaggagaggaggaagagaagaagagagaagaacaaggtggccgccgcccgctgcaggaacaagaagaaggagaggacagagttcctgcagcgggagagcgagcggctggagctgatgaatgctgagctgaagacccagatcgaggagctgaagcaggagcggcagcagctgatcctgatgctgaacagacaccggcccacctgcatcgtgaggacagacagcgtgaagaccccagagagcgagggcaaccccctgctggagcagctggagaagaagtag

SEQ ID NO: 293248 - DNA, 525 bp, Artificial Sequence
  derived and/or modified sequence
atggtggccggctggcccgccaccccccccgccatgatgcccggccagatccctgatccttctgtgactacaggcagccttccagggctggggccactcacaggcttgccgagcagtgccctgaccgtggaggaattgaagtacgcagacatccgcaacttaggcgccatgatcgccccccttcactttctggaagtgaaattaggaaagcggcctcagcccgtgaagtccgagctcgacgaagaggaagaacgtaggaaacggcgtcgcgaaaagaacaaggtagctgcggcacggtgccggaacaaaaagaaggaacgaaccgaattcctgcaaagagagtctgagcgactggagctaatgaatgctgaactaaagacgcaaatagaagagctgaagcaggagcggcagcagctgatcttgatgctcaataggcacagacctacatgtatcgtcagaaccgacagcgtgaagacgcctgaaagtgagggcaatccgctcttggagcaacttgaaaagaagtag

SEQ ID NO: 293249 - DNA, 525 bp, Artificial Sequence
  derived and/or modified sequence
atggtggccggatggcccgctactcctccggctatgatgccaggccagataccagacccctccgtcacaactggctcgttgcctgggttgggccctctcaccggcttgccttcctctgcattgaccgtcgaggagctaaaatatgcggatattaggaatctcggcgctatgatagcaccactacacttcttggaagtcaagttgggcaaacgaccacagccggtgaagtcagaactcgatgaagaggaggagcgcagaaagcgcaggcgcgagaagaacaaagtggcagccgctagatgcagaaacaaaaaaaaggaacgaaccgagtttcttcagagggagagcgagcgtctggaactgatgaacgcagaactcaagacacaaatcgaagagcttaagcaagagcggcaacaattaattctgatgctcaatcggcaccgccctacttgcatcgtgagaacggattctgtcaaaactcctgaatcggaagggaaccccctcttggagcaactcgaaaaaaaatag

SEQ ID NO: 293250 - DNA, 525 bp, Artificial Sequence
  derived and/or modified sequence
atggtggccggctggcccgccaccccccccgccatgatgcccggccagatccccgaccccagcgtgaccaccggcagcctgcccggcctgggccccctgaccggcctgcccagcagcgccctgaccgtggaggagctgaagtacgccgacatcagaaacctgggcgccatgatcgcccccctgcacttcctggaggtgaagctgggcaagagaccccagcccgtgaagagcgagctggacgaggaggaggagagaagaaagagaagaagagagaagaacaaggtggccgccgccagatgcagaaacaagaagaaggagagaaccgagttcctgcagagagagagcgagagactggagctgatgaacgccgagctgaagacccagatcgaggagctgaagcaggagagacagcagctgatcctgatgctgaacagacacagacccacctgcatcgtgagaaccgacagcgtgaagacccccgagagcgagggcaaccccctgctggagcagctggagaagaagtag

SEQ ID NO: 293251 - protein, 1094 aa, Artificial Sequence
  derived and/or modified sequence
MAESSSESDHFRCRDRLSPWAARSTHRGTRSLPTVEVTEKVNTITSTLQDTSRNLRQVDQMLGRYREYSNGQAGAIEHLKESLEQSIDQLRSQRLLRNSGGRSISVTSLSASDLDGGTGSELHHFPPTSPLKDYGDPQGIKRMRSRTGVRFVQETDDMTQLHGFHQSLRDLSSEQIRLGDDFNRELSRRSRSDAETKRALEELTEKLNEAQKQEVVSDRVERRLQELEREMRTERELVERRQDQLGLMSLQLQEALKKQEAKADEHEGAIKNKLRQTETEKNQLEQELELSRRLLNQSEGSRETLLHQVEELRTQLTKAEGDRKGLQHQVSQISKQQSNYQDEQGEDWRFRRGVEREKQDLEKQMSDLRVQLNFSAMASELEEVKRCMERKDKEKAHLASQVENLTRELENGEKQQLQMLDRLKEIQNHFDTCEAERKHADLQISELTRHAEDATKQAERYLSELQQSEALKEEAEKRREDLKLKAQESIRQWKLKHKKLERALEKQSETVDELTGKNNQILKEKDELKTQLYAALQQIENLRKELNDVLTKRALQEEELHSKEEKLRDIKSHQADLELEVKNSLDTIHRLESELKKQSKIQSQMKVEKAHLEEEIAELKKSQAQDKAKLLEMQESIKDLSAIRADLANKLAEEERAKKAVLKDLSDLTAQAKSRDEETATIITQLKLERDVHQRELKDLTSSLQSVKTKHEQNIQELMKHFKKEKSEAENHIRTLKAESLEEKNMAKIHRGQLEKLKSQCDRLTEELTQNENENKKLKLKYQCLKDQLEEREKHISIEEEHLRRMEEARLQLKDQLLCLETEQESILGVIGKEIDAACKTFSKDSVEKLKVFSSGPDIHYDPHRWLAESKTKLQWLCEELKERENREKNLRHQLMLCRQQLRNLTENKESELQCLFQQIERQEQLLDEIHREKRDLLEETQRKDEEMGSLQDRVIALETSTQVALDHLESVPEKLSLLEDFKDFRDSCSSSERTDGRYSKYRVRRNSLQHHQDDTKYRTKSFKGDRTFLEGSHTRGLDHSSSWQDHSRFLSSPRFSYVNSFTKRTVAPDSASNKEDATMNGTSSQPKKEEYGS

SEQ ID NO: 293252 - protein, 987 aa, Artificial Sequence
  derived and/or modified sequence
MAESSSESDHFRCRDRLSPWAARSTHRGTRSLPTVEVTEKVNTITSTLQDTSRNLRQVDQMLGRYREYSNGQAGAIEHLKESLEQSIDQLRSQRLLRNSGGRSISVTSLSASDLDGGTGSELHHFPPTSPLKDYGDPQGIKRMRSRTGVRFVQETDDMTQLHGFHQSLRDLSSEQIRLGDDFNRELSRRSRSDAETKRALEELTEKLNEAQKQEVVSDRVERRLQELEREMRTERELVERRQDQLGLMSLQLQEALKKQEAKADEHEGAIKNKLRQTETEKNQLEQELELSRRLLNQSEGSRETLLHQVEELRTQLTKAEGDRKGLQHQVSQISKQQSNYQDEQGEDWRFRRGVEREKQDLEKQMSDLRVQLNFSAMASELEEVKRCMERKDKEKAHLASQVENLTRELENGEKQQLQMLDRLKEIQNHFDTCEAERKHADLQISELTRHAEDATKQAERYLSELQQSEALKEEAEKRREDLKLKAQESIRQWKLKHKKLERALEKQSETVDELTGKNNQILKEKDELKTQLYAALQQIENLRKELNDVLTKRALQEEELHSKEEKLRDIKSHQADLELEVKNSLDTIHRLESELKKQSKIQSQMKVEKAHLEEEIAELKKSQAQDKAKLLEMQESIKDLSAIRADLANKLAEEERAKKAVLKDLSDLTAQAKSRDEETATIITQLKLERDVHQRELKDLTSSLQSVKTKHEQNIQELMKHFKKEKSEAENHIRTLKAESLEEKNMAKIHRGQLEKLKSQCDRLTEELTQNENENKKLKLKYQCLKDQLEEREKHISIEEEHLRRMEEARLQLKDQLLCLETEQESILGVIGKEIDAACKTFSKDSVEKLKVFSSGPDIHYDPHRWLAESKTKLQWLCEELKERENREKNLRHQLMLCRQQLRNLTENKESELQCLFQQIERQEQLLDEIHREKRDLLEETQRKDEEMGSLQDRVIALETSTQVALDHLESVPEKLSLLEDFKDFRR

SEQ ID NO: 293253 - protein, 32 aa, Artificial Sequence
  derived and/or modified sequence
MAESSSESDHFRCRDRLSPWAARSTHRGTRSL

SEQ ID NO: 293254 - DNA, 2964 bp, Artificial Sequence
  derived and/or modified sequence
atggccgagagcagcagcgagagcgaccacttcagatgcagagacagactgagcccctgggccgccagaagcacccacagaggcaccagaagcctgcccaccgtggaggtgaccgagaaggtgaacaccatcaccagcaccctgcaggacaccagcagaaacctgagacaggtggaccagatgctgggcagatacagagagtacagcaacggccaggccggcgccatcgagcacctgaaggagagcctggagcagagcatcgaccagctgagaagccagagactgctgagaaacagcggcggcagaagcatcagcgtgaccagcctgagcgccagcgacctggacggcggcaccggcagcgagctgcaccacttcccccccaccagccccctgaaggactacggcgacccccagggcatcaagagaatgagaagcagaaccggcgtgagattcgtgcaggagaccgacgacatgacccagctgcacggcttccaccagagcctgagagacctgagcagcgagcagatcagactgggcgacgacttcaacagagagctgagcagaagaagcagaagcgacgccgagaccaagagagccctggaggagctgaccgagaagctgaacgaggcccagaagcaggaggtggtgagcgacagagtggagagaagactgcaggagctggagagagagatgagaaccgagagagagctggtggagagaagacaggaccagctgggcctgatgagcctgcagctgcaggaggccctgaagaagcaggaggccaaggccgacgagcacgagggcgccatcaagaacaagctgagacagaccgagaccgagaagaaccagctggagcaggagctggagctgagcagaagactgctgaaccagagcgagggcagcagagagaccctgctgcaccaggtggaggagctgagaacccagctgaccaaggccgagggcgacagaaagggcctgcagcaccaggtgagccagatcagcaagcagcagagcaactaccaggacgagcagggcgaggactggagattcagaagaggcgtggagagagagaagcaggacctggagaagcagatgagcgacctgagagtgcagctgaacttcagcgccatggccagcgagctggaggaggtgaagagatgcatggagagaaaggacaaggagaaggcccacctggccagccaggtggagaacctgaccagagagctggagaacggcgagaagcagcagctgcagatgctggacagactgaaggagatccagaaccacttcgacacctgcgaggccgagagaaagcacgccgacctgcagatcagcgagctgaccagacacgccgaggacgccaccaagcaggccgagagatacctgagcgagctgcagcagagcgaggccctgaaggaggaggccgagaagagaagagaggacctgaagctgaaggcccaggagagcatcagacagtggaagctgaagcacaagaagctggagagagccctggagaagcagagcgagaccgtggacgagctgaccggcaagaacaaccagatcctgaaggagaaggacgagctgaagacccagctgtacgccgccctgcagcagatcgagaacctgagaaaggagctgaacgacgtgctgaccaagagagccctgcaggaggaggagctgcacagcaaggaggagaagctgagagacatcaagagccaccaggccgacctggagctggaggtgaagaacagcctggacaccatccacagactggagagcgagctgaagaagcagagcaagatccagagccagatgaaggtggagaaggcccacctggaggaggagatcgccgagctgaagaagagccaggcccaggacaaggccaagctgctggagatgcaggagagcatcaaggacctgagcgccatcagagccgacctggccaacaagctggccgaggaggagagagccaagaaggccgtgctgaaggacctgagcgacctgaccgcccaggccaagagcagagacgaggagaccgccaccatcatcacccagctgaagctggagagagacgtgcaccagagagagctgaaggacctgaccagcagcctgcagagcgtgaagaccaagcacgagcagaacatccaggagctgatgaagcacttcaagaaggagaagagcgaggccgagaaccacatcagaaccctgaaggccgagagcctggaggagaagaacatggccaagatccacagaggccagctggagaagctgaagagccagtgcgacagactgaccgaggagctgacccagaacgagaacgagaacaagaagctgaagctgaagtaccagtgcctgaaggaccagctggaggagagagagaagcacatcagcatcgaggaggagcacctgagaagaatggaggaggccagactgcagctgaaggaccagctgctgtgcctggagaccgagcaggagagcatcctgggcgtgatcggcaaggagatcgacgccgcctgcaagaccttcagcaaggacagcgtggagaagctgaaggtgttcagcagcggccccgacatccactacgacccccacagatggctggccgagagcaagaccaagctgcagtggctgtgcgaggagctgaaggagagagagaacagagagaagaacctgagacaccagctgatgctgtgcagacagcagctgagaaacctgaccgagaacaaggagagcgagctgcagtgcctgttccagcagatcgagagacaggagcagctgctggacgagatccacagagagaagagagacctgctggaggagacccagagaaaggacgaggagatgggcagcctgcaggacagagtgatcgccctggagaccagcacccaggtggccctggaccacctggagagcgtgcccgagaagctgagcctgctggaggacttcaaggacttcagaagatag

SEQ ID NO: 293255 - DNA, 3285 bp, Artificial Sequence
  derived and/or modified sequence
atggcagagtcttcctccgaaagcgatcatttcaggtgtcgcgaccgactgtcaccctgggccgctaggtccactcatagaggtacacggagtctgcctaccgtggaagtgactgagaaggtgaacactattactagtacccttcaagacacttctcgaaatctgcggcaggtggatcaaatgcttgggagatatcgggaatacagcaatgggcaggcaggggccatagagcacctgaaggagagcctagaacaatccatcgatcagctaaggtcacagcgattactgaggaacagcggaggcaggtcaatcagcgtaacctcactgtctgcatctgatctagacggcgggaccggaagcgaactccaccacttccctcctacttctcctttgaaagactatggtgatccccaaggcatcaaaagaatgaggtctcgaacgggagtgcgctttgtgcaggaaacggatgatatgacccagctccatgggttccatcagtccctgagggatctgagcagcgagcagattagattgggagatgatttcaatagggaactgtcccgtcgaagccggtctgacgccgagacaaagagagccttggaggagctgactgagaagcttaacgaagctcagaaacaggaggttgtgtccgacagggtagaaagacggctgcaagagctcgagagagagatgaggacggagagggagttggtcgagcgcagacaggaccagctgggattgatgagtcttcagctgcaggaggctttgaagaagcaagaggccaaagcagacgagcatgagggagccataaaaaacaaactgagacaaaccgagacagaaaaaaaccagctggagcaggagctcgagctgagtcgcaggcttttgaaccagagcgaaggatcgagagaaacgttgctgcaccaggtagaagaactgcggacccagctcactaaggccgagggcgatagaaaggggctccagcaccaagtgagccaaatctccaaacagcagagcaactaccaggacgagcaaggcgaagactggaggttcaggagaggagtggagcgtgaaaaacaggatctggagaagcagatgtccgatctgagagtccaactgaacttctctgccatggccagcgagctcgaagaagtcaagaggtgcatggagcgcaaggataaggagaaagcccaccttgccagtcaggttgaaaatctgacaagggaattggagaacggagagaagcagcaactccagatgcttgatcggctgaaagagattcagaatcactttgatacttgcgaagctgaacgaaaacacgcggatcttcagataagcgaactaacacgccatgcggaggatgctactaagcaggctgaaagatatctcagtgagcttcaacagtccgaggcactaaaagaagaggcagaaaaaaggcgggaagaccttaagctcaaggcccaggaaagcatccgccagtggaaactgaagcacaagaagctcgaacgcgcccttgaaaagcagtctgagacagtggacgagctaaccggtaaaaacaatcagattcttaaagagaaggacgagctgaaaactcagctttacgctgccctgcagcagatcgagaacctgagaaaggagctcaacgatgtactgacaaagcgggccttacaggaggaagagctccactccaaggaggaaaagttgagagacattaaaagccaccaggccgatctggagctcgaggtgaaaaactccctggacactattcaccggctggaatcagaactcaaaaagcagagtaagatccaatcccagatgaaagtcgagaaggcgcacctggaagaggagatcgctgagttaaagaaatcccaagcgcaagacaaagctaaactgctggagatgcaggagagtatcaaggatctctccgctatccgggctgacttggcgaataaactggcggaggaagaaagggccaaaaaggccgtgctcaaggatctgtccgacctaacggctcaggctaaatcccgcgatgaggaaaccgcgaccattattacacagctgaaactcgaacgggacgtgcaccaacgcgagctgaaggacctgaccagttccctgcagtccgtgaaaacgaaacacgagcaaaatattcaggagcttatgaagcacttcaaaaaggagaagtctgaggccgaaaatcacatccggaccctgaaagccgaaagtctggaagagaagaatatggccaagattcatagaggccagctggagaagctcaaaagccagtgtgatagactcaccgaggagctaacgcaaaacgagaatgagaacaagaagctcaaactgaagtatcagtgcctcaaggaccaattggaagaacgggagaagcatataagtatagaggaggagcacttaaggcgcatggaagaggcccggctacagctgaaggatcagctgctgtgcctcgagacagaacaggagtctattctcggtgtgatcggaaaagagatagatgctgcttgtaaaacatttagcaaagactctgtggaaaagctaaaggtcttctctagcggaccagatatccattacgacccgcacaggtggctggccgaatcaaagacaaaattgcagtggctgtgcgaggaactgaaggagcgggagaatagagaaaagaatctgcggcaccagcttatgttatgccggcagcagttaagaaatctgactgagaacaaggaatctgaacttcagtgcctattccagcagattgaaagacaggaacagctcctggacgaaattcacagagagaaaagggatctgcttgaagagactcagcggaaagacgaggagatgggaagtctacaggaccgcgtgatagcacttgagacgtccactcaggtggcattggatcacctcgaatcggtgcccgaaaaactttctttgctagaggattttaaagacttcagggactcttgcagtagttcagaaagaacggatggacgctactctaagtatagggtgcggaggaattcactccagcaccaccaggatgacactaaatataggacaaagagcttcaaaggcgacaggacattcttagagggatcccatacaagaggattagaccacagcagtagctggcaagaccacagccgtttcctcagttcccctagattttcctatgtcaatagctttaccaaacgcactgttgccccggattcagcgagcaataaagaagacgccacaatgaatgggacatcctctcagcctaaaaaagaggaatacgggagctag

SEQ ID NO: 293256 - DNA, 2964 bp, Artificial Sequence
  derived and/or modified sequence
atggcagagtcctcctccgaaagtgatcatttcagatgtcgggatcgcctgtccccctgggctgctagatccacgcacagagggacgcgtagccttcccacggttgaggtaacagagaaagttaatacaataacttccactcttcaggacacatcccgaaacctgcgtcaggtcgaccagatgctaggcaggtaccgggaatacagcaacggccaggccggagccattgagcacctcaaggagagtctggagcagagcatcgaccagctgagaagtcagagactactgaggaactccggcggaaggagcataagcgtcacctctctatcagcatcagatctagatggagggacggggtccgagttgcaccacttcccccctaccagtccgctcaaggactatggagacccgcaaggcataaaacgcatgcgtagccggacaggcgtgagatttgtccaggaaacagatgatatgactcagcttcatggttttcatcagagcctaagagacttatcttcagaacagattcggctcggggacgatttcaaccgggagctgagtcgcaggagtcgcagtgatgccgaaactaagcgcgcgttagaggagctcacggaaaagcttaacgaagcccagaaacaggaagtggtcagcgaccgagttgagcgcagactgcaggagttagaaagagaaatgaggactgagcgcgagctcgtggaacgtcggcaggatcagctggggctcatgtctctgcagctccaggaagcgttgaaaaaacaggaggcaaaggccgatgagcatgagggcgctatcaagaacaagttgcgccagaccgaaactgaaaaaaaccagctggagcaagagttagagttgagcaggagactgctaaaccaatccgagggctcaagggagacacttctgcatcaggtcgaagaacttcggacacagttgacaaaagccgagggcgatcgaaaaggactgcaacatcaagtcagccagatttctaaacagcagtctaattaccaagacgagcaaggagaagattggcgcttcagacggggagtagagagggagaagcaagatctcgaaaaacagatgtccgacctgagagtccagctcaattttagtgctatggccagtgagttagaagaggtgaagcgatgtatggagagaaaggacaaagagaaagcacacctggccagccaggttgagaatctgacccgagagctggagaacggagagaagcagcagctgcagatgctcgatcgcctcaaggaaatccaaaaccactttgatacatgcgaagccgaacgaaagcatgccgatttacaaatctctgaactcactcggcacgccgaagatgctacaaagcaagctgaaagatatctgagtgagctccagcagagtgaggctctgaaagaggaggctgagaagaggagggaagacttgaagttgaaggcccaggaaagcatacgacagtggaagttgaaacacaagaaattggagcgtgcactcgagaagcagtctgaaacggtggatgagttgactggcaaaaacaatcagattctgaaggagaaagacgagttgaaaactcagttgtatgctgctctgcaacagatcgaaaacttaagaaaggaactgaatgatgtcctcacaaagcgtgcattacaggaggaggaactccacagtaaggaggagaaactgagagacataaagagccatcaggccgatctcgagttggaagttaagaatagtttagatacaatccaccgactcgagagtgaattgaagaagcagagtaaaattcagtctcagatgaaggtcgagaaggcccacttagaggaggagattgcagagctgaagaaaagtcaggcccaggataaggctaaactgctggagatgcaagaatccatcaaggacctctcagccatccgcgcagacttagccaataagctggccgaggaggagagagctaagaaagcggtgctgaaggacctgagtgatctcacagcgcaggccaagtcaagggatgaagagaccgcaacgataataacacagctgaagttagaaagagacgtgcaccagcgggagctgaaagaccttactagctcgctgcaatcagtcaagacaaagcacgagcagaacattcaagaactgatgaaacattttaagaaggaaaagagtgaggcagagaatcacattagaacattaaaagcggaatcactggaggagaaaaatatggctaaaattcacagaggccagcttgagaaactgaaaagtcaatgcgaccgactaactgaggagctgactcagaatgagaatgaaaacaagaagctgaaactgaaatatcagtgccttaaggaccagctggaagagagagagaagcacatctctattgaagaggaacacctgcgtcggatggaggaggcccggttgcagctgaaggaccagctcctgtgcttggaaaccgagcaggaatcgattctcggagtgattggaaaggaaattgatgccgcatgcaagacattttctaaggactccgtagaaaagctcaaagtcttctctagcggcccagacatacattatgaccctcaccgctggctcgccgaatcgaaaaccaagctgcagtggctgtgtgaggagctcaaggaacgcgaaaatagagagaaaaacctgcgacaccaactgatgctgtgtcgacagcagctccgaaaccttaccgaaaacaaggaatcagagttgcagtgcctcttccaacagatcgagcgccaagagcagctcttagatgagatccacagagaaaaacgcgacctactggaagagactcagagaaaagatgaagaaatgggatctctgcaggatcgcgttatcgcactggagacctctacgcaagtagcactcgaccatctggaaagcgtgccagagaaactgtccctgctcgaggactttaaggatttccgccgctag

SEQ ID NO: 293257 - DNA, 3285 bp, Artificial Sequence
  derived and/or modified sequence
atggctgaatcctcttcggagtccgatcacttccggtgcagggatcggctgtccccttgggctgccaggtccacccaccgaggcactaggtcattacctactgtcgaggtaacagaaaaagtgaacacgataacctccactctccaggacacctcccgaaatctgcgacaggtggaccaaatgttgggccggtacagagaatactcaaatgggcaggcaggggctattgagcacctgaaagaaagtctcgagcagagcatcgatcagctccgctctcagcgcttactgagaaactccggaggacgcagtatttccgttacaagcctcagtgcttctgatctggacggcggaactgggtcagaactccaccacttcccccctacaagccccttgaaggattatggagatccacagggcatcaagcggatgcgatcaaggacaggggtccgcttcgtacaggaaacagatgacatgacacagctgcatggtttccaccagagtctgcgggatctgtctagcgagcagatacgccttggcgatgattttaaccgggagctgtcgcggcggtcgagatccgacgcagagaccaaaagggcccttgaggagctgacagagaagctgaatgaggcacaaaagcaggaggtggtttctgaccgagtagagcggcgtctgcaagagttagaacgcgaaatgaggacggaacgcgagctcgtggaacggagacaggatcagttgggcctaatgtcactccaactccaggaagctctgaagaagcaggaggctaaagctgacgagcacgagggtgcaatcaagaacaaactgaggcagactgagacagaaaaaaatcagctggagcaggagttggagttatcacgccgtcttctgaatcagtccgagggaagccgcgagacactattgcatcaggttgaagaactgaggacccaactgacgaaggcggaaggcgatagaaaaggactgcaacatcaggtctctcagatcagtaagcagcagtccaattaccaggacgagcaaggagaggactggcggttccggaggggagtagagcgcgagaaacaggacttggagaagcaaatgagtgatctacgagtgcagctaaacttcagtgctatggcgagcgagctggaggaagtgaagcgctgtatggagaggaaagacaaggagaaggctcacctggcctcccaagtggagaatctgacacgggagttggagaatggcgaaaaacagcagttacagatgctggatcggctgaaagagatacaaaaccactttgatacgtgtgaggccgagaggaaacacgctgacctgcagataagcgaactcactcggcacgctgaagacgcaacaaaacaggcagagagatacctgagtgaacttcagcagtccgaggcccttaaggaggaagcagaaaaacggagagaggatctgaaattgaaggcgcaggagtcaattcgccaatggaaactcaaacataaaaaactcgagcgggcacttgaaaaacagagcgagacggtcgatgaactgaccgggaagaataatcagattttgaaagagaaggacgagcttaagactcagctttacgcggcccttcagcagattgagaatcttcgaaaagaactgaatgacgttctgacaaagcgggcattgcaagaggaagagctgcatagcaaagaggaaaaattacgagatataaaatcacaccaggccgatctggagctcgaagttaagaattcactggacacaattcatcgtttagagtctgagctgaagaagcagagtaagattcagagtcagatgaaggttgagaaggcacatttagaggaagagatagctgagctgaagaagtctcaggctcaggacaaggctaagctgctggagatgcaagaatccattaaggacctctcagcaatccgcgcagatttagcgaacaagctggcggaggaggagcgcgctaaaaaagccgtactgaaagatctgtcggatctgacagcgcaggccaaatcacgggacgaggaaaccgccacaataattactcaacttaaactagagcgagacgtacatcaacgcgagctgaaagacctcaccagcagcctccagagcgtcaaaacgaagcacgagcagaatatccaggagctgatgaaacacttcaaaaaggagaaatctgaggctgagaaccacattagaaccctgaaagcggaatcactcgaggagaagaacatggcgaagatccatcgggggcaattagaaaagttaaagtctcaatgtgataggcttacggaggaactaacccagaacgagaatgagaacaaaaagcttaagctcaagtatcagtgcttaaaggaccagctggaagaaagagagaagcatatttcaattgaggaggagcacctgagaagaatggaggaggcacgcctccagctgaaggatcaactcctctgtctggagactgagcaggagtctatcctgggcgtgatcggaaaggagatcgacgccgcttgtaagaccttctctaaagacagtgtggagaaactcaaagtgttttccagcggccctgacatccactacgaccctcataggtggctggctgagtcaaagacaaaactccagtggttatgtgaagaactcaaagagcgagaaaatcgggagaaaaatctgagacatcaattaatgctgtgcaggcagcagctgcggaatctcactgagaataaggaatcagagctccagtgtctgttccaacagatagaacgccaagagcaactgctggacgagattcatcgagagaagagagacctcttagaggaaactcagaggaaggacgaggaaatgggaagtctgcaagatagagttatcgccctggagaccagtacccaggtggctctagatcaccttgagagtgttcccgagaaactgtccctcctggaggacttcaaggacttccgcgattcctgttcctctagcgaacgcacagacggcagatactccaaatatagggtccggcggaactcgttgcaacatcaccaggacgacactaaataccggacaaagtcgttcaagggagatcgaacctttttagagggttctcatacccggggtctggatcatagtagttcttggcaggatcacagcagatttttgtcctccccccgcttctcctatgtgaactcttttaccaagcggaccgtggcaccggactctgccagtaacaaggaagacgccacgatgaatggcacaagctctcagcctaagaaggaagagtatggatcttag

SEQ ID NO: 293258 - DNA, 3285 bp, Artificial Sequence
  derived and/or modified sequence
atggccgagagcagcagcgagagtgaccacttccgctgccgggaccggctgagcccctgggccgcccggagcacccaccggggcaccaggagcctgcccaccgtggaggtgacagagaaggtgaacaccatcaccagcaccctgcaggacaccagcaggaacctgcggcaggtggaccagatgctgggccgctaccgggagtacagcaatggccaggccggggccatcgagcacctgaaggagagcctggagcagagcattgaccagctgcggagccagaggctgctgagaaattctgggggccgcagcatctctgtgaccagcctgagcgccagtgacctggatggcggcaccggcagcgagctgcaccacttcccccccaccagccccctgaaggactatggagacccccagggcatcaagaggatgaggagcaggactggagtgcgctttgtgcaggagacagatgacatgacccagctgcacggcttccaccagagcctgcgggacctgagcagcgagcagatccggctgggagatgacttcaaccgggagctgagccgccgcagcagaagtgatgctgagaccaagagggccctggaggagctgacagagaagctgaatgaggcccagaagcaggaggtggtgtctgacagagtggagcggcggctgcaggagctggagcgggagatgaggacagagcgggagctggtggagcggcggcaggaccagctgggcctgatgagcctgcagctgcaggaggccctgaagaagcaggaggccaaggcagatgagcacgagggcgccatcaagaacaagctgcggcagacagaaacagagaagaaccagctggagcaggagctggagctgagccggcggctgctgaaccagagcgagggcagccgggagaccctgctgcaccaggtggaggagctgcggacccagctgaccaaggccgagggggacaggaagggcctgcagcaccaggtgtcccagatcagcaagcagcagagcaactaccaggatgagcagggcgaggactggaggttcagaagaggagtggagcgggagaagcaggacctggagaagcagatgtctgacctgcgggtgcagctgaacttcagcgccatggccagcgagctggaggaggtgaagcgctgcatggagaggaaggacaaggagaaggcccacctggccagccaggtggagaacctgacccgggagctggagaatggagagaagcagcagctgcagatgctggaccggctgaaggagatccagaaccactttgacacctgtgaggccgagaggaagcacgccgacctgcagatcagcgagctgaccaggcatgctgaagatgccaccaagcaggccgagcgctacctgtctgagctgcagcagagcgaggccctgaaggaggaggccgagaagaggcgggaggacctgaagctgaaggcccaggagagcatccggcagtggaagctgaagcacaagaagctggagcgggccctggagaagcagagcgagaccgtggatgagctgaccgggaagaacaaccagatcctgaaggagaaggatgagctgaagacccagctgtatgctgccctgcagcagatcgagaacctgaggaaggagctgaatgatgtgctgaccaagagggccctgcaggaggaggagctgcacagcaaggaggagaagctgcgggacatcaagagccaccaggccgacctggagctggaggtgaagaacagcctggacaccatccaccggctggagagcgagctgaagaagcagagcaagatccagagccagatgaaggtggagaaggcccacctggaggaggagattgctgagctgaagaagagccaggcccaggacaaggccaagctgctggagatgcaggagagcatcaaggacctgagcgccatccgggctgacctggccaacaagctggccgaggaggagcgggccaagaaggctgtgctgaaggacctgagtgacctgacagcccaggccaagagcagagatgaggagacagccaccatcatcacccagctgaagctggagagagatgtgcaccagcgggagctgaaggacctgaccagcagcctgcagagcgtgaagaccaagcatgagcagaacatccaggagctgatgaagcacttcaagaaggagaagtctgaggccgagaaccacatccgcaccctgaaggccgagagcctggaggagaagaacatggccaagatccaccggggccagctggagaagctgaagagccagtgtgaccggctgacagaggagctgacccagaatgaaaatgaaaacaagaagctgaagctgaagtaccagtgcctgaaggaccagctggaggagcgggagaagcacatcagcattgaggaggagcacctgcggaggatggaggaggcccggctgcagctgaaggaccagctgctgtgcctggagacagagcaggagagcatcctgggcgtgattggcaaggagattgatgctgcctgcaagaccttcagcaaggacagcgtggagaagctgaaggtgttcagcagcggccctgacatccactatgacccccaccgctggctggccgagagcaagaccaagctgcagtggctgtgtgaggagctgaaggagagagaaaatcgggagaagaacctgcggcaccagctgatgctgtgccggcagcagctgaggaacctgacagagaacaaggagagcgagctgcagtgcctcttccagcagatcgagcggcaggagcagctgctggatgagatccaccgggagaagagggacctgctggaggagacccagaggaaggatgaggagatgggcagcctgcaggacagagtcatcgccctggagaccagcacccaggtggccctggaccacctggagagcgtgcctgagaagctgagcctgctggaggacttcaaggacttccgggacagctgcagcagcagcgagaggacagatggccgctacagcaagtacagagtgagaagaaacagcctgcagcaccaccaggatgacaccaagtaccgcaccaagagcttcaagggggacaggaccttcctggagggcagccacacccggggcctggaccacagcagctcctggcaggaccacagccgcttcctgagcagcccccgcttctcctatgtgaacagcttcaccaagaggacagtggccccagattctgccagcaacaaggaggatgccaccatgaatggcaccagcagccagcccaagaaggaggagtatggcagctag

SEQ ID NO: 293259 - DNA, 2964 bp, Artificial Sequence
  derived and/or modified sequence
atggccgagagcagcagcgagagtgaccacttccgctgccgggaccggctgagcccctgggccgcccggagcacccaccggggcaccaggagcctgcccaccgtggaggtgacagagaaggtgaacaccatcaccagcaccctgcaggacaccagcaggaacctgcggcaggtggaccagatgctgggccgctaccgggagtacagcaatggccaggccggggccatcgagcacctgaaggagagcctggagcagagcattgaccagctgcggagccagaggctgctgagaaattctgggggccgcagcatctctgtgaccagcctgagcgccagtgacctggatggcggcaccggcagcgagctgcaccacttcccccccaccagccccctgaaggactatggagacccccagggcatcaagaggatgaggagcaggactggagtgcgctttgtgcaggagacagatgacatgacccagctgcacggcttccaccagagcctgcgggacctgagcagcgagcagatccggctgggagatgacttcaaccgggagctgagccgccgcagcagaagtgatgctgagaccaagagggccctggaggagctgacagagaagctgaatgaggcccagaagcaggaggtggtgtctgacagagtggagcggcggctgcaggagctggagcgggagatgaggacagagcgggagctggtggagcggcggcaggaccagctgggcctgatgagcctgcagctgcaggaggccctgaagaagcaggaggccaaggcagatgagcacgagggcgccatcaagaacaagctgcggcagacagaaacagagaagaaccagctggagcaggagctggagctgagccggcggctgctgaaccagagcgagggcagccgggagaccctgctgcaccaggtggaggagctgcggacccagctgaccaaggccgagggggacaggaagggcctgcagcaccaggtgtcccagatcagcaagcagcagagcaactaccaggatgagcagggcgaggactggaggttcagaagaggagtggagcgggagaagcaggacctggagaagcagatgtctgacctgcgggtgcagctgaacttcagcgccatggccagcgagctggaggaggtgaagcgctgcatggagaggaaggacaaggagaaggcccacctggccagccaggtggagaacctgacccgggagctggagaatggagagaagcagcagctgcagatgctggaccggctgaaggagatccagaaccactttgacacctgtgaggccgagaggaagcacgccgacctgcagatcagcgagctgaccaggcatgctgaagatgccaccaagcaggccgagcgctacctgtctgagctgcagcagagcgaggccctgaaggaggaggccgagaagaggcgggaggacctgaagctgaaggcccaggagagcatccggcagtggaagctgaagcacaagaagctggagcgggccctggagaagcagagcgagaccgtggatgagctgaccgggaagaacaaccagatcctgaaggagaaggatgagctgaagacccagctgtatgctgccctgcagcagatcgagaacctgaggaaggagctgaatgatgtgctgaccaagagggccctgcaggaggaggagctgcacagcaaggaggagaagctgcgggacatcaagagccaccaggccgacctggagctggaggtgaagaacagcctggacaccatccaccggctggagagcgagctgaagaagcagagcaagatccagagccagatgaaggtggagaaggcccacctggaggaggagattgctgagctgaagaagagccaggcccaggacaaggccaagctgctggagatgcaggagagcatcaaggacctgagcgccatccgggctgacctggccaacaagctggccgaggaggagcgggccaagaaggctgtgctgaaggacctgagtgacctgacagcccaggccaagagcagagatgaggagacagccaccatcatcacccagctgaagctggagagagatgtgcaccagcgggagctgaaggacctgaccagcagcctgcagagcgtgaagaccaagcatgagcagaacatccaggagctgatgaagcacttcaagaaggagaagtctgaggccgagaaccacatccgcaccctgaaggccgagagcctggaggagaagaacatggccaagatccaccggggccagctggagaagctgaagagccagtgtgaccggctgacagaggagctgacccagaatgaaaatgaaaacaagaagctgaagctgaagtaccagtgcctgaaggaccagctggaggagcgggagaagcacatcagcattgaggaggagcacctgcggaggatggaggaggcccggctgcagctgaaggaccagctgctgtgcctggagacagagcaggagagcatcctgggcgtgattggcaaggagattgatgctgcctgcaagaccttcagcaaggacagcgtggagaagctgaaggtgttcagcagcggccctgacatccactatgacccccaccgctggctggccgagagcaagaccaagctgcagtggctgtgtgaggagctgaaggagagagaaaatcgggagaagaacctgcggcaccagctgatgctgtgccggcagcagctgaggaacctgacagagaacaaggagagcgagctgcagtgcctcttccagcagatcgagcggcaggagcagctgctggatgagatccaccgggagaagagggacctgctggaggagacccagaggaaggatgaggagatgggcagcctgcaggacagagtcatcgccctggagaccagcacccaggtggccctggaccacctggagagcgtgcctgagaagctgagcctgctggaggacttcaaggacttcagaagatag

SEQ ID NO: 293260 - DNA, 3132 bp, Artificial Sequence
  derived and/or modified sequence
gtggtttggggaaagtgtaggggcaaccaaagatcatcggcttgactaggccctttgccctgaacctcatgaagaaatgataggaggcagacatatgtgcctaaaaagagcgttgagctcagagaagagcaactcggagttttgggggtgtgctttgatttgtgtacatcaatggcagaatcatccagcgaatcagatcacttccgctgtcgtgaccgattgagtccatgggctgccagatcaacgcacaggggaactcgaagtcttcctacagtagaagttaccgagaaggtcaacactataacaagtactttacaggataccagtcggaacctgcgacaagtggaccagatgcttggacgataccgagaatacagtaatggacaggcgggtgcgatagaacatttaaaagaaagcttggaacaatcaatcgaccaactccggagtcaacgtttattgagaaactcaggagggagaagtatttctgttacaagtttgagtgcaagtgaccttgatggtggcactgggtcagagctccatcattttccacctacctcacctctcaaggactatggggatccacagggtattaaacgaatgagatcaagaactggtgtccggtttgttcaagagactgatgatatgactcagcttcatggttttcatcagtctcttcgagacctcagcagtgaacaaattcgccttggagatgatttcaacagggagctttccagaaggagccggtcagatgccgaaacaaaaagggctttggaagaattgactgaaaaacttaatgaagcccagaaacaagaagtggtttcagatcgggtggagcggcggcttcaggaactggagagagagatgcgcacagaaagggagctggtggaaagacgccaggatcaactgggactcatgtccctgcagctacaggaggcactaaagaaacaagaagctaaagcagatgagcatgagggggcaataaaaaataagctaagacaaactgaaactgagaagaatcaacttgaacaggaattggagctatctcgaaggttattgaatcaatcagaaggcagccgagaaacacttttgcatcaggtagaagaactgcgtacacaacttacgaaagcagaaggtgatcgaaagggtttacagcatcaagtatctcagatttccaagcaacagtcaaactatcaggatgaacaaggggaggactggagatttaggagaggggttgagcgggaaaaacaggacctggagaagcaaatgtcagatttgagagtgcagctgaacttcagcgcaatggcatctgagttagaggaagtgaaacggtgcatggagagaaaagacaaggagaaagcacatttggcatcacaagtagagaatttaacacgtgaactggagaatggggaaaaacagcaactgcagatgttggatcgacttaaggagatccagaatcactttgacacatgtgaggccgagcgtaagcatgctgaccttcagatctcagagctgactcgccatgcggaggatgcaaccaagcaggctgagcggtacctcagtgagctccagcagtcagaggctctgaaagaggaggcggagaagaggagggaagacctgaaactgaaagctcaagaatccattaggcagtggaagcttaagcataagaagttagaacgagcgttggagaaacaatctgaaactgttgatgaactgacaggcaagaataatcagattttaaaagaaaaggatgaattgaaaacccagctgtatgcagcattacaacaaatagagaatcttcgaaaggaattgaatgatgtcctaacaaagcgtgcccttcaggaggaggagcttcactccaaggaggagaaattacgtgatattaagtctcatcaagctgaccttgaattggaagttaagaattccctggataccatccatagactggagagcgaattgaaaaagcagagtaagatccaaagccagatgaaagttgagaaagctcacttggaggaagaaattgcagagctcaagaagagccaggcccaggacaaagctaaacttcttgagatgcaagagtccatcaaggacctgagtgccatccgagcagatcttgctaataaattggctgaggaagagagagccaagaaagcagtgcttaaggacctttctgacctcactgcacaggcaaaatccagggatgaagaaacagctacaatcatcacacagttaaagctggaacgagatgtgcaccagagggagctgaaagatctcacatcatcattgcagagtgtgaaaacaaaacacgaacagaatatccaggagcttatgaagcactttaagaaagaaaagagtgaggctgagaatcatatcaggactctgaaggctgaaagtttagaagagaagaatatggctaaaattcatcgtggtcagctggagaagttgaaatcacagtgtgacagactgacagaggaattaacccagaatgaaaatgagaacaaaaaactgaagctaaaatatcaatgtttgaaggatcaactagaagaaagggaaaaacatataagcattgaagaggagcacttaaggaggatggaagaggccagattgcagctcaaggatcaacttctttgcttggagactgaacaggaatccattcttggtgtgataggaaaggaaattgatgcagcttgtaaaacattctccaaggactcagtggagaaattaaaagttttttcatctggtcctgatatacattatgacccacatcgctggttagcagaaagcaagactaaacttcagtggctctgtgaggaactgaaagagagagaaaacagagagaaaaatctgcgacaccagctgatgctctgcagacaacaactcaggaatttgactgaaaacaaggaatctgagttgcagtgtctctttcaacagatagaaaggcaggagcagcttctggatgaaatacatcgtgagaagagagatctactggaagagacccaaagaaaagatgaagaaatgggatctctgcaggaccgtgtaattgcattagaaacgagtacccaagtggccttggaccatctggagtctgtgcctgagaaactgagcctactagaagatttcaaagacttcagaaga

SEQ ID NO: 293261 - DNA, 3285 bp, Artificial Sequence
  derived and/or modified sequence
atggccgagagcagcagcgagagcgaccacttccggtgccgggaccggttgtccccttgggccgcaaggagcacccacagagggacccgcagcttgcccacagtagaggtgaccgaaaaagtgaacaccataacgtcgaccctccaggatacatccaggaacctccgacaagtggaccagatgctggggcgttatcgagagtattccaatggtcaggcaggtgctatcgagcatctgaaagagtccctcgaacaatcgatagaccagctccgatcccagcgtctgctgagaaacagcggtgggagatccatctctgtgacatccctgtccgcgagtgatctcgacggtggcaccgggagtgagctgcatcattttccccctaccagcccattaaaggactacggtgacccacaaggcatcaaaagaatgcggtctagaactggcgtgcggttcgtgcaagagaccgatgatatgacacagcttcacggatttcaccagtctttacgagacctgagttctgagcagataagactcggcgatgatttcaatcgcgagctgagccgtcgctccaggtccgacgcagagactaaacgagctctggaagagcttacagagaagcttaatgaggcgcagaagcaggaagtggtgtccgatagagttgagcggcggctgcaagagcttgagcgcgagatgcgcaccgagcgcgagctggtagagcgtcgacaagaccagttgggcctgatgagtctccagttgcaggaagcccttaaaaagcaggaagccaaagcagatgaacacgaaggcgcgatcaaaaacaagctgcggcagaccgagaccgaaaaaaatcagttagagcaggagctcgagttgagccgcagactgctcaaccaatcggagggtagtagagaaacactgctgcaccaggtggaggagctgcgcacccagttgaccaaggccgaaggggatagaaaaggtctgcagcatcaggtgagtcagatatccaaacagcagagcaattatcaggatgaacaaggggaggattggcgctttagacggggagtggagcgagaaaaacaagatttggagaaacagatgagcgacctgcgcgtacagctgaatttcagtgccatggccagtgaactggaagaggtgaaaaggtgtatggagcggaaagataaggagaaggcacacctggcgtcacaagtggagaacctaacacgcgaactagagaatggggaaaagcaacaactgcagatgctagatagattaaaggaaatacagaatcacttcgacacatgtgaggcagagaggaagcacgccgatttacagatttcagaattgacgaggcatgcagaggatgccaccaagcaggctgagcggtatttgtccgaactgcagcagagcgaggctctgaaggaagaggccgaaaaacgccgggaggaccttaagctaaaagcacaggagagcatcaggcagtggaaacttaagcacaaaaagctcgaaagggctctcgaaaagcagagcgaaacagtagacgagttaactgggaaaaataatcagatcttgaaagaaaaggatgagctgaaaacacagctctatgccgcactccagcaaatcgagaatctgagaaaggaattaaacgatgtgcttaccaaacgggccctccaggaagaggaactacattccaaggaggagaagctgagggatatcaagtcccaccaggctgaccttgagctggaggtgaagaacagtctagatacaatccacagactggagtcagagctgaaaaagcagtcgaagatacagtcccagatgaaagtggagaaagcccatctagaagaggagatcgccgaattgaaaaagtctcaggcacaggacaaagccaagctgctcgagatgcaggagtccattaaagatctgagtgctattagagcagatcttgccaacaagctcgcagaagaagagcgggccaagaaggctgtactgaaggatctgtccgacctgactgcccaggcaaagagccgcgacgaagaaaccgccactattattacacagttgaagcttgagagggacgtgcaccagcgggaattgaaggatctcacctcatctttgcaaagtgtcaaaactaagcacgaacagaatattcaggaactcatgaagcatttcaaaaaggagaagtccgaggcagagaatcatatcagaaccctgaaagcagaatcgctggaggaaaaaaacatggccaaaatccaccgaggacaactggagaagcttaaaagccagtgtgatagattgacagaggaactaacacagaatgagaatgaaaacaaaaagcttaaactaaaatatcagtgcttaaaggatcagttggaagagcgagagaagcatatttctatcgaggaggaacacctacgacgaatggaagaggcccgcctgcagctgaaggaccagctgctgtgcttagagactgagcaagaatctatcctaggtgttattggaaaggaaattgacgcagcttgcaagacatttagcaaggactccgtggagaaactcaaggtgttttcaagcggacccgacattcattacgacccacacagatggctggccgagtccaaaaccaagctacagtggctgtgtgaggaactgaaggagagagagaatcgcgagaaaaatctgcgtcaccagctaatgctctgccggcagcagctacgaaacttgaccgagaataaagaatctgagcttcagtgcttattccaacagatagaacgtcaagaacagctattggatgaaatacatcgggagaaaagagatttattggaggagacccaacgtaaggatgaggagatggggagcttacaggatagggtgatagcactcgaaacatctacccaggtcgctctggaccacttggagagtgtaccagagaagctgagcctgctggaagacttcaaagacttccgtgattcttgttcaagcagtgagcgcactgatggtcggtatagcaaataccgcgtgaggcggaacagcctgcagcaccatcaggatgacacgaagtatagaacaaaatccttcaaaggggacagaaccttcctcgaaggaagtcacacaagaggcttagatcatagctctagctggcaagaccacagcaggttccttagcagccccaggttcagctacgttaatagctttacaaagcgtaccgtggctccagactcagccagcaacaaagaagatgctacgatgaacggcacttccagccagccgaagaaagaagaatacggttcctag

SEQ ID NO: 293262 - DNA, 2964 bp, Artificial Sequence
  derived and/or modified sequence
atggccgagagcagcagcgagagcgaccacttccggtgccgggaccggctgagtccctgggccgcccgtagtacccatcggggcaccaggagtctacctaccgtggaggtgaccgaaaaggtcaataccatcacttcaacgctacaggatacttcccggaaccttagacaggttgaccagatgctgggccggtatagggagtactcaaatggccaagccggggccatcgagcacttgaaggaaagtctggagcaatctatagatcagctgcgaagtcagagactgctgagaaatagtgggggacgcagcatctccgtgaccagcctgtcagcttccgatctcgatggcgggaccggttccgagctacaccatttcccccccactagccctcttaaagactacggggacccccaaggaatcaaacgaatgaggtctcggaccggcgttagattcgtacaggagacagacgacatgacacagctgcacggcttccatcagtcacttagggacctctcttctgagcagattaggcttggcgatgacttcaatagagagctgtcacgccgctctaggagtgacgctgagactaaacgcgccctggaggaactgaccgaaaaacttaacgaggcccagaaacaggaagtagtatccgaccgggtggagagaaggttacaggaactggaacgcgagatgaggacagaaagagaactagtagaaagacggcaagatcaactcggcctgatgtcgctccagctccaggaggccctaaaaaagcaagaggcgaaagcggatgaacacgagggggctataaagaataaactgaggcagaccgaaaccgaaaaaaatcagctcgagcaggaactcgagctatcacgtaggttgctcaaccagtccgaagggtcccgcgaaaccctactccatcaagtagaagaactcagaacccagctcacaaaggcagaaggcgaccggaaaggccttcaacaccaggtgtctcaaattagcaaacagcaatcgaactatcaggacgaacagggcgaggactggaggtttcgtcggggggtggaacgggagaaacaggatctggagaaacaaatgagcgaccttcgtgtgcagcttaatttttcagcaatggctagcgagctggaggaggttaagcgctgcatggagcgcaaagacaaggagaaggcccaccttgcttcccaagtggaaaatttgaccagagagctggagaacggcgagaaacagcagctccaaatgcttgaccgcttgaaagagattcaaaaccactttgatacgtgcgaggcggagagaaaacacgccgacctgcaaatttccgaactaacccggcatgccgaggatgccaccaaacaggccgagaggtatctcagcgaacttcagcaatctgaggcactgaaggaggaggctgagaagagacgggaggatttgaagctgaaagctcaggagtcaatcagacagtggaaattaaaacacaagaaacttgagagagccttggagaagcagtctgaaacagttgatgaactgaccggcaagaataaccagatactgaaggagaaggacgagcttaagacccagctgtacgcagctctccagcaaattgagaatctacgaaaggaactgaatgatgtactgaccaaaagagccttgcaggaggaagagcttcactctaaagaggagaagctacgggacatcaagagccaccaggctgacttagagctggaagtcaaaaacagccttgacaccatccatagactggagtctgaacttaagaaacagtccaaaattcagtcacagatgaaagtggagaaggctcacttagaggaggagatcgcggaactcaagaagagtcaggctcaggacaaggctaagctacttgagatgcaagagtccatcaaggacctctctgcaatacgggcagatctggccaacaaactcgccgaggaggagcgcgccaaaaaagccgtccttaaggatctgagcgacctcactgcccaggccaagtctcgagacgaagagaccgcaacgataatcacccagctgaagctggagagagatgtgcatcagcgtgaattgaaggacctcacctcctccctacagagcgtgaaaacgaaacacgaacaaaatattcaagagctgatgaaacatttcaagaaggagaaatccgaagcagaaaatcacatccggacacttaaggcagaatcactcgaagagaagaatatggctaagatacaccgcggccagctggagaaactgaaatcacagtgcgatcgtttgacagaagagctgacccagaacgagaatgaaaataagaaattgaagcttaaataccagtgtctgaaagaccagttggaggaaagggagaaacacattagtatcgaagaggagcacctccggcgaatggaagaggctcgattgcagcttaaggaccagcttctgtgtctcgaaacagaacaggaatccattttgggggtgatagggaaagagatagacgctgcatgcaagacattctctaaagactctgtggaaaaactgaaagttttttcctccggaccagacatacattacgatccccaccgatggctggcagaatccaaaaccaaattgcagtggctgtgtgaggagctgaaggaacgtgagaaccgcgaaaaaaatttgcggcaccagctgatgctgtgtagacagcagctgcgaaatctgacagaaaacaaggagtccgagctccaatgcctgttccaacaaattgagcgccaggagcagctgctcgatgagatccatcgcgaaaagcgcgacctgctggaagaaactcagaggaaagacgaggagatggggagtcttcaggacagggtgattgccctggagaccagcacacaggtcgctctcgatcaccttgagtccgttccagagaagcttagccttctggaagacttcaaagattttagacgatag

SEQ ID NO: 293263 - DNA, 3285 bp, Artificial Sequence
  derived and/or modified sequence
atggccgagagcagcagcgagagcgaccacttccggtgccgggaccgactgtccccctgggccgcccgatccacccaccggggcactcggagtctccctaccgtcgaagtaacagagaaggtgaacactatcacatctacactgcaggatactagtagaaaccttcgccaggttgatcagatgctagggcgctacagggagtactctaatggacaggccggcgccatcgagcaccttaaggagtcccttgagcaaagcatagaccagctgaggtctcaacgcttgttacggaactctggcgggagaagcatttcagtaacgtctctaagtgcttccgatctagacggaggcaccgggagtgagctacaccactttcccccaaccagccctctaaaagactacggagacccgcaggggatcaaacgaatgcgcagtagaacaggcgtgcgcttcgtgcaggagactgatgacatgacacagcttcacggtttccatcagtcgcttcgcgatttatcatccgagcagatccgcctcggggacgactttaaccgcgagctttcaagacggtctcgaagcgatgccgaaacaaaacgggccctggaagaactcaccgagaagttaaacgaagctcagaaacaggaggttgtgagcgaccgtgtagaaagaagattgcaggaattggagagggagatgcggactgaaagggaattggtcgagcgcaggcaggaccagttaggtttgatgtctctccagctccaggaggccctgaaaaaacaggaagccaaggctgatgagcacgaaggcgccattaagaataagttgagacaaaccgagaccgaaaagaatcaactggaacaggagctagaactttcccgacgacttctgaaccagtccgaggggtcccgagaaacacttctacaccaggtcgaggaactgcgaacacagctcaccaaagcagagggagatagaaaaggattacagcaccaggtgtctcagatttcgaaacagcagtctaactaccaggacgaacagggagaggactggagatttcggcgcggcgttgagcgcgagaagcaagacctggaaaagcagatgagtgatcttagggtccagctcaatttttctgccatggcttctgagcttgaagaagtcaagcgttgcatggagagaaaggacaaagaaaaggcccacttggcatcccaagtcgagaatcttacccgcgagcttgagaatggggagaaacaacagctccagatgctcgacaggctgaaagagatccagaatcattttgacacctgcgaagctgaaaggaagcacgccgatctccagatttccgagctaactagacacgccgaagacgctaccaagcaagcagaacgatatctgtccgagttgcagcagagtgaagcacttaaggaagaagctgaaaagcgaagggaggacttgaaacttaaggctcaggagagcattcgacaatggaaactgaagcataagaaacttgagagagctctggagaaacagagcgaaactgttgatgaattgacaggcaaaaataatcagatcctgaaagagaaagacgaactcaagacacagctctacgctgccctccagcagatagagaacctgcgcaaggaactgaatgacgtcctgaccaaacgcgctttacaggaggaagaactccatagcaaggaggagaagctgcgcgatatcaagagccatcaagctgatttggaactcgaagtgaaaaactcactggacaccattcatcgactggaaagcgagctgaaaaagcagtctaaaatccagtcacagatgaaggtggagaaggctcacctagaagaggaaatcgccgaactcaagaaatcccaggcccaggacaaggccaagctgttggagatgcaggagagcataaaggacctctcggctattcgcgccgatttggccaataagttagctgaagaagagcgcgctaaaaaagcagtgctaaaagatctgagtgacctcactgcgcaggcgaagtcgcgggatgaagaaaccgccactattattacacagcttaagctggagcgtgacgttcaccagcgcgaactgaaagacctgacctcctctctacaatctgtgaaaacaaaacacgagcagaatatccaggaattgatgaaacacttcaaaaaggaaaagagcgaggctgagaaccacattagaacactgaaagccgagtcactcgaggagaaaaacatggcaaaaatccatagaggccagctggagaaactgaagagtcagtgcgatcgcttaactgaggaactgacccagaatgagaacgagaacaaaaaactcaagcttaaatatcagtgtctcaaagaccaactcgaggaaagagagaagcatattagcatcgaagaggaacacctgagacgaatggaagaggcgcgcctgcaattaaaagatcagttactctgtttggaaaccgaacaggagtctatccttggcgtcataggtaaggagattgacgctgcttgtaaaactttcagtaaggatagtgtagagaagttaaaggtgttcagctccgggcctgacattcactatgatccacacaggtggttggcagaatcaaagacgaagctgcagtggctctgcgaggaactgaaagagagagagaaccgagagaagaacttaaggcatcagctgatgctgtgtcgccagcagttgcgaaacctgaccgagaataaagaaagcgagcttcagtgtttattccaacagatcgagcgacaagagcaactgcttgatgaaatccacagagagaaacgcgacttgctggaggaaacacagagaaaggatgaagagatgggaagcttgcaggaccgagttattgcccttgaaacaagcacccaggtggcgctcgaccaccttgaatcagtgccagagaagttgagcctccttgaggattttaaggacttcagagactcctgttccagcagcgagcgcactgatgggcgatatagtaaatacagggtgaggaggaattcccttcagcaccatcaagatgacaccaagtatcgtactaagagcttcaagggagacagaacctttttagaaggatcccacactaggggcttagatcactcaagctcgtggcaagaccattctaggttcctcagctcacctcggttttcttacgtcaatagctttacgaaaaggaccgttgcaccagattcagctagcaataaagaggacgccacaatgaatggtaccagcagccagccaaaaaaagaggaatacggctcttag

SEQ ID NO: 293264 - DNA, 3285 bp, Artificial Sequence
  derived and/or modified sequence
atggcagaatcctccagtgagtccgaccatttccgctgtagagataggctttccccctgggccgcacgttccactcatagaggaacccgtagtctccctacagtggaagtaaccgaaaaagtgaatacaatcacctcaacgctgcaagatacatcaaggaatctgaggcaagttgatcagatgctgggaagatatcgcgaatacagtaacggccaggcaggcgcaatcgaacacctgaaggaatcactcgagcagagcattgaccaactgcgctcccagcggctgcttaggaattctggcggtaggtcgatcagcgtgacgtccctttcggcctcagatctggatgggggtaccggaagcgaactgcaccattttccccctacaagcccactgaaggattatggcgatccgcaaggcatcaagcgcatgcggtctaggaccggggtcagattcgtgcaggagactgatgatatgactcagttgcatgggtttcaccagagcctgagagacttgtcttcagagcagatccggctgggggatgattttaaccgcgagctgtctcggcgatctaggagtgatgccgagaccaagagggccctggaagagctgacagagaagttgaacgaggctcagaagcaggaggtggtcagcgatagagtggaaagacggctgcaagagttggagcgagagatgaggaccgagcgggaactagtggagaggcggcaggaccagctgggcctcatgagtctccagctacaagaggcgctcaagaagcaggaagctaaggcggacgagcacgagggggctatcaagaacaagctaagacagaccgaaaccgaaaaaaaccagctggaacaggagctagaactttcccgcagactgctcaaccagagcgagggatcgcgggagaccctgttgcatcaagtagaggagctgcgcactcagctcaccaaagctgagggagatcgaaaagggctccagcaccaagtgtcccagattagcaagcaacagtcgaattatcaggatgagcagggggaagactggcggttccgtcggggagtcgagagagagaagcaagatctggaaaagcagatgtctgatcttcgagtccagctcaacttttccgccatggcctcagagctggaggaagtgaaacgctgtatggagcgcaaggataaagagaaagcccacctggcttcacaagtggagaacttaacgcgagagctggagaatggtgagaagcagcagttacagatgcttgatagactgaaagagattcaaaatcatttcgacacatgcgaggcagagcgtaagcatgctgacttgcaaatcagcgagttgactaggcacgcagaggacgctacaaagcaggctgaacgctatctgagtgagctacagcaaagtgaggccctgaaggaagaggctgagaaaaggagagaggacttaaaactgaaagctcaggagtcgataaggcagtggaaactcaagcataagaaactcgagcgcgcactcgagaagcaaagcgaaacagtcgacgagctcactggcaaaaacaatcagattctgaaggaaaaagacgaattaaaaacacagctttacgccgctttacagcagattgagaacctgaggaaggagcttaacgacgtactgactaaaagagccctgcaagaggaggaactccactctaaggaggaaaaattaagggacattaaatcacaccaggcagacctggaactggaagtcaaaaattctctggacacgatacatcgtctggaatccgagctgaagaaacagagcaaaatacaatcccaaatgaaagtggaaaaggcgcatctggaggaggagattgccgaactgaagaagagtcaggctcaggacaaggccaagctgctcgaaatgcaagagagcataaaagacctgagtgccatccgcgcagacctggctaacaagttggcggaagaggagcgcgctaagaaagccgtactgaaagatctgtctgacctgactgcccaggcaaaatctcgcgatgaggagacagcaactatcatcactcaattaaagctggagcgtgacgtgcaccagcgcgagttgaaggatctgacttcatcgcttcagagcgttaaaaccaagcacgagcagaacattcaagaactaatgaaacacttcaagaaggagaagtccgaggcagagaatcatataaggacactcaaagccgaaagcctggaggagaagaacatggccaaaatccatcgtggacagctcgagaaacttaaatcccagtgcgataggttgacagaggagctgacccaaaacgaaaacgagaacaagaaactcaagcttaaataccaatgcttgaaggatcagctagaggaaagggagaagcacattagcatcgaggaagaacacctgcgcagaatggaggaggctaggctacaattgaaggatcagcttctgtgccttgagaccgagcaagagagcattctgggcgtcattggaaaggaaatcgacgcggcttgcaagaccttttccaaagattccgtcgagaagctcaaggttttcagcagcggcccagatattcactacgatccacatcgctggttggccgagtcaaagactaagctgcagtggttgtgcgaagaacttaaagaacgcgagaaccgcgaaaagaatctgaggcatcagctgatgttgtgcagacagcagttacggaatctgacagagaacaaagagtccgaactccaatgtctcttccaacagatcgaaagacaggagcagctgcttgacgaaattcacagggagaaacgagacttactcgaggaaacccagcgcaaagacgaggagatgggaagtcttcaggatagagtaatcgctctcgagacatcgactcaggttgctctcgatcaccttgagtcagtaccagaaaagctatctctgctggaagattttaaggattttagagattcatgtagcagtagtgaacgaacagacggcaggtactccaagtaccgggttaggaggaatagtctgcaacaccatcaagatgacacaaagtatcggacaaaatctttcaaaggggataggacttttctggaaggatcgcatactagggggcttgatcacagtagctcatggcaggaccatagccgattcctaagtagcccacgctttagctatgttaatagctttacaaaaaggactgttgcacccgattcagcctccaataaggaggatgctactatgaacggtacctcatctcagcctaaaaaagaggaatacggcagttag

SEQ ID NO: 293265 - DNA, 2964 bp, Artificial Sequence
  derived and/or modified sequence
atggcagagtcgagtagtgagagtgatcacttcaggtgtagagaccgactttcaccttgggcagccaggtctacccatcgagggacaagatccttgcccacagtggaggtaactgagaaggtgaatactatcacatccacactgcaagacacgtcacgaaatctccgccaggtggatcagatgctggggagatacagagagtacagtaatggccaggcaggcgcaatcgagcacttgaaggagagcttggagcaatcaattgaccagctcagaagccagaggcttctccgcaactcaggaggtagatcaataagcgtgacatccttatcagcctcggacttggatgggggaacagggagtgaacttcaccacttccccccaacatccccattgaaggattatggtgatccccaggggattaagaggatgcggtctaggacgggagtcagattcgtgcaggaaaccgatgatatgactcagcttcacggctttcaccaaagtctcagggacttaagttctgagcaaattcgattaggtgacgatttcaatagggaattaagtcggcgtagccgatccgatgccgaaacgaaacgggctttagaagagctgaccgaaaagcttaatgaggcccagaagcaggaagtcgtgagcgacagggtggaacgcagacttcaggaactggagcgcgagatgaggaccgagagggagttggtcgaaaggaggcaggaccaactggggcttatgagcctgcagctccaagaggcactcaaaaagcaggaagccaaggccgacgaacacgaaggcgctattaaaaataaacttagacagaccgaaactgaaaagaaccaactggaacaagagctggagctgtctaggcgtttactaaatcagtccgaggggtctcgggagacgttgctccaccaggtggaagagttaaggacacagctaaccaaagctgaaggagaccgaaagggcctccagcaccaggtgtcacagatcagtaagcaacagagcaactaccaagacgaacaaggcgaggactggaggttcagaagaggtgtcgaaagggaaaagcaggatttagagaagcagatgagcgacttgcgggttcagctcaacttttctgcgatggcgtctgaacttgaggaggtcaaacggtgtatggagcggaaagacaaggagaaggcccaccttgcctctcaagtggagaacctgactagagagctggaaaatggggaaaagcagcagttgcaaatgctggacaggctcaaagaaattcagaaccacttcgacacttgcgaagctgagcgtaagcatgccgacctgcagatttcagaattgacacgccatgctgaggacgcaactaagcaagctgagcgctacctgagtgaattgcaacagtctgaggcactcaaggaggaggctgagaaacggagagaagatcttaagctgaaagcccaagaatccataagacagtggaaattaaagcataagaagcttgagagagctctcgagaaacagtcagagacggtggatgagcttaccggcaagaataaccagattctcaaggagaaggatgaactaaaaactcaactgtatgccgctcttcagcagatcgagaacctgagaaaagagctgaatgacgtgctgactaagagggccctgcaggaagaggagctgcattctaaggaggagaagttgagggatattaagtctcatcaggcggatctagagctggaagtgaagaactctttagacacaatccatcgcctcgagagcgagctgaagaagcagtcaaaaatccagtcacagatgaaggtggaaaaggcccatcttgaggaggagatcgcagaactcaaaaaaagccaggcccaggataaagccaaactacttgagatgcaggaaagtatcaaggacctgtccgccattcgggctgacctcgctaataagctcgcagaggaggaacgcgcaaaaaaggcagttctcaaagacctaagcgacctcactgcacaagcaaaatcccgcgatgaggaaacggctacaattatcacgcagctcaaactggagagggacgtccaccagcgcgagctgaaagacctgacgtcatctttacagtcggtaaagaccaagcacgagcagaacatccaggagctaatgaaacactttaagaaggaaaaaagcgaagcagaaaaccatatccgaacgctgaaggccgaatctctggaagagaaaaacatggccaagatccataggggtcaactcgagaagctcaaatcccagtgtgatcgtcttaccgaagaattaacacagaatgagaacgagaataagaagctaaaacttaaatatcaatgtctaaaagatcagctggaagaaagggaaaagcatatttcaattgaggaggaacatctacgcagaatggaagaagcacggttacagctgaaagaccaattactgtgccttgagactgaacaggagtcaattctgggcgtcatcggcaaagagatagacgctgcgtgtaagaccttctccaaggattcagttgagaagctgaaagtttttagctcgggacctgacatccattatgatccacataggtggctcgccgaatccaagacaaaactgcagtggctgtgtgaggagttaaaggaacgtgagaacagagagaaaaacctgcggcatcagctcatgctatgcaggcaacagctgaggaaccttacagagaataaagagagcgaactgcagtgcctgttccagcaaatcgagcggcaggaacaacttctcgacgagatccaccgcgaaaagcgggaccttctcgaggagacacagagaaaagacgaggaaatgggtagcctgcaggaccgggtcattgcactagaaaccagcacacaagtggctctggatcatctggaatcggtgcctgagaagctgagcttattggaagactttaaggactttcggagatag

SEQ ID NO: 293266 - DNA, 3285 bp, Artificial Sequence
  derived and/or modified sequence
atggcagagagttcctccgagagcgatcactttcgctgccgggataggctgtccccttgggccgctagaagcactcataggggaacccgctccctcccaactgtagaggtgacagaaaaagttaacacaatcacctcaacactgcaggatacatccaggaatctgcgccaggtggatcaaatgctgggcaggtacagagagtactccaatggacaggccggagctatcgagcatttaaaggaaagcttggaacagtcaatagaccagctgcggtcccagagactgctgcgcaactctggcggtagatcgatctctgtgacctcgctgtctgcatccgacctggacggcggaactggaagtgaattacatcacttccctcccacatcaccactgaaggactacggagacccacaggggatcaaacgaatgcgctcccgaacaggcgtgcgcttcgtccaggagactgacgatatgactcagctgcacggattccatcagagccttagggacctttcatctgaacaaatccggctgggagacgactttaatagagaactgtcacgccgtagccggagcgacgcagagactaagcgagctctggaagagttgacagaaaaactcaacgaggcccagaagcaggaggtcgtgtccgatcgggttgaacgccgactgcaggaactggagcgggagatgagaaccgaacgcgagctggtggagcggaggcaggatcaactggggctgatgtcactgcaactgcaggaggccttaaagaaacaagaggccaaggcggacgaacacgagggggcaatcaaaaacaaactgcggcagaccgagacagaaaagaaccagctggagcaagagcttgagcttagcaggcggttattgaatcagtctgaaggcagcagagaaacactgctccaccaggtagaagaactgcgaacacaacttaccaaagctgagggcgatcgtaaaggactgcaacaccaagtatcccagataagcaaacagcagtctaactaccaggacgagcagggggaggattggaggttccgaaggggcgttgagagggagaagcaggaccttgagaaacagatgtccgatctccgcgtccagctcaatttctcagctatggccagcgaactggaggaggtgaagcgttgcatggagcgaaaggacaaagaaaaggcccatcttgcctctcaagtggagaatttgaccagggaattagagaatggagaaaagcagcaactgcaaatgctggacaggctcaaggagattcagaaccactttgatacgtgcgaggctgagaggaagcacgccgatctgcagatatccgagctgactcggcacgccgaggacgctactaagcaggctgaaagatacttgtccgagcttcagcaatcagaagcgctgaaggaggaggccgagaaaaggagggaagacctcaagctgaaagcccaggaaagtatacgccaatggaagctcaagcataaaaagctcgagagggccttggaaaaacagtcggaaaccgttgacgaactgactggaaaaaacaaccagattttgaaggaaaaagatgagcttaagacccagctctacgccgctctacaacaaattgagaaccttcgaaaggaactgaatgacgtcttaaccaagcgggctctgcaagaggaggaacttcattcaaaggaggagaagctgcgagacatcaagagccaccaggcagatctagaattggaagttaagaactctctggatacaattcaccgcttagagagtgaacttaagaaacagagcaagatccagtcccagatgaaagtcgaaaaggctcatctcgaagaggagatcgctgaactgaaaaagagtcaagcccaggataaagccaaactgcttgaaatgcaggaaagtatcaaagacctctctgcaataagggccgatttagctaataaactggccgaagaagagagagcaaagaaggccgtcctcaaagacctgtcggatttgacggcacaggccaagagtagggatgaagaaaccgctactatcatcacccagctcaaactggagcgcgacgtgcatcagagagaactgaaagatctgacttcaagcctgcaaagcgtgaagaccaaacatgagcagaacatccaagaactgatgaaacattttaaaaaagaaaaatcagaggccgagaatcacattcgaacacttaaggcagagtcgttagaggaaaagaacatggccaaaattcatagaggacagctagaaaaactaaaatcccagtgcgatcgtttaacagaagagctaacccagaacgagaacgagaataagaagcttaagctgaaataccaatgcttgaaagaccaattggaggaacgggagaagcatatttctatagaagaggagcacctccgaagaatggaggaggcacggctacagcttaaggaccagttgttgtgcctggaaacggagcaggagagcatcctcggagtaatcggtaaagagatcgatgccgcttgtaagacttttagcaaagattctgtcgagaagctgaaagtattttcttccggacccgacatccactacgacccacatcgctggcttgccgaaagcaagaccaagctgcaatggctttgtgaagaactgaaggaacgcgagaacagagagaaaaatctgcggcatcagctcatgctgtgcagacaacagttgaggaacctcactgaaaataaggagtcagagctccagtgtttgtttcagcaaatcgaaagacaagagcagctcctcgacgaaatccacagagagaaaagagacctgcttgaagagactcagcgcaaagacgaggagatgggctccctgcaggatcgagtgatcgcattggaaaccagtacacaggttgccctcgatcatcttgagtccgtacctgagaagctgtctttgctggaagattttaaagatttccgagattcttgcagctcatcggaacgaaccgacgggaggtattccaagtatagagtacgaagaaactccctccagcaccaccaggacgacaccaagtaccgcacaaaaagttttaagggcgataggacgtttctggaaggtagtcatacaagaggattggaccacagcagctcctggcaagaccattctcgattcctatcctcccccagattcagctatgtgaattctttcacaaagaggacagtcgctccagatagcgcgtctaataaggaggacgccaccatgaacggtactagcagtcagcccaagaaagaggaatacggaagctag

SEQ ID NO: 293267 - DNA, 4662 bp, Artificial Sequence
  derived and/or modified sequence
caagcggcggcagcggggtcctgtactcttgctgtggctgggcggctagttcaagttgccatagctgcgagtctggggagagcacagtcggttgagtcgctgcgtttggtcagttgcaccttctgggtcactggtagccgcgggagccgggtggggcctaggcgatgatccggcattaaggagctgggatcatcctccgtctcaggtggtttggggaaagtgtaggggcaaccaaagatcatcggcttgactaggccctttgccctgaacctcatgaagaaatgataggaggcagacatatgtgcctaaaaagagcgttgagctcagagaagagcaactcggagttttgggggtgtgctttgatttgtgtacatcaatggcagaatcatccagcgaatcagatcacttccgctgtcgtgaccgattgagtccatgggctgccagatcaacgcacaggggaactcgaagtcttcctacagtagaagttaccgagaaggtcaacactataacaagtactttacaggataccagtcggaacctgcgacaagtggaccagatgcttggacgataccgagaatacagtaatggacaggcgggtgcgatagaacatttaaaagaaagcttggaacaatcaatcgaccaactccggagtcaacgtttattgagaaactcaggagggagaagtatttctgttacaagtttgagtgcaagtgaccttgatggtggcactgggtcagagctccatcattttccacctacctcacctctcaaggactatggggatccacagggtattaaacgaatgagatcaagaactggtgtccggtttgttcaagagactgatgatatgactcagcttcatggttttcatcagtctcttcgagacctcagcagtgaacaaattcgccttggagatgatttcaacagggagctttccagaaggagccggtcagatgccgaaacaaaaagggctttggaagaattgactgaaaaacttaatgaagcccagaaacaagaagtggtttcagatcgggtggagcggcggcttcaggaactggagagagagatgcgcacagaaagggagctggtggaaagacgccaggatcaactgggactcatgtccctgcagctacaggaggcactaaagaaacaagaagctaaagcagatgagcatgagggggcaataaaaaataagctaagacaaactgaaactgagaagaatcaacttgaacaggaattggagctatctcgaaggttattgaatcaatcagaaggcagccgagaaacacttttgcatcaggtagaagaactgcgtacacaacttacgaaagcagaaggtgatcgaaagggtttacagcatcaagtatctcagatttccaagcaacagtcaaactatcaggatgaacaaggggaggactggagatttaggagaggggttgagcgggaaaaacaggacctggagaagcaaatgtcagatttgagagtgcagctgaacttcagcgcaatggcatctgagttagaggaagtgaaacggtgcatggagagaaaagacaaggagaaagcacatttggcatcacaagtagagaatttaacacgtgaactggagaatggggaaaaacagcaactgcagatgttggatcgacttaaggagatccagaatcactttgacacatgtgaggccgagcgtaagcatgctgaccttcagatctcagagctgactcgccatgcggaggatgcaaccaagcaggctgagcggtacctcagtgagctccagcagtcagaggctctgaaagaggaggcggagaagaggagggaagacctgaaactgaaagctcaagaatccattaggcagtggaagcttaagcataagaagttagaacgagcgttggagaaacaatctgaaactgttgatgaactgacaggcaagaataatcagattttaaaagaaaaggatgaattgaaaacccagctgtatgcagcattacaacaaatagagaatcttcgaaaggaattgaatgatgtcctaacaaagcgtgcccttcaggaggaggagcttcactccaaggaggagaaattacgtgatattaagtctcatcaagctgaccttgaattggaagttaagaattccctggataccatccatagactggagagcgaattgaaaaagcagagtaagatccaaagccagatgaaagttgagaaagctcacttggaggaagaaattgcagagctcaagaagagccaggcccaggacaaagctaaacttcttgagatgcaagagtccatcaaggacctgagtgccatccgagcagatcttgctaataaattggctgaggaagagagagccaagaaagcagtgcttaaggacctttctgacctcactgcacaggcaaaatccagggatgaagaaacagctacaatcatcacacagttaaagctggaacgagatgtgcaccagagggagctgaaagatctcacatcatcattgcagagtgtgaaaacaaaacacgaacagaatatccaggagcttatgaagcactttaagaaagaaaagagtgaggctgagaatcatatcaggactctgaaggctgaaagtttagaagagaagaatatggctaaaattcatcgtggtcagctggagaagttgaaatcacagtgtgacagactgacagaggaattaacccagaatgaaaatgagaacaaaaaactgaagctaaaatatcaatgtttgaaggatcaactagaagaaagggaaaaacatataagcattgaagaggagcacttaaggaggatggaagaggccagattgcagctcaaggatcaacttctttgcttggagactgaacaggaatccattcttggtgtgataggaaaggaaattgatgcagcttgtaaaacattctccaaggactcagtggagaaattaaaagttttttcatctggtcctgatatacattatgacccacatcgctggttagcagaaagcaagactaaacttcagtggctctgtgaggaactgaaagagagagaaaacagagagaaaaatctgcgacaccagctgatgctctgcagacaacaactcaggaatttgactgaaaacaaggaatctgagttgcagtgtctctttcaacagatagaaaggcaggagcagcttctggatgaaatacatcgtgagaagagagatctactggaagagacccaaagaaaagatgaagaaatgggatctctgcaggaccgtgtaattgcattagaaacgagtacccaagtggccttggaccatctggagtctgtgcctgagaaactgagcctactagaagatttcaaagacttcagagattcctgcagttcatctgagagaactgatggaagatattccaaatacagggttcgcagaaattctcttcagcatcaccaagatgacaccaagtacagaaccaaaagtttcaaaggtgacagaacctttctggaaggttcccacactcgtgggttagatcactcatcctcttggcaggatcacagtcgcttcctgtctagtccaagattttcatacgtgaactcatttaccaaaagaactgttgctccagattcagcttcaaacaaggaagatgccacaatgaatggaacaagttcacaacccaaaaaagaggaatatgggagctaaaaaagcaaatgtaatttgttattttacatgagtatgttacaaataataacatctctattcttacagcaatttggcccagattatctaacagacatacctgcagctttggctctttggtattgccaaacattgacaaaagtgacaatactgttggtccttgtgaatggtaaaccaatccaaataatatcagatcatgaatgatgtgcagctaatttatttgcaacttatactagcacagaaagaatgatattttttcactttgtattttcctttttcaagtgtggtcagtcacattttcccaaccaaaatttggatttctaattgaggccttttaaaaattactggctaaaaagaaggaaaatgagtttcccttgaggcaaaagttgccagcactttagattcagggagcatttatatacaactgattttttgaaaaattttctccctaataaattatcatgtgttataacatgtggagatgtgcatatataacattagacagtccactttataaatgctcaggacttttatatctatcatcttaacagtccacaactgcataccgtagctgaaaattatttccaatcatccatttttaatagcaataaagaattcataaatgatatctgaactgtagagcactgtaaagaattcatagcacaatttatttatttgtctttttgtggccaaatatcctactgtgatcacttcagtcatatcctggaccgtctttggtttactgtgactaaaatcatagcaccaaactcctttgtccatgagatttatatataatcttgtataatttggtcctatctgcttctaccatcccaacttttttcatcaaagtgtctaagaacgtattccctttacacgctgatctcctagtggagaaggatttatattaaatgctaagtaatagtaaactttcaggaactgaatcctattgggtcatggattctgcatagacaagggcaataaagcaatacctttgtaatatgcat

SEQ ID NO: 293268 - DNA, 4461 bp, Artificial Sequence
  derived and/or modified sequence
gtggtttggggaaagtgtaggggcaaccaaagatcatcggcttgactaggccctttgccctgaacctcatgaagaaatgataggaggcagacatatgtgcctaaaaagagcgttgagctcagagaagagcaactcggagttttgggggtgtgctttgatttgtgtacatcaatggcagaatcatccagcgaatcagatcacttccgctgtcgtgaccgattgagtccatgggctgccagatcaacgcacaggggaactcgaagtcttcctacagtagaagttaccgagaaggtcaacactataacaagtactttacaggataccagtcggaacctgcgacaagtggaccagatgcttggacgataccgagaatacagtaatggacaggcgggtgcgatagaacatttaaaagaaagcttggaacaatcaatcgaccaactccggagtcaacgtttattgagaaactcaggagggagaagtatttctgttacaagtttgagtgcaagtgaccttgatggtggcactgggtcagagctccatcattttccacctacctcacctctcaaggactatggggatccacagggtattaaacgaatgagatcaagaactggtgtccggtttgttcaagagactgatgatatgactcagcttcatggttttcatcagtctcttcgagacctcagcagtgaacaaattcgccttggagatgatttcaacagggagctttccagaaggagccggtcagatgccgaaacaaaaagggctttggaagaattgactgaaaaacttaatgaagcccagaaacaagaagtggtttcagatcgggtggagcggcggcttcaggaactggagagagagatgcgcacagaaagggagctggtggaaagacgccaggatcaactgggactcatgtccctgcagctacaggaggcactaaagaaacaagaagctaaagcagatgagcatgagggggcaataaaaaataagctaagacaaactgaaactgagaagaatcaacttgaacaggaattggagctatctcgaaggttattgaatcaatcagaaggcagccgagaaacacttttgcatcaggtagaagaactgcgtacacaacttacgaaagcagaaggtgatcgaaagggtttacagcatcaagtatctcagatttccaagcaacagtcaaactatcaggatgaacaaggggaggactggagatttaggagaggggttgagcgggaaaaacaggacctggagaagcaaatgtcagatttgagagtgcagctgaacttcagcgcaatggcatctgagttagaggaagtgaaacggtgcatggagagaaaagacaaggagaaagcacatttggcatcacaagtagagaatttaacacgtgaactggagaatggggaaaaacagcaactgcagatgttggatcgacttaaggagatccagaatcactttgacacatgtgaggccgagcgtaagcatgctgaccttcagatctcagagctgactcgccatgcggaggatgcaaccaagcaggctgagcggtacctcagtgagctccagcagtcagaggctctgaaagaggaggcggagaagaggagggaagacctgaaactgaaagctcaagaatccattaggcagtggaagcttaagcataagaagttagaacgagcgttggagaaacaatctgaaactgttgatgaactgacaggcaagaataatcagattttaaaagaaaaggatgaattgaaaacccagctgtatgcagcattacaacaaatagagaatcttcgaaaggaattgaatgatgtcctaacaaagcgtgcccttcaggaggaggagcttcactccaaggaggagaaattacgtgatattaagtctcatcaagctgaccttgaattggaagttaagaattccctggataccatccatagactggagagcgaattgaaaaagcagagtaagatccaaagccagatgaaagttgagaaagctcacttggaggaagaaattgcagagctcaagaagagccaggcccaggacaaagctaaacttcttgagatgcaagagtccatcaaggacctgagtgccatccgagcagatcttgctaataaattggctgaggaagagagagccaagaaagcagtgcttaaggacctttctgacctcactgcacaggcaaaatccagggatgaagaaacagctacaatcatcacacagttaaagctggaacgagatgtgcaccagagggagctgaaagatctcacatcatcattgcagagtgtgaaaacaaaacacgaacagaatatccaggagcttatgaagcactttaagaaagaaaagagtgaggctgagaatcatatcaggactctgaaggctgaaagtttagaagagaagaatatggctaaaattcatcgtggtcagctggagaagttgaaatcacagtgtgacagactgacagaggaattaacccagaatgaaaatgagaacaaaaaactgaagctaaaatatcaatgtttgaaggatcaactagaagaaagggaaaaacatataagcattgaagaggagcacttaaggaggatggaagaggccagattgcagctcaaggatcaacttctttgcttggagactgaacaggaatccattcttggtgtgataggaaaggaaattgatgcagcttgtaaaacattctccaaggactcagtggagaaattaaaagttttttcatctggtcctgatatacattatgacccacatcgctggttagcagaaagcaagactaaacttcagtggctctgtgaggaactgaaagagagagaaaacagagagaaaaatctgcgacaccagctgatgctctgcagacaacaactcaggaatttgactgaaaacaaggaatctgagttgcagtgtctctttcaacagatagaaaggcaggagcagcttctggatgaaatacatcgtgagaagagagatctactggaagagacccaaagaaaagatgaagaaatgggatctctgcaggaccgtgtaattgcattagaaacgagtacccaagtggccttggaccatctggagtctgtgcctgagaaactgagcctactagaagatttcaaagacttcagagattcctgcagttcatctgagagaactgatggaagatattccaaatacagggttcgcagaaattctcttcagcatcaccaagatgacaccaagtacagaaccaaaagtttcaaaggtgacagaacctttctggaaggttcccacactcgtgggttagatcactcatcctcttggcaggatcacagtcgcttcctgtctagtccaagattttcatacgtgaactcatttaccaaaagaactgttgctccagattcagcttcaaacaaggaagatgccacaatgaatggaacaagttcacaacccaaaaaagaggaatatgggagctaaaaaagcaaatgtaatttgttattttacatgagtatgttacaaataataacatctctattcttacagcaatttggcccagattatctaacagacatacctgcagctttggctctttggtattgccaaacattgacaaaagtgacaatactgttggtccttgtgaatggtaaaccaatccaaataatatcagatcatgaatgatgtgcagctaatttatttgcaacttatactagcacagaaagaatgatattttttcactttgtattttcctttttcaagtgtggtcagtcacattttcccaaccaaaatttggatttctaattgaggccttttaaaaattactggctaaaaagaaggaaaatgagtttcccttgaggcaaaagttgccagcactttagattcagggagcatttatatacaactgattttttgaaaaattttctccctaataaattatcatgtgttataacatgtggagatgtgcatatataacattagacagtccactttataaatgctcaggacttttatatctatcatcttaacagtccacaactgcataccgtagctgaaaattatttccaatcatccatttttaatagcaataaagaattcataaatgatatctgaactgtagagcactgtaaagaattcatagcacaatttatttatttgtctttttgtggccaaatatcctactgtgatcacttcagtcatatcctggaccgtctttggtttactgtgactaaaatcatagcaccaaactcctttgtccatgagatttatatataatcttgtataatttggtcctatctgcttctaccatcccaacttttttcatcaaagtgtctaagaacgtattccctttacacgctgatctcctagtggagaaggatttatattaaatgctaagtaatagtaaactttcaggaactgaatcctattgggtcatggattctgcatagacaagggcaataaagcaatacctttgtaatatgcattaca

SEQ ID NO: 293269 - DNA, 3285 bp, Artificial Sequence
  derived and/or modified sequence
atggccgagagcagcagcgagagcgaccacttcagatgcagagacagactgagcccctgggccgccagaagcacccacagaggcaccagaagcctgcccaccgtggaggtgaccgagaaggtgaacaccatcaccagcaccctgcaggacaccagcagaaacctgagacaggtggaccagatgctgggcagatacagagagtacagcaacggccaggccggcgccatcgagcacctgaaggagagcctggagcagagcatcgaccagctgagaagccagagactgctgagaaacagcggcggcagaagcatcagcgtgaccagcctgagcgccagcgacctggacggcggcaccggcagcgagctgcaccacttcccccccaccagccccctgaaggactacggcgacccccagggcatcaagagaatgagaagcagaaccggcgtgagattcgtgcaggagaccgacgacatgacccagctgcacggcttccaccagagcctgagagacctgagcagcgagcagatcagactgggcgacgacttcaacagagagctgagcagaagaagcagaagcgacgccgagaccaagagagccctggaggagctgaccgagaagctgaacgaggcccagaagcaggaggtggtgagcgacagagtggagagaagactgcaggagctggagagagagatgagaaccgagagagagctggtggagagaagacaggaccagctgggcctgatgagcctgcagctgcaggaggccctgaagaagcaggaggccaaggccgacgagcacgagggcgccatcaagaacaagctgagacagaccgagaccgagaagaaccagctggagcaggagctggagctgagcagaagactgctgaaccagagcgagggcagcagagagaccctgctgcaccaggtggaggagctgagaacccagctgaccaaggccgagggcgacagaaagggcctgcagcaccaggtgagccagatcagcaagcagcagagcaactaccaggacgagcagggcgaggactggagattcagaagaggcgtggagagagagaagcaggacctggagaagcagatgagcgacctgagagtgcagctgaacttcagcgccatggccagcgagctggaggaggtgaagagatgcatggagagaaaggacaaggagaaggcccacctggccagccaggtggagaacctgaccagagagctggagaacggcgagaagcagcagctgcagatgctggacagactgaaggagatccagaaccacttcgacacctgcgaggccgagagaaagcacgccgacctgcagatcagcgagctgaccagacacgccgaggacgccaccaagcaggccgagagatacctgagcgagctgcagcagagcgaggccctgaaggaggaggccgagaagagaagagaggacctgaagctgaaggcccaggagagcatcagacagtggaagctgaagcacaagaagctggagagagccctggagaagcagagcgagaccgtggacgagctgaccggcaagaacaaccagatcctgaaggagaaggacgagctgaagacccagctgtacgccgccctgcagcagatcgagaacctgagaaaggagctgaacgacgtgctgaccaagagagccctgcaggaggaggagctgcacagcaaggaggagaagctgagagacatcaagagccaccaggccgacctggagctggaggtgaagaacagcctggacaccatccacagactggagagcgagctgaagaagcagagcaagatccagagccagatgaaggtggagaaggcccacctggaggaggagatcgccgagctgaagaagagccaggcccaggacaaggccaagctgctggagatgcaggagagcatcaaggacctgagcgccatcagagccgacctggccaacaagctggccgaggaggagagagccaagaaggccgtgctgaaggacctgagcgacctgaccgcccaggccaagagcagagacgaggagaccgccaccatcatcacccagctgaagctggagagagacgtgcaccagagagagctgaaggacctgaccagcagcctgcagagcgtgaagaccaagcacgagcagaacatccaggagctgatgaagcacttcaagaaggagaagagcgaggccgagaaccacatcagaaccctgaaggccgagagcctggaggagaagaacatggccaagatccacagaggccagctggagaagctgaagagccagtgcgacagactgaccgaggagctgacccagaacgagaacgagaacaagaagctgaagctgaagtaccagtgcctgaaggaccagctggaggagagagagaagcacatcagcatcgaggaggagcacctgagaagaatggaggaggccagactgcagctgaaggaccagctgctgtgcctggagaccgagcaggagagcatcctgggcgtgatcggcaaggagatcgacgccgcctgcaagaccttcagcaaggacagcgtggagaagctgaaggtgttcagcagcggccccgacatccactacgacccccacagatggctggccgagagcaagaccaagctgcagtggctgtgcgaggagctgaaggagagagagaacagagagaagaacctgagacaccagctgatgctgtgcagacagcagctgagaaacctgaccgagaacaaggagagcgagctgcagtgcctgttccagcagatcgagagacaggagcagctgctggacgagatccacagagagaagagagacctgctggaggagacccagagaaaggacgaggagatgggcagcctgcaggacagagtgatcgccctggagaccagcacccaggtggccctggaccacctggagagcgtgcccgagaagctgagcctgctggaggacttcaaggacttcagagacagctgcagcagcagcgagagaaccgacggcagatacagcaagtacagagtgagaagaaacagcctgcagcaccaccaggacgacaccaagtacagaaccaagagcttcaagggcgacagaaccttcctggagggcagccacaccagaggcctggaccacagcagcagctggcaggaccacagcagattcctgagcagccccagattcagctacgtgaacagcttcaccaagagaaccgtggcccccgacagcgccagcaacaaggaggacgccaccatgaacggcaccagcagccagcccaagaaggaggagtacggcagctag

SEQ ID NO: 293270 - protein, 1931 aa, Artificial Sequence
  derived and/or modified sequence
MAARSAPSCHLRLEWVYGYRGHQCRNNLYYTAAKEIVYFVAGVGVVYSPREHRQKFYRGHSDDIISLALHPERVLVATGQVGKEPYICIWDSYTVQTISVLKDVHTHGIACLAFDLDGQRLVSVGLDSKNAVCVWDWKRGKMLSMAPGHTDRIFDISWDLYQPNKLVSCGVKHIKFWSLCGNALTPKRGVFGKTGDLQTILCLACARDELTYSGALNGDIYVWKGINLIRTIQGAHAAGIFSMNACEEGFATGGRDGCIRLWDLTFKPITVIDLRETDQGYKGLSVRSVCWRGDHILVGTQDSEIFEIVVQERNKPFLIMQGHCEGELWALAVHPTKPLAVTGSDDRSVRIWSLVDHALIARCNMEEPIRCAAVNADGIHLALGMKDGSFTVLRVRDMTEVVHIKDRKEAIHELKYSPDGTYLAVGCNDSSVDIYGVAQRYKKVGECLGSLSFITHLDWSSDSRYLQTNDGNGKRLFYRMPGGKEVTSTEEIKGVHWASWTCVSGLEVNGIWPKYSDINDINSVDGNYIGQVLVTADDYGIIKLFRYPCLRKGAKFRKYIGHSAHVTNVRWSHDYQWVISIGGADHSVFQWKFIPERKLKDAVHIAPQESLADSHSDESDSDLSDVPELDSEIEQETQLTYRRQVYKEDLPQLKEQCKEKQKSATSKRRERAPGNSIRLHFVHGYRGYDCRSNLFYTQIGEIVYHVAAVGVIYNRQQNTQRFYLGHDDDILCLTIHPLKDYVATGQVGRDPSIHIWDTETIKPLSILKGHHQYGVSAVDFSADGKRLASVGIDDSHTVVLWDWKKGEKLSIARGSKDKIFVVKMNPYVPDKLITAGIKHMKFWRKAGDVCIWRDIFLVKTVKAHDGPVFSMHALEKGFVTGGKDGIVALWDDSFERCLKTYAIKRAALAPGSKGLLLEDNPSIRAISLGHGHILVGTKNGEILEVDKSGPITLLVQGHMEGEVWGLATHPYLPICATVSDDKTLRIWDLSPSHCMLAVRKLKKGGRCCCFSPDGKALAVGLNDGSFLMANADTLEDLVSFHHRKDMISDIRFSPGSGKYLAVASHDSFIDIYNVMSSKRVGICKGATSYITHIDWDIRGKLLQVNTGAKEQLFFEAPRGKKQTIPSVEVEKIAWASWTSVLGLCCEGIWPVIGEVTDVTASCLTSDKMVLATGDDLGFVKLFRYPTKGKFGKFKRYVAHSTHVTNVRWTYDDSMLVTLGGTDMSLMVWTNEMEGYREKRPCDSEESDIDSEEDGGYDSDVTRENEISYTIRALSTNIRPMLGIKPHLQQKEPSIDERPPVSRAPPQPEKLQTNNVGKKKRPIEDLVLELIFGYRGRDCRNNVHYLNDGDDIIYHTASVGILHNVATGSQSFYQEHNDDILCLTVNQHPKFINIVATGQVVLSCSLLTTAPSIHIWDAMNKQTLSILRCYHSKGVCSVSFSATGKLLLSVGLDPEHTITIWRWQEGAKIASRAGHNQRIFVAEFRPDSDTQFVSVGVKHVKFWTLAGRALLSKKGLLSTLEDARMQTMLAIAFGANNLTFTGTISGDVCVWKDHILCRIVARAHNGPVFAMYTTLRDGLIVTGGKERPSKEGGAVKLWDQELRRCRAFRLETGQATDCVRSVCRGKGKILVGTRNAEIIEVGEKNAACNILVNGHVDGPIWGLATHPSRDFFLSAAEDGTVRLWDIADKKMLNKVNLGHAARTVCYSPEGDMVAIGMKNGEFIILLVSSLKIWGKKRDRRCAIHDIRFSPDSRYLAVGSSENSVDFYDLTLGPTLNRISYCKDIPSFVIQMDFSADSSYLQVSSGCYKRHVYEVPSGKHLMDHAAIDRITWATWTSILGDEVLGIWSRHAEKADVNCACVSHSGISLVTGDDFGMVKLFDFPCPEKFAKHKRFLGHSPHVTNIRFTSGDRHVVSAGGDDCSLFVWKCVHTPH

SEQ ID NO: 293271 - protein, 1969 aa, Artificial Sequence
  derived and/or modified sequence
MAARSAPSCHLRLEWVYGYRGHQCRNNLYYTAAKEIVYFVAGVGVVYSPREHRQKFYRGHSDDIISLALHPERVLVATGQVGKEPYICIWDSYTVQTISVLKDVHTHGIACLAFDLDGQRLVSVGLDSKNAVCVWDWKRGKMLSMAPGHTDRIFDISWDLYQPNKLVSCGVKHIKFWSLCGNALTPKRGVFGKTGDLQTILCLACARDELTYSGALNGDIYVWKGINLIRTIQGAHAAGIFSMNACEEGFATGGRDGCIRLWDLTFKPITVIDLRETDQGYKGLSVRSVCWRGDHILVGTQDSEIFEIVVQERNKPFLIMQGHCEGELWALAVHPTKPLAVTGSDDRSVRIWSLVDHALIARCNMEEPIRCAAVNADGIHLALGMKDGSFTVLRVRDMTEVVHIKDRKEAIHELKYSPDGTYLAVGCNDSSVDIYGVAQRYKKVGECLGSLSFITHLDWSSDSRYLQTNDGNGKRLFYRMPGGKEVTSTEEIKGVHWASWTCVSGLEVNGIWPKYSDINDINSVDGNYIGQVLVTADDYGIIKLFRYPCLRKGAKFRKYIGHSAHVTNVRWSHDYQWVISIGGADHSVFQWKFIPERKLKDAVHIAPQESLADSHSDESDSDLSDVPELDSEIEQETQLTYRRQVYKEDLPQLKEQCKEKQKSATSKRRERAPGNSIRLHFVHGYRGYDCRSNLFYTQIGEIVYHVAAVGVIYNRQQNTQRFYLGHDDDILCLTIHPLKDYVATGQVGRDPSIHIWDTETIKPLSILKGHHQYGVSAVDFSADGKRLASVGIDDSHTVVLWDWKKGEKLSIARGSKDKIFVVKMNPYVPDKLITAGIKHMKFWRKAGGGLIGRKGYIGTLGKNDTMMCAVYGWTEEMAFSGTSTGDVCIWRDIFLVKTVKAHDGPVFSMHALEKGFVTGGKDGIVALWDDSFERCLKTYAIKRAALAPGSKGLLLEDNPSIRAISLGHGHILVGTKNGEILEVDKSGPITLLVQGHMEGEVWGLATHPYLPICATVSDDKTLRIWDLSPSHCMLAVRKLKKGGRCCCFSPDGKALAVGLNDGSFLMANADTLEDLVSFHHRKDMISDIRFSPGSGKYLAVASHDSFIDIYNVMSSKRVGICKGATSYITHIDWDIRGKLLQVNTGAKEQLFFEAPRGKKQTIPSVEVEKIAWASWTSVLGLCCEGIWPVIGEVTDVTASCLTSDKMVLATGDDLGFVKLFRYPTKGKFGKFKRYVAHSTHVTNVRWTYDDSMLVTLGGTDMSLMVWTNEMEGYREKRPCDSEESDIDSEEDGGYDSDVTRENEISYTIRALSTNIRPMLGIKPHLQQKEPSIDERPPVSRAPPQPEKLQTNNVGKKKRPIEDLVLELIFGYRGRDCRNNVHYLNDGDDIIYHTASVGILHNVATGSQSFYQEHNDDILCLTVNQHPKFINIVATGQVGDSADMSATAPSIHIWDAMNKQTLSILRCYHSKGVCSVSFSATGKLLLSVGLDPEHTITIWRWQEGAKIASRAGHNQRIFVAEFRPDSDTQFVSVGVKHVKFWTLAGRALLSKKGLLSTLEDARMQTMLAIAFGANNLTFTGTISGDVCVWKDHILCRIVARAHNGPVFAMYTTLRDGLIVTGGKERPSKEGGAVKLWDQELRRCRAFRLETGQATDCVRSVCRGKGKILVGTRNAEIIEVGEKNAACNILVNGHVDGPIWGLATHPSRDFFLSAAEDGTVRLWDIADKKMLNKVNLGHAARTVCYSPEGDMVAIGMKNGEFIILLVSSLKIWGKKRDRRCAIHDIRFSPDSRYLAVGSSENSVDFYDLTLGPTLNRISYCKDIPSFVIQMDFSADSSYLQVSSGCYKRHVYEVPSGKHLMDHAAIDRITWATWTSILGDEVLGIWSRHAEKADVNCACVSHSGISLVTGDDFGMVKLFDFPCPEKFAKHKRFLGHSPHVTNIRFTSGDRHVVSAGGDDCSLFVWKCVHTPH

SEQ ID NO: 293272 - DNA, 5796 bp, Artificial Sequence
  derived and/or modified sequence
atggccgccagaagcgcccccagctgccacctgagactggagtgggtgtacggctacagaggccaccagtgcagaaacaacctgtactacaccgccgccaaggagatcgtgtacttcgtggccggcgtgggcgtggtgtacagccccagagagcacagacagaagttctacagaggccacagcgacgacatcatcagcctggccctgcaccccgagagagtgctggtggccaccggccaggtgggcaaggagccctacatctgcatctgggacagctacaccgtgcagaccatcagcgtgctgaaggacgtgcacacccacggcatcgcctgcctggccttcgacctggacggccagagactggtgagcgtgggcctggacagcaagaacgccgtgtgcgtgtgggactggaagagaggcaagatgctgagcatggcccccggccacaccgacagaatcttcgacatcagctgggacctgtaccagcccaacaagctggtgagctgcggcgtgaagcacatcaagttctggagcctgtgcggcaacgccctgacccccaagagaggcgtgttcggcaagaccggcgacctgcagaccatcctgtgcctggcctgcgccagagacgagctgacctacagcggcgccctgaacggcgacatctacgtgtggaagggcatcaacctgatcagaaccatccagggcgcccacgccgccggcatcttcagcatgaacgcctgcgaggagggcttcgccaccggcggcagagacggctgcatcagactgtgggacctgaccttcaagcccatcaccgtgatcgacctgagagagaccgaccagggctacaagggcctgagcgtgagaagcgtgtgctggagaggcgaccacatcctggtgggcacccaggacagcgagatcttcgagatcgtggtgcaggagagaaacaagcccttcctgatcatgcagggccactgcgagggcgagctgtgggccctggccgtgcaccccaccaagcccctggccgtgaccggcagcgacgacagaagcgtgagaatctggagcctggtggaccacgccctgatcgccagatgcaacatggaggagcccatcagatgcgccgccgtgaacgccgacggcatccacctggccctgggcatgaaggacggcagcttcaccgtgctgagagtgagagacatgaccgaggtggtgcacatcaaggacagaaaggaggccatccacgagctgaagtacagccccgacggcacctacctggccgtgggctgcaacgacagcagcgtggacatctacggcgtggcccagagatacaagaaggtgggcgagtgcctgggcagcctgagcttcatcacccacctggactggagcagcgacagcagatacctgcagaccaacgacggcaacggcaagagactgttctacagaatgcccggcggcaaggaggtgaccagcaccgaggagatcaagggcgtgcactgggccagctggacctgcgtgagcggcctggaggtgaacggcatctggcccaagtacagcgacatcaacgacatcaacagcgtggacggcaactacatcggccaggtgctggtgaccgccgacgactacggcatcatcaagctgttcagatacccctgcctgagaaagggcgccaagttcagaaagtacatcggccacagcgcccacgtgaccaacgtgagatggagccacgactaccagtgggtgatcagcatcggcggcgccgaccacagcgtgttccagtggaagttcatccccgagagaaagctgaaggacgccgtgcacatcgccccccaggagagcctggccgacagccacagcgacgagagcgacagcgacctgagcgacgtgcccgagctggacagcgagatcgagcaggagacccagctgacctacagaagacaggtgtacaaggaggacctgccccagctgaaggagcagtgcaaggagaagcagaagagcgccaccagcaagagaagagagagagcccccggcaacagcatcagactgcacttcgtgcacggctacagaggctacgactgcagaagcaacctgttctacacccagatcggcgagatcgtgtaccacgtggccgccgtgggcgtgatctacaacagacagcagaacacccagagattctacctgggccacgacgacgacatcctgtgcctgaccatccaccccctgaaggactacgtggccaccggccaggtgggcagagaccccagcatccacatctgggacaccgagaccatcaagcccctgagcatcctgaagggccaccaccagtacggcgtgagcgccgtggacttcagcgccgacggcaagagactggccagcgtgggcatcgacgacagccacaccgtggtgctgtgggactggaagaagggcgagaagctgagcatcgccagaggcagcaaggacaagatcttcgtggtgaagatgaacccctacgtgcccgacaagctgatcaccgccggcatcaagcacatgaagttctggagaaaggccggcgacgtgtgcatctggagagacatcttcctggtgaagaccgtgaaggcccacgacggccccgtgttcagcatgcacgccctggagaagggcttcgtgaccggcggcaaggacggcatcgtggccctgtgggacgacagcttcgagagatgcctgaagacctacgccatcaagagagccgccctggcccccggcagcaagggcctgctgctggaggacaaccccagcatcagagccatcagcctgggccacggccacatcctggtgggcaccaagaacggcgagatcctggaggtggacaagagcggccccatcaccctgctggtgcagggccacatggagggcgaggtgtggggcctggccacccacccctacctgcccatctgcgccaccgtgagcgacgacaagaccctgagaatctgggacctgagccccagccactgcatgctggccgtgagaaagctgaagaagggcggcagatgctgctgcttcagccccgacggcaaggccctggccgtgggcctgaacgacggcagcttcctgatggccaacgccgacaccctggaggacctggtgagcttccaccacagaaaggacatgatcagcgacatcagattcagccccggcagcggcaagtacctggccgtggccagccacgacagcttcatcgacatctacaacgtgatgagcagcaagagagtgggcatctgcaagggcgccaccagctacatcacccacatcgactgggacatcagaggcaagctgctgcaggtgaacaccggcgccaaggagcagctgttcttcgaggcccccagaggcaagaagcagaccatccccagcgtggaggtggagaagatcgcctgggccagctggaccagcgtgctgggcctgtgctgcgagggcatctggcccgtgatcggcgaggtgaccgacgtgaccgccagctgcctgaccagcgacaagatggtgctggccaccggcgacgacctgggcttcgtgaagctgttcagataccccaccaagggcaagttcggcaagttcaagagatacgtggcccacagcacccacgtgaccaacgtgagatggacctacgacgacagcatgctggtgaccctgggcggcaccgacatgagcctgatggtgtggaccaacgagatggagggctacagagagaagagaccctgcgacagcgaggagagcgacatcgacagcgaggaggacggcggctacgacagcgacgtgaccagagagaacgagatcagctacaccatcagagccctgagcaccaacatcagacccatgctgggcatcaagccccacctgcagcagaaggagcccagcatcgacgagagaccccccgtgagcagagcccccccccagcccgagaagctgcagaccaacaacgtgggcaagaagaagagacccatcgaggacctggtgctggagctgatcttcggctacagaggcagagactgcagaaacaacgtgcactacctgaacgacggcgacgacatcatctaccacaccgccagcgtgggcatcctgcacaacgtggccaccggcagccagagcttctaccaggagcacaacgacgacatcctgtgcctgaccgtgaaccagcaccccaagttcatcaacatcgtggccaccggccaggtggtgctgagctgcagcctgctgaccaccgcccccagcatccacatctgggacgccatgaacaagcagaccctgagcatcctgagatgctaccacagcaagggcgtgtgcagcgtgagcttcagcgccaccggcaagctgctgctgagcgtgggcctggaccccgagcacaccatcaccatctggagatggcaggagggcgccaagatcgccagcagagccggccacaaccagagaatcttcgtggccgagttcagacccgacagcgacacccagttcgtgagcgtgggcgtgaagcacgtgaagttctggaccctggccggcagagccctgctgagcaagaagggcctgctgagcaccctggaggacgccagaatgcagaccatgctggccatcgccttcggcgccaacaacctgaccttcaccggcaccatcagcggcgacgtgtgcgtgtggaaggaccacatcctgtgcagaatcgtggccagagcccacaacggccccgtgttcgccatgtacaccaccctgagagacggcctgatcgtgaccggcggcaaggagagacccagcaaggagggcggcgccgtgaagctgtgggaccaggagctgagaagatgcagagccttcagactggagaccggccaggccaccgactgcgtgagaagcgtgtgcagaggcaagggcaagatcctggtgggcaccagaaacgccgagatcatcgaggtgggcgagaagaacgccgcctgcaacatcctggtgaacggccacgtggacggccccatctggggcctggccacccaccccagcagagacttcttcctgagcgccgccgaggacggcaccgtgagactgtgggacatcgccgacaagaagatgctgaacaaggtgaacctgggccacgccgccagaaccgtgtgctacagccccgagggcgacatggtggccatcggcatgaagaacggcgagttcatcatcctgctggtgagcagcctgaagatctggggcaagaagagagacagaagatgcgccatccacgacatcagattcagccccgacagcagatacctggccgtgggcagcagcgagaacagcgtggacttctacgacctgaccctgggccccaccctgaacagaatcagctactgcaaggacatccccagcttcgtgatccagatggacttcagcgccgacagcagctacctgcaggtgagcagcggctgctacaagagacacgtgtacgaggtgcccagcggcaagcacctgatggaccacgccgccatcgacagaatcacctgggccacctggaccagcatcctgggcgacgaggtgctgggcatctggagcagacacgccgagaaggccgacgtgaactgcgcctgcgtgagccacagcggcatcagcctggtgaccggcgacgacttcggcatggtgaagctgttcgacttcccctgccccgagaagttcgccaagcacaagagattcctgggccacagcccccacgtgaccaacatcagattcaccagcggcgacagacacgtggtgagcgccggcggcgacgactgcagcctgttcgtgtggaagtgcgtgcacaccccccactag

SEQ ID NO: 293273 - DNA, 5910 bp, Artificial Sequence
  derived and/or modified sequence
atggccgccagaagcgcccccagctgccacctgagactggagtgggtgtacggctacagaggccaccagtgcagaaacaacctgtactacaccgccgccaaggagatcgtgtacttcgtggccggcgtgggcgtggtgtacagccccagagagcacagacagaagttctacagaggccacagcgacgacatcatcagcctggccctgcaccccgagagagtgctggtggccaccggccaggtgggcaaggagccctacatctgcatctgggacagctacaccgtgcagaccatcagcgtgctgaaggacgtgcacacccacggcatcgcctgcctggccttcgacctggacggccagagactggtgagcgtgggcctggacagcaagaacgccgtgtgcgtgtgggactggaagagaggcaagatgctgagcatggcccccggccacaccgacagaatcttcgacatcagctgggacctgtaccagcccaacaagctggtgagctgcggcgtgaagcacatcaagttctggagcctgtgcggcaacgccctgacccccaagagaggcgtgttcggcaagaccggcgacctgcagaccatcctgtgcctggcctgcgccagagacgagctgacctacagcggcgccctgaacggcgacatctacgtgtggaagggcatcaacctgatcagaaccatccagggcgcccacgccgccggcatcttcagcatgaacgcctgcgaggagggcttcgccaccggcggcagagacggctgcatcagactgtgggacctgaccttcaagcccatcaccgtgatcgacctgagagagaccgaccagggctacaagggcctgagcgtgagaagcgtgtgctggagaggcgaccacatcctggtgggcacccaggacagcgagatcttcgagatcgtggtgcaggagagaaacaagcccttcctgatcatgcagggccactgcgagggcgagctgtgggccctggccgtgcaccccaccaagcccctggccgtgaccggcagcgacgacagaagcgtgagaatctggagcctggtggaccacgccctgatcgccagatgcaacatggaggagcccatcagatgcgccgccgtgaacgccgacggcatccacctggccctgggcatgaaggacggcagcttcaccgtgctgagagtgagagacatgaccgaggtggtgcacatcaaggacagaaaggaggccatccacgagctgaagtacagccccgacggcacctacctggccgtgggctgcaacgacagcagcgtggacatctacggcgtggcccagagatacaagaaggtgggcgagtgcctgggcagcctgagcttcatcacccacctggactggagcagcgacagcagatacctgcagaccaacgacggcaacggcaagagactgttctacagaatgcccggcggcaaggaggtgaccagcaccgaggagatcaagggcgtgcactgggccagctggacctgcgtgagcggcctggaggtgaacggcatctggcccaagtacagcgacatcaacgacatcaacagcgtggacggcaactacatcggccaggtgctggtgaccgccgacgactacggcatcatcaagctgttcagatacccctgcctgagaaagggcgccaagttcagaaagtacatcggccacagcgcccacgtgaccaacgtgagatggagccacgactaccagtgggtgatcagcatcggcggcgccgaccacagcgtgttccagtggaagttcatccccgagagaaagctgaaggacgccgtgcacatcgccccccaggagagcctggccgacagccacagcgacgagagcgacagcgacctgagcgacgtgcccgagctggacagcgagatcgagcaggagacccagctgacctacagaagacaggtgtacaaggaggacctgccccagctgaaggagcagtgcaaggagaagcagaagagcgccaccagcaagagaagagagagagcccccggcaacagcatcagactgcacttcgtgcacggctacagaggctacgactgcagaagcaacctgttctacacccagatcggcgagatcgtgtaccacgtggccgccgtgggcgtgatctacaacagacagcagaacacccagagattctacctgggccacgacgacgacatcctgtgcctgaccatccaccccctgaaggactacgtggccaccggccaggtgggcagagaccccagcatccacatctgggacaccgagaccatcaagcccctgagcatcctgaagggccaccaccagtacggcgtgagcgccgtggacttcagcgccgacggcaagagactggccagcgtgggcatcgacgacagccacaccgtggtgctgtgggactggaagaagggcgagaagctgagcatcgccagaggcagcaaggacaagatcttcgtggtgaagatgaacccctacgtgcccgacaagctgatcaccgccggcatcaagcacatgaagttctggagaaaggccggcggcggcctgatcggcagaaagggctacatcggcaccctgggcaagaacgacaccatgatgtgcgccgtgtacggctggaccgaggagatggccttcagcggcaccagcaccggcgacgtgtgcatctggagagacatcttcctggtgaagaccgtgaaggcccacgacggccccgtgttcagcatgcacgccctggagaagggcttcgtgaccggcggcaaggacggcatcgtggccctgtgggacgacagcttcgagagatgcctgaagacctacgccatcaagagagccgccctggcccccggcagcaagggcctgctgctggaggacaaccccagcatcagagccatcagcctgggccacggccacatcctggtgggcaccaagaacggcgagatcctggaggtggacaagagcggccccatcaccctgctggtgcagggccacatggagggcgaggtgtggggcctggccacccacccctacctgcccatctgcgccaccgtgagcgacgacaagaccctgagaatctgggacctgagccccagccactgcatgctggccgtgagaaagctgaagaagggcggcagatgctgctgcttcagccccgacggcaaggccctggccgtgggcctgaacgacggcagcttcctgatggccaacgccgacaccctggaggacctggtgagcttccaccacagaaaggacatgatcagcgacatcagattcagccccggcagcggcaagtacctggccgtggccagccacgacagcttcatcgacatctacaacgtgatgagcagcaagagagtgggcatctgcaagggcgccaccagctacatcacccacatcgactgggacatcagaggcaagctgctgcaggtgaacaccggcgccaaggagcagctgttcttcgaggcccccagaggcaagaagcagaccatccccagcgtggaggtggagaagatcgcctgggccagctggaccagcgtgctgggcctgtgctgcgagggcatctggcccgtgatcggcgaggtgaccgacgtgaccgccagctgcctgaccagcgacaagatggtgctggccaccggcgacgacctgggcttcgtgaagctgttcagataccccaccaagggcaagttcggcaagttcaagagatacgtggcccacagcacccacgtgaccaacgtgagatggacctacgacgacagcatgctggtgaccctgggcggcaccgacatgagcctgatggtgtggaccaacgagatggagggctacagagagaagagaccctgcgacagcgaggagagcgacatcgacagcgaggaggacggcggctacgacagcgacgtgaccagagagaacgagatcagctacaccatcagagccctgagcaccaacatcagacccatgctgggcatcaagccccacctgcagcagaaggagcccagcatcgacgagagaccccccgtgagcagagcccccccccagcccgagaagctgcagaccaacaacgtgggcaagaagaagagacccatcgaggacctggtgctggagctgatcttcggctacagaggcagagactgcagaaacaacgtgcactacctgaacgacggcgacgacatcatctaccacaccgccagcgtgggcatcctgcacaacgtggccaccggcagccagagcttctaccaggagcacaacgacgacatcctgtgcctgaccgtgaaccagcaccccaagttcatcaacatcgtggccaccggccaggtgggcgacagcgccgacatgagcgccaccgcccccagcatccacatctgggacgccatgaacaagcagaccctgagcatcctgagatgctaccacagcaagggcgtgtgcagcgtgagcttcagcgccaccggcaagctgctgctgagcgtgggcctggaccccgagcacaccatcaccatctggagatggcaggagggcgccaagatcgccagcagagccggccacaaccagagaatcttcgtggccgagttcagacccgacagcgacacccagttcgtgagcgtgggcgtgaagcacgtgaagttctggaccctggccggcagagccctgctgagcaagaagggcctgctgagcaccctggaggacgccagaatgcagaccatgctggccatcgccttcggcgccaacaacctgaccttcaccggcaccatcagcggcgacgtgtgcgtgtggaaggaccacatcctgtgcagaatcgtggccagagcccacaacggccccgtgttcgccatgtacaccaccctgagagacggcctgatcgtgaccggcggcaaggagagacccagcaaggagggcggcgccgtgaagctgtgggaccaggagctgagaagatgcagagccttcagactggagaccggccaggccaccgactgcgtgagaagcgtgtgcagaggcaagggcaagatcctggtgggcaccagaaacgccgagatcatcgaggtgggcgagaagaacgccgcctgcaacatcctggtgaacggccacgtggacggccccatctggggcctggccacccaccccagcagagacttcttcctgagcgccgccgaggacggcaccgtgagactgtgggacatcgccgacaagaagatgctgaacaaggtgaacctgggccacgccgccagaaccgtgtgctacagccccgagggcgacatggtggccatcggcatgaagaacggcgagttcatcatcctgctggtgagcagcctgaagatctggggcaagaagagagacagaagatgcgccatccacgacatcagattcagccccgacagcagatacctggccgtgggcagcagcgagaacagcgtggacttctacgacctgaccctgggccccaccctgaacagaatcagctactgcaaggacatccccagcttcgtgatccagatggacttcagcgccgacagcagctacctgcaggtgagcagcggctgctacaagagacacgtgtacgaggtgcccagcggcaagcacctgatggaccacgccgccatcgacagaatcacctgggccacctggaccagcatcctgggcgacgaggtgctgggcatctggagcagacacgccgagaaggccgacgtgaactgcgcctgcgtgagccacagcggcatcagcctggtgaccggcgacgacttcggcatggtgaagctgttcgacttcccctgccccgagaagttcgccaagcacaagagattcctgggccacagcccccacgtgaccaacatcagattcaccagcggcgacagacacgtggtgagcgccggcggcgacgactgcagcctgttcgtgtggaagtgcgtgcacaccccccactag

SEQ ID NO: 293274 - DNA, 7033 bp, Artificial Sequence
  derived and/or modified sequence
ctgggcatccacttgacagccggcggcgctcgcggccctcagcatgttccgcgaggcgagggttttcctcccgcctgtgggctgaggcggcggcggcccccgaaacgagatgcacctgacgggcgcggcttagaggacgcggctggcgggaagtcccggcagccagcgggagggctttcgttgccgggccgccgccgcctcccgtcgccgccgcgggcccgagcgggagcggcgggtgggcgccccgacatggcggcccggagcgccccgagctgccacctgcggctcgagtgggtgtacggctaccggggccaccagtgccgcaacaacctctactacactgcggccaaggagatcgtatacttcgtggcgggggtcggcgtggtgtacagcccgcgggagcacaggcagaagttctaccggggccacagcgacgacatcatcagccttgcattgcatcctgaacgagtgttggtagcaacaggacaagttgggaaagagccttatatttgtatttgggattcatacactgtgcagaccatatcagttttaaaggatgttcatacacatggtatagcttgcttggcgtttgacttagatggacagcgcttggtttcagttggacttgattcaaagaatgcagtttgtgtttgggactggaaaaggggaaaaatgttgtctatggctcctggtcatacagatagaatatttgatatttcttgggatttgtaccagccaaataaacttgtcagctgtggtgtaaaacatatcaagttctggagtttatgtggaaatgctctgaccccaaaacgaggtgtctttggtaagacgggtgaccttcagacaatactgtgcctagcctgtgcaagggatgaattaacatattctggtgcactcaatggggatatatatgtttggaaaggaatcaatcttatacgaacaatacaaggagcccatgctgcaggaatttttagcatgaatgcttgtgaagaaggctttgctactggtggcagagatggttgtattcgtctttgggatttaacttttaaaccaattactgtgattgatctcagggaaacagaccagggatacaaaggtttgtctgtaaggagtgtgtgttggcgaggtgaccacattctagttggaacacaggacagtgaaatttttgaaattgtggtgcaagaaagaaataaaccttttctaattatgcaagggcattgtgaaggtgaactttgggcacttgctgtccatcctactaaacctttggctgtgactggaagtgatgatcgttcggtcaggatatggagcctagtagatcatgcattaatagcaaggtgtaatatggaagaaccaattcgttgtgcagctgtcaatgcagatggaatccatcttgcccttggaatgaaggatggctcattcactgtacttagagtaagagatatgacggaagttgtacatattaaagataggaaggaggcaattcatgagttaaaatattcaccagatggaacttaccttgctgttggatgcaatgacagctcggttgatatttatggagttgctcagcgttataaaaaagttggcgagtgtttgggatcccttagtttcatcactcatctggactggtcttcagacagtagatatttgcagacaaatgatggaaatgggaaaagacttttttatagaatgccaggaggaaaggaagtgacaagtacagaagaaataaaaggtgttcattgggcttcatggacatgtgtttcaggccttgaagtaaatggaatttggcccaagtattcagatatcaacgatataaattcagtagatggaaattatattggccaagttttagttacagctgatgactatggaattataaaattattccgatatccatgtttaagaaaaggggccaagtttagaaaatatattggccattcagctcacgtaactaatgtcagatggtcacatgattatcagtgggttatttctattggtggagcagatcactctgtctttcagtggaaatttattcctgaaagaaaactgaaagatgctgttcacatagcaccccaagaaagtctggctgactctcatagtgatgaatcagattcagatctgtctgatgttccagaactggattctgaaattgaacaagagacacagctcacctaccgtcgacaggtttacaaagaagatctacctcagcttaaagaacagtgcaaagagaaacaaaaaagtgctacttctaaaagaagagagcgggctccaggaaatagtattcgattacactttgttcacggttacagaggttatgactgtcgaagtaatctgttttatactcaaattggtgaaattgtgtaccatgtggcagcagtgggtgtcatttataatcgacagcaaaacacacagcgtttttatctgggtcatgatgatgatattctctgcctaactattcatcctttgaaagactacgtggcaacaggccaggttggtagagatccctcaattcatatatgggatacagagaccattaaaccattgtccatattaaagggccaccaccagtatggtgttagtgccgttgatttctcagcggatgggaaacgtttggcatcagttggcatagatgatagccatactgttgtgctctgggactggaagaaaggagagaaactttcaatagcaagaggaagtaaagataagatttttgttgtaaagatgaacccctatgtgcctgataaactaattacagctggaattaaacacatgaaattttggcgtaaagcaggagatgtgtgtatctggagagacatctttcttgtaaaaacagtgaaagcgcatgatgggccagtgttcagtatgcatgcattggaaaaagggtttgtaactggaggaaaagatggtatagtagctctttgggatgactcttttgaaagatgtctcaagacctatgctataaaaagagctgcattggccccaggatctaaaggtcttctcttggaagataatccatctatacgtgccatatcattaggacatggtcatattttagttggcacaaagaatggtgaaatactagaagtggataaaagtggcccaataacacttctggttcagggacacatggaaggagaggtgtggggtttagctacacacccttatctgcccatctgtgctactgtaagcgatgataaaaccttaagaatatgggatctctcacctagtcattgtatgttggctgtccggaagctgaaaaagggtgggaggtgttgctgtttttctcctgatggtaaagctttagccgtaggtctcaacgatggaagcttcttaatggcaaatgcggatactctagaggatcttgtgtcttttcatcacagaaaagatatgatttcagatattcgattttcacctggttctgggaaatatcttgctgtagcatcccatgacagctttatagatatatacaatgtaatgagtagtaaacgagtaggaatatgcaaaggagctaccagttacataacccatattgattgggatattagaggaaagcttttacaggtcaacactggtgctaaggaacaattattctttgaagctcccagagggaaaaaacaaaccatccccagcgtggaggtagaaaaaattgcttgggcatcatggacaagtgtacttggtttatgctgtgaaggaatttggccagtaattggagaagttacagatgtaactgcttcttgcctcaccagtgacaaaatggttctagctaccggggacgatttgggatttgtgaagttatttagatatcctactaaagggaaatttggaaagtttaagaggtatgtggcccatagtacacatgtcacaaatgttcgctggacttatgatgacagcatgttggttaccctaggcggtacagatatgtctttaatggtgtggacaaatgagatggaaggctatcgagaaaaaaggccttgtgatagtgaagaatccgacattgattctgaagaagatgggggctatgacagtgatgttacaagggagaatgaaatcagttacaccatcagagccttatcaacaaatattcgcccaatgttaggaatcaagcctcatttacaacaaaaagaaccctcaattgatgaaaggcctccagtgagcagggccccaccacagccagagaaactccagacaaacaatgtaggcaagaaaaagagacctatagaggaccttgtgttggagctcatttttggttatcgaggcagagactgtaggaataatgttcactatttaaatgatggtgatgatataatttatcacactgcatctgttggaattctgcacaatgttgctacaggttctcagagtttttatcaggaacataatgatgatattctgtgcctcacagtaaaccagcaccccaaatttatcaacatagtggcaactggccaagtagttttgagctgttctttgttaactacagctccttctattcacatctgggatgcaatgaacaagcagactttatctatcctaagatgctaccattcaaagggagtatgttcagtcagcttcagtgctactggcaaactattgctgtctgtgggactagacccagaacatactattaccatttggagatggcaggaaggtgccaaaattgccagcagagctggtcacaatcaacgtatttttgtggcagaattccgaccagattcagatacccagtttgtctcagtgggagtaaaacatgtgaagttctggaccctggcaggaagagctcttcttagcaaaaaagggctactgagcacactggaagatgcccggatgcagaccatgctcgctattgcatttggtgcaaataacttgacgtttacaggtaccatcagtggtgatgtctgtgtgtggaaagatcacatattgtgtagaatcgtggcgagagctcacaacgggcctgtgtttgccatgtacaccaccctgcgagatggacttatcgtgactgggggaaaggaaaggccgtcaaaagaaggaggagcggttaaactgtgggatcaggaactgaggcggtgccgtgccttcaggcttgagacaggacaagccacagattgtgttcgttctgtgtgcagaggcaaaggcaagatccttgttgggacaaggaatgctgaaataatcgaagttggagagaaaaatgcagcttgtaatattttagttaacggtcatgtggatgggccaatctggggactagcaacacatccttccagggattttttcctttctgctgcagaagatgggacagtgagactttgggatattgctgataaaaagatgttaaacaaagtgaatttgggacatgctgctcgtactgtgtgttacagccctgaaggggacatggtggctattggaatgaaaaatggagaatttatcattttactagtgagttctctaaaaatatggggaaagaagagagacaggagatgtgcaatccatgatatcagatttagtccggattcccggtatctggcagtaggttctagtgagaactcagtggatttttatgacctaacgctgggccccactcttaacagaatcagctactgcaaagacattccaagctttgtcattcaaatggacttctctgcagatagcagttatctccaggtctctagtggctgctataaacggcatgtctatgaagtgccttcaggaaaacatcttatggatcatgccgctattgacagaattacttgggctacatggactagtattctaggagatgaggttttgggaatctggtccagacatgctgagaaagctgatgtcaactgtgcctgtgtatctcattcaggaatcagtcttgttacaggagatgactttggcatggttaagttatttgacttcccatgtccagaaaaatttgcaaaacacaaaaggttcttgggtcattcgccccatgtgacaaatattcgatttaccagtggtgatcgacatgttgttagtgctggaggtgatgactgcagcttatttgtctggaaatgtgtacatacacctcactgagagatgctgagatgactacagaaattaactttgagaccagaattacagagaagaaaaaccaaaacccaaccctgcatggtcaagtggtgctaacccaagactgtaacagggagaaatgcccagaatcatcaaaatagtgaaagactgatctgttcaaaatatttgctatatgcactgggtataatccgtaatccatacactgccagataatgccatttcaaggaaggatcgaatacttgatggtaaaggccaagtccccctgtattgggaagtgtgtgatttcggcagacctgctgggaaaatttagggtagagcactctttacagaagaactcaaaaacccaatttggataattttcattatctttttagcaaaatggtttcttaatgtttatattttattttcaaggttcattgtttaatgaaatattttattcttgcatttccataaggaaagggaaagtcatgatcatcctaaaggatcacagtttttaaaaggcaaacattttccctaaggaaacagacacaagctttcctagagaatatgatgttttttaggcattaataaggtccttttttataaaggacacttttctcctagtagttttgaattcaggaacagatccaaagttagcagtatatggctgctacatttccattttcattttcgagccatcagtttatgttcagatgccatctctgtaatcgcacatttaaaacataactgtagcctcactaatggaaaagtagtatgatgaacaatcattcccaatggtgtacaatgtaagggttttagggagcaacagtatttaactggaagaaagaattgcatatttaatgtagtctaatatatacacatttgtttaacatgtaaacaaaagtgttaaattcacatatacaacattatacaatttaatcactcttggaataaaatttttatagccttttttctattgggaaaatttgtttagatgtgtgccactccatag

SEQ ID NO: 293275 - DNA, 5796 bp, Artificial Sequence
  derived and/or modified sequence
atggccgcgcgatcagccccgagctgtcacctgcgtctggagtgggtctacggataccgcggccaccaatgccggaacaatttgtactataccgcagccaaagagatagtgtatttcgtcgccggcgtcggcgttgtctattctccccgagagcaccgtcaaaagttctacagaggccactctgatgacattataagcctggcattacatccggagcgagtgcttgtagccaccggccaggtgggcaaggagccatacatctgcatctgggactcttacaccgtccagactatttcagtattgaaggacgtgcacacacacgggatcgcttgcctcgccttcgacctcgacgggcagcgcttggttagtgtcggcctggattctaaaaatgctgtgtgcgtgtgggattggaagcgcggcaaaatgctatcaatggctcccggtcataccgataggattttcgatattagttgggatctttaccagcccaacaagcttgtcagttgcggggtcaaacatattaaattctggagcttgtgtgggaacgccctgacacccaagagaggggtgttcggaaagaccggagatctccagacaattctgtgcctggcatgcgccagggacgagctcacctactccggggccttgaacggggatatttacgtttggaaagggattaacctgatccggacaatccagggtgcgcacgcagctggtattttcagcatgaacgcatgtgaggagggcttcgccaccgggggacgagacgggtgtattagactctgggatctgacatttaagcccataacagtcatcgatctccgggaaaccgatcaaggatacaagggcctgtccgtgcgctccgtttgctggcgaggcgaccacatcctggtgggaacccaggactccgagatcttcgagatcgtcgtgcaggagcgcaataagcccttcttaatcatgcagggtcattgtgagggggagctatgggcactggccgtgcaccccacaaaacctctggctgttacaggttcggacgaccgatccgtaagaatctggagccttgtggaccatgccctcattgcaaggtgcaacatggaggagccaatccggtgcgctgcagtgaacgccgatgggatccatttagctctgggaatgaaggacgggagttttacagtcctacgggtacgagacatgacagaagttgtacacataaaagaccgcaaagaagcaattcacgaattgaaatatagtcccgatggaacttacttggctgttggctgtaacgactcaagcgtggacatttacggggtcgctcaacgatacaagaaagtcggagagtgcctgggttctctgagcttcatcacacatctcgattggtccagcgatagcagatacctacagaccaacgacggcaatggtaagcggcttttctacaggatgcccggtggaaaagaggttacatccaccgaggaaattaagggagtccactgggccagttggacttgcgtgtctggtttagaggtaaacggtatctggcctaaatacagcgacatcaacgatattaattcggtggatgggaattacatcggccaggtgctggtaacggctgacgattatgggatcatcaagctcttcagatatccgtgtttgaggaagggggccaagttccgcaagtacatcgggcactcggctcacgttacaaacgtacgttggtctcacgactaccaatgggtgatatcaatagggggcgcagatcacagtgtttttcagtggaagttcatcccagaacggaagctaaaggatgctgtgcatattgcaccacaggaaagcctggccgatagccacagcgacgaatctgacagcgacttatccgatgtcccagaactggattctgaaatcgaacaggagacgcagctgacttatagacgccaagtctacaaggaagacttgcctcagttgaaagagcagtgtaaagagaaacaaaagagtgctactagcaagcgcagagagcgggcgcctgggaactctatccgcctccacttcgtgcatggctatcgggggtatgattgccgctctaacctgttttatacccaaatcggcgagatcgtttaccatgtggctgccgtcggagttatatataaccgtcaacagaacacacagcgattttacctgggtcacgacgacgacatcctctgtttgacaattcacccattgaaagattacgttgccaccggacaggtggggagggatccatcgattcacatctgggatacggagaccattaaacctctcagtatcctcaagggccatcaccagtacggggtgagcgcagtcgatttcagcgcagacggtaagagactggcaagtgtgggcattgatgattctcacacggtcgtcctgtgggactggaaaaaaggggaaaaactgtctattgccaggggatcaaaggataaaatttttgtggttaagatgaacccctatgtgcctgataagttgataactgctgggatcaagcacatgaaattttggcgcaaggctggggacgtctgcatatggagagacattttcctcgtgaaaactgtgaaagcccatgatgggcccgtgttctcaatgcacgctctggaaaaagggtttgtgacaggaggcaaggatgggatagttgccctttgggatgacagcttcgagcgatgtttgaagacctacgctattaaaagagctgcgctggcccccggctcaaagggcctcctcctcgaagataacccatctatccgcgccatatctctgggccacgggcacatcctcgtgggtacaaaaaacggtgagatcctggaggttgataagtctgggcctattactttgttagtccagggacatatggagggagaagtgtggggcctcgcgacccacccctatttacctatctgtgcaacagtctccgacgacaaaacgctccgcatttgggacttgtccccatctcattgtatgctcgcggtgagaaagctcaagaagggcggcagatgttgttgtttcagtcctgatgggaaggcattagcagtgggcctgaatgacggatccttcctcatggctaatgctgacacactagaagacctagtgagtttccaccatagaaaggacatgatctctgatatccgcttctcacccggtagtggtaaatacctcgccgtggcgtctcatgactcatttattgacatttataatgtgatgagctctaaacgggtagggatctgcaagggggctacttcctatattacccacattgattgggacattcgaggcaaactcctgcaggtgaataccggtgccaaagagcagttgttctttgaggcaccccggggcaaaaaacagaccattccgtcagtcgaagtcgagaagattgcctgggcttcttggacatctgtcctcggcctatgctgcgagggcatttggcctgttattggggaggtgaccgatgtgaccgcctcttgcctaacatccgacaaaatggtactggccaccggcgacgacctcggcttcgtgaaactgtttaggtacccaaccaaaggaaagttcggaaagttcaagcgctacgtggcgcacagcacgcacgtgaccaatgtgaggtggacctatgacgattccatgctggtaaccctgggaggcacagatatgtcactcatggtttggactaacgagatggagggataccgcgagaaaaggccatgtgactccgaggagagtgatatcgattctgaagaagatgggggttacgatagcgacgtgactcgtgaaaatgagatcagctacacaataagagccctcagtacaaacattaggccgatgttgggcattaaaccacacctgcagcagaaagagcccagcatcgatgagagaccccctgtaagccgcgcgcctcctcagccggagaaattacaaacaaacaacgtcggcaagaagaaacgaccgatcgaggacctcgtccttgagctgatattcggctaccgaggccgtgattgcaggaacaacgtgcattatttgaatgacggggacgatatcatttaccatacagcatctgtcggaatcttgcataacgtggcgactgggtcccagagcttctaccaggaacacaatgatgatatcctatgcctcacggtgaaccagcacccaaagtttatcaacatcgtggcaaccggccaggtggtactgagctgcagcctgctgacaacagctccgtccatacacatctgggacgctatgaacaagcagaccttaagcatattgcgctgttaccactccaaaggagtgtgttccgtgtccttcagtgcaacaggcaagctgttgctgagtgtcggtcttgatccagagcatactattacaatctggaggtggcaagaaggggcaaaaatcgcttccagggctggtcacaaccagcgtatattcgtggcggaattccggcccgactcagacacgcagtttgtgtccgtcggagtgaaacatgtgaagttttggacgctcgctggcagggccctcctgtctaaaaaagggttgctgtccacactggaagatgctcgtatgcaaacaatgcttgccatcgcgtttggggccaacaacttaactttcactggaacaatttcaggcgacgtgtgcgtgtggaaggatcacattctctgcagaattgtagcacgcgctcacaacggacctgtcttcgccatgtacaccacccttcgggacggtttgatcgttactggtggcaaggagcgacccagtaaggagggaggtgccgtgaagctatgggatcaagagcttagacgttgccgggctttcaggctcgaaacaggccaggcgacggattgcgttagatctgtgtgtcgggggaaggggaagatactggttggcacaaggaacgccgagattatagaagtcggagagaagaacgcggcgtgcaatatccttgtcaacggtcatgttgacggaccaatatggggtctggccactcatccatccagagacttcttcctgtcagctgctgaggatggtacagtgcggttatgggacatcgcagacaaaaaaatgctaaataaggtgaatctgggacacgcggcccgcaccgtttgctattcgcccgaaggcgacatggtggctattggtatgaagaacggtgaattcattattctgctggtctcaagcctgaaaatctggggaaaaaaaagagatcgcaggtgcgcaattcatgatatccgtttttcccctgatagccgttatctcgccgtgggttcatcagagaatagcgtggacttttacgatctcaccttagggcccaccctgaacagaatcagctattgtaaggatatacccagcttcgtgatacagatggatttcagtgccgattccagttacctgcaggtgtcttccggttgctacaagaggcatgtgtatgaggttccctctggtaaacatctcatggaccacgccgccatcgatcgcatcacctgggctacctggacgagcatcctgggcgatgaggtcctgggcatctggagccggcatgcggaaaaggcagatgtgaactgtgcatgcgttagtcatagtgggatatctctcgtaactggggatgactttggaatggtgaagctgttcgactttccatgcccggaaaaatttgccaaacacaagcggttcctcggccatagtccacatgttactaacatccgctttacatccggggacagacacgttgtaagcgccggaggcgacgattgtagtcttttcgtatggaagtgcgtccatactccccactag

SEQ ID NO: 293276 - DNA, 5910 bp, Artificial Sequence
  derived and/or modified sequence
atggcggcaagaagcgccccaagctgccatctccggctggaatgggtatatggctacaggggccaccagtgccggaataatctgtattacaccgcagcaaaggagatcgtgtattttgtcgctggcgtcggagtggtctattcccccagagagcaccgacagaaattttacagggggcacagcgacgatattatctccctagccctgcatccggagcgggtgcttgtggcgaccggccaagtgggtaaagagccttacatatgcatttgggacagttatacagtgcagaccatttcagtgctaaaagacgttcacacccacgggattgcctgcctagccttcgacctggacggccaacggcttgtgtcggtggggttagattccaagaacgcagtctgcgtctgggattggaagcgtggcaaaatgctgtcgatggcaccagggcacacagacaggatcttcgacataagttgggacttataccagcctaacaaacttgtgtcctgcggcgtcaagcacatcaagttttggagtctatgcggaaatgcattgactcccaaaaggggagtcttcggcaaaactggcgatctacagacaatcctgtgtctcgcatgtgcccgcgatgagttgacctacagcggtgctctgaatggagatatctatgtctggaaggggataaacctcatcaggaccatccaaggagcccatgctgccgggatcttcagtatgaacgcctgtgaggaaggttttgctaccggcggccgcgacggatgcatccggctgtgggatctcacgtttaagccaattacagtaatagacctcagggagaccgatcaggggtataagggcttgtccgtgagaagcgtgtgctggagaggcgatcacatattagtcgggactcaggacagcgagattttcgaaatcgttgtgcaagagcgtaacaagccgttcctcataatgcagggccattgtgaaggagagttatgggccctggctgtgcaccctacaaagcccctagcggtcactggttccgacgaccgcagcgtccgcatttggagcctcgtggaccatgcactgattgctaggtgcaacatggaggagcctattcgatgtgcagcagtgaacgcagatggaattcacttggcgttaggaatgaaggatggcagctttacagtattaagggtgcgagacatgaccgaggtggtgcacattaaggaccgtaaggaggcaatccacgaactgaagtacagtccagacgggacctatttggccgtgggctgtaatgactcatcagtggatatctacggagtggcacagcgctacaagaaagtcggcgagtgcctaggatctctgagctttatcacacaccttgactggagcagcgactctcgctacttgcagacaaacgacgggaacggcaaacggctgttttaccgcatgcctggcggcaaggaagttaccagcacagaagagattaagggggtccactgggcaagctggacttgcgtgtctgggctggaagttaacggaatctggcctaagtattccgatatcaacgacatcaatagtgttgacggaaactatatcggacaagttctggtcacggccgatgattacgggatcattaaactcttccgctatccatgtctaaggaaaggtgccaaattccggaagtacattggtcactccgctcacgtcacaaatgttcgatggtcccacgactaccagtgggtcatctctatcggaggagccgaccactctgtgtttcagtggaaattcattcccgagcgaaaactcaaggatgccgtgcacattgcaccacaggaatccttagctgacagccattctgacgagagcgactctgacttgtccgacgtgcccgagctcgatagtgaaatcgagcaggagactcagcttacctatagaagacaagtgtacaaggaagacctgccccagctgaaggagcaatgcaaagaaaagcagaagagtgctactagtaagcgccgagagcgggccccaggaaattctatccggctacattttgtccacggatatcgagggtacgattgtcgcagcaacttattttacactcagattggcgagattgtgtatcacgttgctgctgtgggggtcatctataaccggcagcagaatactcagagattctacctgggtcacgatgacgacattctctgtcttacaatccatcctttgaaagactacgtggccaccggccaggtcggccgcgatccttcaattcatatttgggatactgaaacaataaagccactaagtatcctgaagggacatcaccagtatggagtgtctgctgtcgacttctccgccgatggaaagcgcctcgcttctgtgggcatcgacgacagccatacggtagttttgtgggattggaaaaaaggagaaaaactaagtatcgcccgcggatctaaagacaaaatatttgtagtgaaaatgaatccctatgtgcccgacaagctgatcaccgcaggaattaagcatatgaaattctggagaaaggcaggaggcgggctgattgggcgaaagggatacattggcactttagggaagaacgatacaatgatgtgtgctgtttacggttggacagaggaaatggctttcagcgggacctctactggcgacgtttgcatctggagggatatttttcttgtgaagactgtcaaagcacacgatggtcctgttttttccatgcatgctctcgagaaggggttcgtcactggtgggaaggatggaatcgttgccctgtgggatgactcctttgaaaggtgcttgaagacctacgcgataaagagggcagcacttgctccggggagcaaagggctgttgctggaggacaatccaagcatcagggcgattagtcttgggcacggccatatcctggtcgggaccaaaaacggagagatcctcgaagtggacaaaagcggccctatcaccctgctggtgcaaggccatatggaaggagaggtctgggggctggcaacgcacccgtatttaccaatatgcgcgaccgtttccgacgacaagaccctgcgcatctgggatctctcaccttcgcattgtatgctggctgtccgcaaactaaagaaaggaggccgctgctgctgcttctcccctgacggcaaagcactggccgtcggccttaatgatgggagcttcctcatggctaatgccgacacgctagaggaccttgtcagttttcaccacaggaaagatatgattagtgatatcaggttctcacccggctccggcaagtaccttgctgtggcctctcacgactcgtttatcgatatttacaacgtaatgagcagtaaaagggtcggcatctgcaaaggggccaccagttacatcacccatattgactgggacatcagggggaaattactgcaggtgaacacgggtgctaaggaacaactcttctttgaagctcctagagggaagaagcagaccatcccaagcgtggaagtggagaagattgcttgggccagctggacatcagtcctcggactctgttgcgagggcatttggcccgtcataggggaagtgaccgatgttacagcaagttgccttacatctgataaaatggtcctcgcaaccggagacgatttaggctttgttaaactgttcagatatccgaccaagggcaaatttgggaagttcaaacggtacgtggctcatagcacgcacgtgacaaacgtgagatggacctacgatgattcgatgctggtaaccctcgggggtacagatatgtccctcatggtctggactaacgagatggagggatatcgggagaaacgtccttgtgactctgaagaaagcgatattgactccgaagaagacggggggtatgactccgatgtaacgagggaaaatgaaatcagttacaccattcgggcattgagcaccaacatcagacccatgctgggcatcaagccacacctccagcaaaaagaaccttccatagacgagcggcccccagttagccgagcccctccgcaacccgagaagttgcaaacgaataacgtcgggaagaagaaacggcctatcgaagatctggttctggaactgattttcggctaccgcggccgcgactgcaggaacaacgtgcattacttgaatgatggagacgatatcatctaccacacggccagtgtgggcattctacataatgttgctacaggttcgcaatccttctatcaagagcacaatgacgatattctctgtctgaccgttaatcaacacccgaaatttatcaacatcgtcgccacaggacaggttggggattccgcagatatgagtgctactgccccgtccatccatatctgggacgccatgaacaagcagacgctttccattctgcggtgctaccacagtaaaggagtctgctctgttagtttctcagccactgggaaactcctgttgtccgttggtttggaccctgagcatacgatcacaatatggagatggcaggagggggcaaaaattgcttcacgcgcaggtcataatcagaggatttttgttgccgaatttagacccgatagtgatacccaatttgtcagcgttggcgtcaagcacgtcaagttttggaccctagccggtcgggccttgctatccaaaaagggtctattatccaccctggaggacgcaagaatgcaaaccatgcttgccatagcttttggcgcaaacaaccttacattcacggggacaattagcggtgatgtgtgtgtctggaaagaccacattttgtgccggattgttgcgcgcgcacataacggcccagttttcgccatgtataccactttgcgggatggtctaatcgtaaccggaggaaaagagcgacccagtaaggaaggcggcgccgtgaaattgtgggaccaagagcttcgccggtgccgagcctttcgcctcgaaactgggcaggctactgattgcgtgcggtccgtgtgccgaggcaaaggaaagatcctggtggggactcgtaatgccgagatcattgaagtgggcgagaagaacgccgcctgcaacatcctggtgaacggccatgtggacggcccaatatggggcctggcaacacatccaagtcgcgatttcttcctcagcgcggccgaggatggtacggtgaggctctgggacattgcagataagaagatgctcaataaagtcaatttaggtcacgcggccaggactgtctgttacagccctgagggtgatatggtcgccattggcatgaaaaacggagaattcatcattctcctagtgtcatccttaaagatttggggcaagaagcgtgacagacggtgcgccatacacgatatacgcttttcgcctgattcccgctacctggcagttggatctagtgaaaactccgtagatttctacgacctgacactcggccctacactgaataggatctcttactgcaaagatattcctagttttgttatccagatggacttttctgctgatagtagctacctacaggtgagctcaggctgctataagagacacgtatatgaagtgcccagtggaaagcatctgatggaccatgctgccattgacaggataacatgggcgacttggacaagtattctcggagacgaagtgcttggaatctggtcacgacacgccgagaaggctgacgttaattgtgcgtgcgtgagccactccggaatctccctcgtcacaggcgacgatttcggcatggtgaaactgtttgatttcccatgcccggaaaagtttgctaagcacaaaagattcctcgggcacagtccccacgtcaccaatatccgattcacaagtggcgatagacatgtcgtgtcagcaggaggcgacgactgcagcctttttgtttggaagtgcgtccataccccccactag

SEQ ID NO: 293277 - DNA, 5796 bp, Artificial Sequence
  derived and/or modified sequence
atggccgcccggagcgcccccagctgccacctgcggctggagtgggtgtatggctaccggggccaccagtgcaggaacaacctgtactacacagctgccaaggagatcgtgtactttgtggccggcgtgggcgtggtgtacagcccccgggagcaccggcagaagttctaccggggccacagtgatgacatcatcagcctggccctgcaccctgagcgggtgctggtggccaccggccaggtgggcaaggagccctacatctgcatctgggacagctacacagtgcagaccatctctgtgctgaaggatgtgcacacccatggaattgcctgcctggcctttgacctggatggccagaggctggtgtctgtgggcctggacagcaagaatgctgtgtgtgtgtgggactggaagaggggcaagatgctgtccatggcccctggccacacagaccgcatctttgacatctcctgggacctgtaccagcccaacaagctggtgtcctgtggggtgaagcacatcaagttctggagcctgtgtggaaatgccctgacccccaagaggggcgtgtttgggaagacaggagacctgcagaccatcctgtgcctggcctgtgccagagatgagctgacctacagcggggccctgaatggagacatctacgtgtggaagggcatcaacctgatccgcaccatccagggcgcccatgctgctggcatcttctccatgaatgcctgtgaggagggctttgccaccggcggcagagatggctgcatccggctgtgggacctgaccttcaagcccatcaccgtcatcgacctgcgggagacagaccagggctacaagggcctgtctgtgcgctctgtgtgctggaggggggaccacatcctggtgggcacccaggacagcgagatctttgagatcgtggtgcaggagaggaacaagcccttcctgatcatgcagggccactgtgagggggagctgtgggccctggccgtgcaccccaccaagcccctggccgtgacaggcagtgatgacagatctgtgcgcatctggagcctggtggaccacgccctgattgcccgctgcaacatggaggagcccatccgctgtgccgctgtgaatgctgatggcatccacctggccctgggcatgaaggatggcagcttcaccgtgctgcgggtgcgggacatgacagaggtggtgcacatcaaggacaggaaggaggccatccacgagctgaagtacagcccagatggcacctacctggccgtgggctgcaatgacagctctgtggacatctatggagtggcccagcgctacaagaaggtgggggagtgcctgggcagcctgtccttcatcacccacctggactggagcagtgacagccgctacctgcagaccaatgatggaaatggcaagaggctcttctacaggatgcctgggggcaaggaggtgaccagcacagaggagatcaagggcgtgcactgggcctcctggacctgtgtgtctggcctggaggtgaatggcatctggcccaagtacagcgacatcaatgacatcaacagcgtggatggcaactacatcggccaggtgctggtgacagcagatgattatggcatcatcaagctgttccgctacccctgcctgaggaagggggccaagttcaggaagtacatcggccacagcgcccacgtgaccaacgtgcgctggagccatgactaccagtgggtgatcagcattggaggagctgaccacagcgtcttccagtggaagttcatccctgagaggaagctgaaggatgctgtgcacatcgccccccaggagagcctggccgacagccacagtgatgaaagtgacagcgacctgagtgatgtgcctgagctggacagcgagattgagcaggagacccagctgacctaccgccggcaggtgtacaaggaggacctgccccagctgaaggagcagtgcaaggagaagcagaagagcgccaccagcaagaggcgggagcgggcccctggcaacagcatccggctgcactttgtgcacggctaccggggctatgactgccgcagcaacctcttctacacccagattggagagatcgtgtaccacgtggccgctgtgggcgtcatctacaaccggcagcagaacacccagcgcttctacctgggccatgatgatgacatcctgtgcctgaccatccaccccctgaaggactatgtggccaccggccaggtgggccgggaccccagcatccacatctgggacacagagaccatcaagcccctgagcatcctgaagggccaccaccagtatggagtgtctgctgtggacttcagcgcagatggcaagaggctggcctctgtgggcattgatgacagccacacagtggtgctgtgggactggaagaagggggagaagctgagcatcgcccggggcagcaaggacaagatctttgtggtgaagatgaacccctacgtgcctgacaagctgatcacagctggcatcaagcacatgaagttctggaggaaggctggagatgtgtgcatctggagggacatcttcctggtgaagacagtgaaggcccatgatggccctgtgttctccatgcacgccctggagaagggctttgtgactggaggcaaggatggcatcgtggccctgtgggatgacagctttgagcgctgcctgaagacctacgccatcaagagagctgccctggcccctggcagcaagggcctgctgctggaggacaaccccagcatccgggccatcagcctgggccacggccacatcctggtgggcaccaagaatggagagatcctggaggtggacaagagcggccccatcaccctgctggtgcagggccacatggagggggaggtgtggggcctggccacccacccctacctgcccatctgtgccaccgtgtctgatgacaagaccctgcgcatctgggacctgagccccagccactgcatgctggccgtgaggaagctgaagaagggcggccgctgctgctgcttctccccagatggcaaggccctggccgtgggcctgaatgatggcagcttcctgatggccaatgctgacaccctggaggacctggtgtccttccaccacaggaaggacatgatcagtgacatccgcttcagccctggcagcggcaagtacctggccgtggccagccatgacagcttcatcgacatctacaacgtgatgagcagcaagagggtgggcatctgcaagggggccaccagctacatcacccacatcgactgggacatccggggcaagctgctgcaggtgaacacaggagccaaggagcagctgttctttgaggccccccggggcaagaagcagaccatccccagcgtggaggtggagaagatcgcctgggcctcctggacctctgtgctgggcctgtgctgtgagggcatctggcctgtgattggagaggtgacagatgtgacagccagctgcctgaccagtgacaagatggtgctggccactggagatgacctgggctttgtgaagctgttccgctaccccaccaagggcaagtttgggaagttcaagcgctacgtggcccacagcacccacgtgaccaacgtgcgctggacctatgatgacagcatgctggtgaccctgggcggcacagacatgagcctgatggtgtggaccaatgagatggagggctaccgggagaagaggccctgtgacagcgaggagagtgacatcgacagcgaggaggatggcggctatgacagtgatgtgaccagagaaaatgagatctcctacaccatccgggccctgagcaccaacatccggcccatgctgggcatcaagccccacctgcagcagaaggagcccagcattgatgagcggccccctgtgtcccgggccccaccccagcctgagaagctgcagaccaacaacgtgggcaagaagaagaggcccatcgaggacctggtgctggagctgatcttcggctaccggggccgggactgcagaaataatgtgcactacctgaatgatggagatgacatcatctaccacacagcctctgtgggcatcctgcacaacgtggccaccggcagccagagcttctaccaggagcacaatgatgacatcctgtgcctgactgtgaaccagcaccccaagttcatcaacatcgtggccaccggccaggtggtgctgagctgcagcctgctgaccacagcccccagcatccacatctgggatgccatgaacaagcagaccctgagcatcctgcgctgctaccacagcaagggcgtgtgcagcgtgtccttcagcgccaccgggaagctgctgctgtctgtgggcctggaccctgagcacaccatcaccatctggcgctggcaggagggcgccaagatcgccagccgggccggccacaaccagaggatctttgtggccgagttccggccagacagcgacacccagtttgtgtctgtgggcgtgaagcacgtgaagttctggaccctggccggccgggccctgctgagcaagaagggcctgctgagcaccctggaggatgccaggatgcagaccatgctggccatcgccttcggggccaacaacctgaccttcaccggcaccatctctggagatgtgtgtgtgtggaaggaccacatcctgtgccgcatcgtggcccgggcccacaacggccctgtgtttgccatgtacaccaccctgagagatggcctgattgtgactggaggcaaggagcggcccagcaaggagggcggcgctgtgaagctgtgggaccaggagctgcggcgctgccgggccttccggctggagaccggccaggccacagactgtgtgcgctctgtgtgccggggcaagggcaagatcctggtgggcaccagaaatgctgagatcatcgaggtgggggagaagaatgctgcctgcaacatcctggtgaatggccacgtggatggccccatctggggcctggccacccaccccagccgggacttcttcctgtctgctgctgaagatggcaccgtgcggctgtgggacattgctgacaagaagatgctgaacaaggtgaacctgggccatgctgccaggacagtgtgctacagccctgagggggacatggtggccatcggcatgaagaatggagagttcatcatcctgctggtgagcagcctgaagatctggggcaagaagagggaccggcgctgtgccatccatgacatccgcttctccccagacagccgctacctggccgtgggcagcagcgagaacagcgtggacttctatgacctgaccctgggccccaccctgaaccgcatctcctactgcaaggacatccccagctttgtgatccagatggacttctctgctgacagcagctacctgcaggtgagcagcggctgctacaagagacatgtgtatgaggtgcccagcggcaagcacctgatggaccatgctgccatcgaccgcatcacctgggccacctggaccagcatcctgggagatgaggtgctgggcatctggagcagacatgctgagaaggcagatgtgaactgtgcctgtgtgagccacagcggcatcagcctggtgactggagatgactttggcatggtgaagctgtttgacttcccctgcccagagaagtttgccaagcacaagcgcttcctgggccacagcccccacgtgaccaacatccgcttcaccagcggggacagacatgtggtgtctgctggaggagatgactgcagcctgtttgtgtggaagtgtgtgcacaccccccactag

SEQ ID NO: 293278 - DNA, 5910 bp, Artificial Sequence
  derived and/or modified sequence
atggccgcccggagcgcccccagctgccacctgcggctggagtgggtgtatggctaccggggccaccagtgcaggaacaacctgtactacacagctgccaaggagatcgtgtactttgtggccggcgtgggcgtggtgtacagcccccgggagcaccggcagaagttctaccggggccacagtgatgacatcatcagcctggccctgcaccctgagcgggtgctggtggccaccggccaggtgggcaaggagccctacatctgcatctgggacagctacacagtgcagaccatctctgtgctgaaggatgtgcacacccatggaattgcctgcctggcctttgacctggatggccagaggctggtgtctgtgggcctggacagcaagaatgctgtgtgtgtgtgggactggaagaggggcaagatgctgtccatggcccctggccacacagaccgcatctttgacatctcctgggacctgtaccagcccaacaagctggtgtcctgtggggtgaagcacatcaagttctggagcctgtgtggaaatgccctgacccccaagaggggcgtgtttgggaagacaggagacctgcagaccatcctgtgcctggcctgtgccagagatgagctgacctacagcggggccctgaatggagacatctacgtgtggaagggcatcaacctgatccgcaccatccagggcgcccatgctgctggcatcttctccatgaatgcctgtgaggagggctttgccaccggcggcagagatggctgcatccggctgtgggacctgaccttcaagcccatcaccgtcatcgacctgcgggagacagaccagggctacaagggcctgtctgtgcgctctgtgtgctggaggggggaccacatcctggtgggcacccaggacagcgagatctttgagatcgtggtgcaggagaggaacaagcccttcctgatcatgcagggccactgtgagggggagctgtgggccctggccgtgcaccccaccaagcccctggccgtgacaggcagtgatgacagatctgtgcgcatctggagcctggtggaccacgccctgattgcccgctgcaacatggaggagcccatccgctgtgccgctgtgaatgctgatggcatccacctggccctgggcatgaaggatggcagcttcaccgtgctgcgggtgcgggacatgacagaggtggtgcacatcaaggacaggaaggaggccatccacgagctgaagtacagcccagatggcacctacctggccgtgggctgcaatgacagctctgtggacatctatggagtggcccagcgctacaagaaggtgggggagtgcctgggcagcctgtccttcatcacccacctggactggagcagtgacagccgctacctgcagaccaatgatggaaatggcaagaggctcttctacaggatgcctgggggcaaggaggtgaccagcacagaggagatcaagggcgtgcactgggcctcctggacctgtgtgtctggcctggaggtgaatggcatctggcccaagtacagcgacatcaatgacatcaacagcgtggatggcaactacatcggccaggtgctggtgacagcagatgattatggcatcatcaagctgttccgctacccctgcctgaggaagggggccaagttcaggaagtacatcggccacagcgcccacgtgaccaacgtgcgctggagccatgactaccagtgggtgatcagcattggaggagctgaccacagcgtcttccagtggaagttcatccctgagaggaagctgaaggatgctgtgcacatcgccccccaggagagcctggccgacagccacagtgatgaaagtgacagcgacctgagtgatgtgcctgagctggacagcgagattgagcaggagacccagctgacctaccgccggcaggtgtacaaggaggacctgccccagctgaaggagcagtgcaaggagaagcagaagagcgccaccagcaagaggcgggagcgggcccctggcaacagcatccggctgcactttgtgcacggctaccggggctatgactgccgcagcaacctcttctacacccagattggagagatcgtgtaccacgtggccgctgtgggcgtcatctacaaccggcagcagaacacccagcgcttctacctgggccatgatgatgacatcctgtgcctgaccatccaccccctgaaggactatgtggccaccggccaggtgggccgggaccccagcatccacatctgggacacagagaccatcaagcccctgagcatcctgaagggccaccaccagtatggagtgtctgctgtggacttcagcgcagatggcaagaggctggcctctgtgggcattgatgacagccacacagtggtgctgtgggactggaagaagggggagaagctgagcatcgcccggggcagcaaggacaagatctttgtggtgaagatgaacccctacgtgcctgacaagctgatcacagctggcatcaagcacatgaagttctggaggaaggccggcggcggcctgattggaaggaagggctacatcggcaccctgggcaagaatgacaccatgatgtgtgctgtgtatggctggacagaggagatggccttcagcggcaccagcactggagatgtgtgcatctggagggacatcttcctggtgaagacagtgaaggcccatgatggccctgtgttctccatgcacgccctggagaagggctttgtgactggaggcaaggatggcatcgtggccctgtgggatgacagctttgagcgctgcctgaagacctacgccatcaagagagctgccctggcccctggcagcaagggcctgctgctggaggacaaccccagcatccgggccatcagcctgggccacggccacatcctggtgggcaccaagaatggagagatcctggaggtggacaagagcggccccatcaccctgctggtgcagggccacatggagggggaggtgtggggcctggccacccacccctacctgcccatctgtgccaccgtgtctgatgacaagaccctgcgcatctgggacctgagccccagccactgcatgctggccgtgaggaagctgaagaagggcggccgctgctgctgcttctccccagatggcaaggccctggccgtgggcctgaatgatggcagcttcctgatggccaatgctgacaccctggaggacctggtgtccttccaccacaggaaggacatgatcagtgacatccgcttcagccctggcagcggcaagtacctggccgtggccagccatgacagcttcatcgacatctacaacgtgatgagcagcaagagggtgggcatctgcaagggggccaccagctacatcacccacatcgactgggacatccggggcaagctgctgcaggtgaacacaggagccaaggagcagctgttctttgaggccccccggggcaagaagcagaccatccccagcgtggaggtggagaagatcgcctgggcctcctggacctctgtgctgggcctgtgctgtgagggcatctggcctgtgattggagaggtgacagatgtgacagccagctgcctgaccagtgacaagatggtgctggccactggagatgacctgggctttgtgaagctgttccgctaccccaccaagggcaagtttgggaagttcaagcgctacgtggcccacagcacccacgtgaccaacgtgcgctggacctatgatgacagcatgctggtgaccctgggcggcacagacatgagcctgatggtgtggaccaatgagatggagggctaccgggagaagaggccctgtgacagcgaggagagtgacatcgacagcgaggaggatggcggctatgacagtgatgtgaccagagaaaatgagatctcctacaccatccgggccctgagcaccaacatccggcccatgctgggcatcaagccccacctgcagcagaaggagcccagcattgatgagcggccccctgtgtcccgggccccaccccagcctgagaagctgcagaccaacaacgtgggcaagaagaagaggcccatcgaggacctggtgctggagctgatcttcggctaccggggccgggactgcagaaataatgtgcactacctgaatgatggagatgacatcatctaccacacagcctctgtgggcatcctgcacaacgtggccaccggcagccagagcttctaccaggagcacaatgatgacatcctgtgcctgactgtgaaccagcaccccaagttcatcaacatcgtggccaccggccaggtgggggacagcgctgacatgtctgccacagcccccagcatccacatctgggatgccatgaacaagcagaccctgagcatcctgcgctgctaccacagcaagggcgtgtgcagcgtgtccttcagcgccaccgggaagctgctgctgtctgtgggcctggaccctgagcacaccatcaccatctggcgctggcaggagggcgccaagatcgccagccgggccggccacaaccagaggatctttgtggccgagttccggccagacagcgacacccagtttgtgtctgtgggcgtgaagcacgtgaagttctggaccctggccggccgggccctgctgagcaagaagggcctgctgagcaccctggaggatgccaggatgcagaccatgctggccatcgccttcggggccaacaacctgaccttcaccggcaccatctctggagatgtgtgtgtgtggaaggaccacatcctgtgccgcatcgtggcccgggcccacaacggccctgtgtttgccatgtacaccaccctgagagatggcctgattgtgactggaggcaaggagcggcccagcaaggagggcggcgctgtgaagctgtgggaccaggagctgcggcgctgccgggccttccggctggagaccggccaggccacagactgtgtgcgctctgtgtgccggggcaagggcaagatcctggtgggcaccagaaatgctgagatcatcgaggtgggggagaagaatgctgcctgcaacatcctggtgaatggccacgtggatggccccatctggggcctggccacccaccccagccgggacttcttcctgtctgctgctgaagatggcaccgtgcggctgtgggacattgctgacaagaagatgctgaacaaggtgaacctgggccatgctgccaggacagtgtgctacagccctgagggggacatggtggccatcggcatgaagaatggagagttcatcatcctgctggtgagcagcctgaagatctggggcaagaagagggaccggcgctgtgccatccatgacatccgcttctccccagacagccgctacctggccgtgggcagcagcgagaacagcgtggacttctatgacctgaccctgggccccaccctgaaccgcatctcctactgcaaggacatccccagctttgtgatccagatggacttctctgctgacagcagctacctgcaggtgagcagcggctgctacaagagacatgtgtatgaggtgcccagcggcaagcacctgatggaccatgctgccatcgaccgcatcacctgggccacctggaccagcatcctgggagatgaggtgctgggcatctggagcagacatgctgagaaggcagatgtgaactgtgcctgtgtgagccacagcggcatcagcctggtgactggagatgactttggcatggtgaagctgtttgacttcccctgcccagagaagtttgccaagcacaagcgcttcctgggccacagcccccacgtgaccaacatccgcttcaccagcggggacagacatgtggtgtctgctggaggagatgactgcagcctgtttgtgtggaagtgtgtgcacaccccccactag

SEQ ID NO: 293279 - DNA, 5910 bp, Artificial Sequence
  derived and/or modified sequence
atggcggcccggagcgccccgagctgccacctgcggctcgagtgggtgtacggctaccggggccaccagtgccgcaacaacctctactacactgcggccaaggagatcgtatacttcgtggcgggggtcggcgtggtgtacagcccgcgggagcacaggcagaagttctaccggggccacagcgacgacatcatcagccttgcattgcatcctgaacgagtgttggtagcaacaggacaagttgggaaagagccttatatttgtatttgggattcatacactgtgcagaccatatcagttttaaaggatgttcatacacatggtatagcttgcttggcgtttgacttagatggacagcgcttggtttcagttggacttgattcaaagaatgcagtttgtgtttgggactggaaaaggggaaaaatgttgtctatggctcctggtcatacagatagaatatttgatatttcttgggatttgtaccagccaaataaacttgtcagctgtggtgtaaaacatatcaagttctggagtttatgtggaaatgctctgaccccaaaacgaggtgtctttggtaagacgggtgaccttcagacaatactgtgcctagcctgtgcaagggatgaattaacatattctggtgcactcaatggggatatatatgtttggaaaggaatcaatcttatacgaacaatacaaggagcccatgctgcaggaatttttagcatgaatgcttgtgaagaaggctttgctactggtggcagagatggttgtattcgtctttgggatttaacttttaaaccaattactgtgattgatctcagggaaacagaccagggatacaaaggtttgtctgtaaggagtgtgtgttggcgaggtgaccacattctagttggaacacaggacagtgaaatttttgaaattgtggtgcaagaaagaaataaaccttttctaattatgcaagggcattgtgaaggtgaactttgggcacttgctgtccatcctactaaacctttggctgtgactggaagtgatgatcgttcggtcaggatatggagcctagtagatcatgcattaatagcaaggtgtaatatggaagaaccaattcgttgtgcagctgtcaatgcagatggaatccatcttgcccttggaatgaaggatggctcattcactgtacttagagtaagagatatgacggaagttgtacatattaaagataggaaggaggcaattcatgagttaaaatattcaccagatggaacttaccttgctgttggatgcaatgacagctcggttgatatttatggagttgctcagcgttataaaaaagttggcgagtgtttgggatcccttagtttcatcactcatctggactggtcttcagacagtagatatttgcagacaaatgatggaaatgggaaaagacttttttatagaatgccaggaggaaaggaagtgacaagtacagaagaaataaaaggtgttcattgggcttcatggacatgtgtttcaggccttgaagtaaatggaatttggcccaagtattcagatatcaacgatataaattcagtagatggaaattatattggccaagttttagttacagctgatgactatggaattataaaattattccgatatccatgtttaagaaaaggggccaagtttagaaaatatattggccattcagctcacgtaactaatgtcagatggtcacatgattatcagtgggttatttctattggtggagcagatcactctgtctttcagtggaaatttattcctgaaagaaaactgaaagatgctgttcacatagcaccccaagaaagtctggctgactctcatagtgatgaatcagattcagatctgtctgatgttccagaactggattctgaaattgaacaagagacacagctcacctaccgtcgacaggtttacaaagaagatctacctcagcttaaagaacagtgcaaagagaaacaaaaaagtgctacttctaaaagaagagagcgggctccaggaaatagtattcgattacactttgttcacggttacagaggttatgactgtcgaagtaatctgttttatactcaaattggtgaaattgtgtaccatgtggcagcagtgggtgtcatttataatcgacagcaaaacacacagcgtttttatctgggtcatgatgatgatattctctgcctaactattcatcctttgaaagactacgtggcaacaggccaggttggtagagatccctcaattcatatatgggatacagagaccattaaaccattgtccatattaaagggccaccaccagtatggtgttagtgccgttgatttctcagcggatgggaaacgtttggcatcagttggcatagatgatagccatactgttgtgctctgggactggaagaaaggagagaaactttcaatagcaagaggaagtaaagataagatttttgttgtaaagatgaacccctatgtgcctgataaactaattacagctggaattaaacacatgaaattttggcgtaaagcagggggaggattgattggaagaaaaggctacataggcacactggggaaaaatgacacaatgatgtgtgcagtgtatggatggactgaagagatggctttttctggaacatccacaggagatgtgtgtatctggagagacatctttcttgtaaaaacagtgaaagcgcatgatgggccagtgttcagtatgcatgcattggaaaaagggtttgtaactggaggaaaagatggtatagtagctctttgggatgactcttttgaaagatgtctcaagacctatgctataaaaagagctgcattggccccaggatctaaaggtcttctcttggaagataatccatctatacgtgccatatcattaggacatggtcatattttagttggcacaaagaatggtgaaatactagaagtggataaaagtggcccaataacacttctggttcagggacacatggaaggagaggtgtggggtttagctacacacccttatctgcccatctgtgctactgtaagcgatgataaaaccttaagaatatgggatctctcacctagtcattgtatgttggctgtccggaagctgaaaaagggtgggaggtgttgctgtttttctcctgatggtaaagctttagccgtaggtctcaacgatggaagcttcttaatggcaaatgcggatactctagaggatcttgtgtcttttcatcacagaaaagatatgatttcagatattcgattttcacctggttctgggaaatatcttgctgtagcatcccatgacagctttatagatatatacaatgtaatgagtagtaaacgagtaggaatatgcaaaggagctaccagttacataacccatattgattgggatattagaggaaagcttttacaggtcaacactggtgctaaggaacaattattctttgaagctcccagagggaaaaaacaaaccatccccagcgtggaggtagaaaaaattgcttgggcatcatggacaagtgtacttggtttatgctgtgaaggaatttggccagtaattggagaagttacagatgtaactgcttcttgcctcaccagtgacaaaatggttctagctaccggggacgatttgggatttgtgaagttatttagatatcctactaaagggaaatttggaaagtttaagaggtatgtggcccatagtacacatgtcacaaatgttcgctggacttatgatgacagcatgttggttaccctaggcggtacagatatgtctttaatggtgtggacaaatgagatggaaggctatcgagaaaaaaggccttgtgatagtgaagaatccgacattgattctgaagaagatgggggctatgacagtgatgttacaagggagaatgaaatcagttacaccatcagagccttatcaacaaatattcgcccaatgttaggaatcaagcctcatttacaacaaaaagaaccctcaattgatgaaaggcctccagtgagcagggccccaccacagccagagaaactccagacaaacaatgtaggcaagaaaaagagacctatagaggaccttgtgttggagctcatttttggttatcgaggcagagactgtaggaataatgttcactatttaaatgatggtgatgatataatttatcacactgcatctgttggaattctgcacaatgttgctacaggttctcagagtttttatcaggaacataatgatgatattctgtgcctcacagtaaaccagcaccccaaatttatcaacatagtggcaactggccaagtaggtgattcagcagacatgtcagctacagctccttctattcacatctgggatgcaatgaacaagcagactttatctatcctaagatgctaccattcaaagggagtatgttcagtcagcttcagtgctactggcaaactattgctgtctgtgggactagacccagaacatactattaccatttggagatggcaggaaggtgccaaaattgccagcagagctggtcacaatcaacgtatttttgtggcagaattccgaccagattcagatacccagtttgtctcagtgggagtaaaacatgtgaagttctggaccctggcaggaagagctcttcttagcaaaaaagggctactgagcacactggaagatgcccggatgcagaccatgctcgctattgcatttggtgcaaataacttgacgtttacaggtaccatcagtggtgatgtctgtgtgtggaaagatcacatattgtgtagaatcgtggcgagagctcacaacgggcctgtgtttgccatgtacaccaccctgcgagatggacttatcgtgactgggggaaaggaaaggccgtcaaaagaaggaggagcggttaaactgtgggatcaggaactgaggcggtgccgtgccttcaggcttgagacaggacaagccacagattgtgttcgttctgtgtgcagaggcaaaggcaagatccttgttgggacaaggaatgctgaaataatcgaagttggagagaaaaatgcagcttgtaatattttagttaacggtcatgtggatgggccaatctggggactagcaacacatccttccagggattttttcctttctgctgcagaagatgggacagtgagactttgggatattgctgataaaaagatgttaaacaaagtgaatttgggacatgctgctcgtactgtgtgttacagccctgaaggggacatggtggctattggaatgaaaaatggagaatttatcattttactagtgagttctctaaaaatatggggaaagaagagagacaggagatgtgcaatccatgatatcagatttagtccggattcccggtatctggcagtaggttctagtgagaactcagtggatttttatgacctaacgctgggccccactcttaacagaatcagctactgcaaagacattccaagctttgtcattcaaatggacttctctgcagatagcagttatctccaggtctctagtggctgctataaacggcatgtctatgaagtgccttcaggaaaacatcttatggatcatgccgctattgacagaattacttgggctacatggactagtattctaggagatgaggttttgggaatctggtccagacatgctgagaaagctgatgtcaactgtgcctgtgtatctcattcaggaatcagtcttgttacaggagatgactttggcatggttaagttatttgacttcccatgtccagaaaaatttgcaaaacacaaaaggttcttgggtcattcgccccatgtgacaaatattcgatttaccagtggtgatcgacatgttgttagtgctggaggtgatgactgcagcttatttgtctggaaatgtgtacatacacctcactga

SEQ ID NO: 293280 - DNA, 5796 bp, Artificial Sequence
  derived and/or modified sequence
atggccgcccggagcgcccccagctgccacctgcggctggagtgggtctatggatacagggggcaccagtgccggaataatctgtattacactgctgccaaagagattgtttattttgtcgccggagtgggagtggtgtatagccccagagagcatagacaaaaattttatcgaggtcacagcgatgacattatttctcttgcgctacatcccgagagagtgctggtcgccacagggcaggtgggaaaagagccctatatatgcatttgggattcctacaccgtacagaccatctctgtcttaaaagacgtgcacacccacggcatagcctgtctggcgtttgatctcgacgggcagcggctcgtctctgtgggcctggattccaagaatgctgtgtgcgtttgggattggaagcgcgggaaaatgctgtctatggcccccgggcatactgacagaatcttcgacatctcctgggatctgtaccaacctaacaaactggttagttgcggcgtgaaacacatcaagttctggtcactgtgtggaaatgcactgaccccaaagcgaggggtgttcggcaagacaggggatctgcagaccatactatgtctggcctgcgctagagacgagctgacttactctggagctctcaatggcgacatttacgtctggaaaggcattaatttgattaggaccattcaaggagcacacgcagctgggatcttctctatgaatgcttgcgaggaaggctttgctacaggtggacgcgacggatgtattcggttatgggatctgacattcaaacccatcacagttatcgatctccgggagaccgaccaggggtacaaaggactgtctgttcggtcagtgtgttggagaggcgatcacatacttgtagggacgcaggatagcgaaattttcgagatagttgtgcaggagcggaacaaaccttttttaattatgcagggacactgcgaaggagaactttgggcactggccgtgcaccctacaaagcctctcgcagtcactggctccgatgatcgcagtgtacgcatatggtccctggtagatcatgccctgattgccaggtgcaatatggaggagcctataaggtgtgctgctgtgaacgccgacgggatacacttagcgctcggcatgaaagatggtagcttcaccgtgctcagggttcgcgacatgacagaagtggtgcatataaaagaccggaaagaggccatccacgaacttaagtattcccctgacggaacctacctggcagtgggctgtaacgactcttccgttgacatctacggtgtcgcccaacgatataagaaggttggtgaatgccttggatctttgtcattcataactcatttggattggagctctgattctcgctacctgcagacgaacgatggcaatggaaagagattgttctaccggatgcccgggggaaaggaggttacatccacagaagagatcaagggcgtccattgggcgagctggacctgtgtgtctggcctcgaagtgaacggcatatggccaaagtatagcgatattaacgacattaacagtgtggacgggaattatattggtcaggtcctcgtcaccgcagatgattatggcattataaagctgtttcgatatccatgtctaaggaaaggggcaaagttcagaaagtacattgggcactccgcccacgttaccaatgtaagatggtcccacgactatcaatgggtcattagcattgggggcgctgatcactctgtctttcagtggaagttcattccagaaagaaagttgaaggatgctgtccacatagccccccaagagtcactggccgattctcacagtgatgagtctgatagtgacctaagtgacgtccctgaactggactccgaaatcgaacaggagacacagctgacatatcgacggcaggtctataaggaggatctgccgcagctcaaagaacaatgcaaggagaaacagaagagcgctacaagcaaaaggcgcgaacgggccccggggaattcaatacggctgcattttgttcatggctaccgaggatacgactgccgcagcaatctgttttacacccaaatcggggagatcgtatatcatgtagccgcagtgggagtgatctacaatcgccagcagaacacacaacggttctacctgggtcatgatgacgacattctttgcttgactatccacccactcaaagactatgtggctacggggcaggtgggtcgagacccatccatccacatttgggataccgagaccattaagcctctctccatactgaaggggcatcatcagtacggcgtatccgccgtggacttcagtgccgacgggaagcgcctggccagcgtagggattgacgatagccataccgtcgttctatgggactggaaaaaaggcgagaagttgtcaatcgcgaggggtagcaaggacaagatatttgtcgtcaagatgaatccctatgtaccagataagctgattactgcaggtatcaaacacatgaaattctggcgaaaggctggcgacgtgtgtatttggcgtgacatattcttggtcaagactgttaaagcccacgacggccccgtgttcagcatgcacgctctcgagaaggggttcgtgaccggaggcaaggacgggatcgtagctctctgggatgacagttttgaacgctgcctgaaaacctacgcaatcaaaagagctgccttagcaccaggaagcaaaggattactgttggaagacaatccatcgatccgcgccatcagcctgggccacgggcatattttggtgggcacaaagaatggcgaaattctcgaagtggataaatctgggcctattactctgctcgtccagggccacatggagggggaagtctggggccttgcgacgcacccctaccttcccatttgcgcaactgtgagcgacgataaaactctcagaatttgggacctgagtcccagtcattgcatgttagctgtgcgcaagctgaaaaaaggtggtagatgttgttgctttagcccagatggcaaggcactggctgttggcctgaacgacggaagcttcctcatggcgaacgccgatacgttggaggatctggttagctttcaccatagaaaggatatgatcagtgacattagattcagtcctggctcagggaagtacctggccgtggcctctcacgactctttcattgacatctataacgttatgtcctcaaagcgcgtgggtatctgcaaaggcgccacaagttatattacacatatcgactgggatataagggggaaactcctccaagtcaatacgggcgcgaaggaacaactgttctttgaagctccacgcgggaagaaacagactattccttccgtggaggtggagaaaattgcctgggcatcctggactagtgtattgggactgtgctgcgaaggcatctggccggtgattggggaggtgaccgatgtgaccgcttcgtgtctcaccagcgacaagatggtcctggccactggagatgatctgggcttcgtcaagctgttccgctaccccactaagggcaaatttggaaagttcaaaagatacgtggctcacagcacgcacgtgacaaatgtgaggtggacttacgacgattccatgctagttacattggggggcacagacatgagtttaatggtgtggactaacgaaatggagggatacagggaaaagcgcccatgcgactcagaggagagcgatattgattccgaagaagacggcggttacgattccgatgtgactagggagaatgaaatctcctacactataagagccctttctaccaatattcggccgatgctgggaattaaacctcatctccagcagaaagagccctcaatcgacgagcgacctcctgtctctcgggcccctcctcaacccgaaaaactgcagaccaacaacgtcggtaagaaaaagaggcccatcgaagatctggtgcttgaactgatttttggctatagagggcgcgactgccggaacaatgtacattatctgaatgatggagatgacatcatttatcatacggctagcgtcggtattctccataacgtggccaccgggtctcaaagcttctatcaggagcacaatgacgatatcctctgcctcaccgtgaatcagcatccgaaatttatcaacatcgtcgcaactgggcaggttgtgctgagctgctccctgctgacgactgcgccaagcatccacatttgggacgcaatgaataaacagacgctctccattctccggtgctatcactccaagggagtttgttcagtgagctttagcgcaaccgggaaacttcttttaagcgtgggtcttgaccctgagcacacaattacgatctggcgctggcaggagggggcaaagatcgcctcaagggctgggcataaccagcggatctttgtggcggaattccgccctgactctgatacacaattcgttagtgtaggcgtgaaacatgtgaaattctggaccttggctgggcgggctctcttgagtaaaaaagggctgctctcaacactcgaggacgccagaatgcagactatgctggcaatcgccttcggcgccaataacttaacctttactgggaccatttcaggtgacgtttgcgtatggaaggatcatatcctgtgtcgcattgtggcccgcgcccataacggtcccgtattcgctatgtatactactttacgagatggactgatcgtgactggaggaaaggagcggccaagcaaagaagggggagctgtcaagttgtgggaccaagaactccggcgttgccgcgccttccgtctggagaccggtcaggctactgattgcgtcaggtctgtctgtcgggggaagggcaagattcttgtggggacccgcaatgccgagataattgaagtgggcgaaaaaaatgcagcttgtaatatcctcgtaaatggacacgttgatggccctatctggggcctcgctacccatccctctcgtgacttttttctcagcgctgctgaagacggcactgtgagattatgggatatcgccgacaaaaaaatgctgaacaaagtgaacttggggcacgccgctcgaaccgtgtgttatagtcccgagggcgatatggtcgccataggcatgaagaatggagaatttataatactattggtttcctctctcaagatttggggaaaaaagagagatagacgctgcgcaatccacgacatccggtttagtcccgattccagatatctcgcagtaggtagcagcgagaacagcgtggatttttacgaccttaccctgggccccactctcaatagaatctcatactgtaaggatatcccgagcttcgtgatccagatggacttcagcgccgactctagttatctgcaggttagttcaggatgctacaagagacacgtttacgaagtgccgagtggaaaacacttgatggatcatgcagcaatagatcgaatcacttgggccacctggactagtatcctcggcgacgaggttcttggaatttggtctcgccacgccgagaaggcggatgtgaactgtgcatgcgtcagtcatagtgggatctccctcgtcaccggggacgacttcggtatggtcaaactctttgacttcccctgcccagagaagttcgctaagcataagagatttctgggccacagccctcatgtgacaaatatcaggttcacttccggagatcgccatgtagtttcagcgggcggagacgattgctcgctcttcgtgtggaaatgtgtgcacacaccacactag

SEQ ID NO: 293281 - DNA, 5910 bp, Artificial Sequence
  derived and/or modified sequence
atggccgcccggagcgcccccagctgccacctgcggctggagtgggtgtatggatacagaggacaccagtgtcgaaacaatttgtactacactgcagccaaagagatcgtgtacttcgtcgcaggcgtgggggtggtttatagtccacgggaacaccggcagaagttctacagaggccatagcgacgatattatatcgctggcccttcaccccgagagggtactggttgccaccggacaggttgggaaggaaccctacatttgcatttgggattcttacactgtgcagactatcagcgtgttgaaagacgtacatacccatgggatcgcctgtttagctttcgacctggacggacagcggctggtctccgtgggactcgacagcaaaaatgcagtgtgcgtgtgggactggaagcgcggaaaaatgctgtccatggctccgggccatactgatcggatcttcgacatatcttgggacctctatcagccaaacaagctcgtgtcttgcggggtcaagcacataaagttctggtcgctgtgcggcaacgccttaacacctaagcgaggagtgttcgggaaaaccggggacttacagactatactgtgtttggcctgtgcccgtgatgagctgacatatagtggggcgctaaacggcgatatctatgtctggaagggcatcaatctgatacggacgatacagggagcgcacgccgcgggtatctttagtatgaatgcatgtgaggaaggattcgcaactggcggacgggatggatgtatcaggttgtgggacctgactttcaagcccattaccgtgatcgacttacgggagactgaccaggggtataagggactttcagtaagatcagtctgctggcgcggggaccacatcctggtggggacgcaggattcagaaatctttgaaatcgttgttcaggagcgtaataaaccctttttgatcatgcagggccattgcgagggagaattgtgggcactggccgtccatcccactaagcccctggccgttacagggagtgacgacaggtcagtgcgtatctggtcgttagtggaccacgctttaattgctaggtgtaatatggaggagccgatcagatgtgctgccgtgaacgcggacgggatccacctggctctgggcatgaaggacggctcattcacagtcctcagagttcgggacatgactgaagtggtgcatatcaaagaccggaaagaagccatacatgagctgaaatattcccctgacggaacctatctggctgttggatgcaatgacagctcagtagatatatacggggtagcacaaagatacaagaaggtcggggagtgcctgggctctctgtcattcatcacccacttggactggagtagtgactctcgttacttgcagaccaacgacggtaatggcaagaggttgttctataggatgccagggggaaaggaggtcaccagcacagaggagattaagggggtgcactgggcctcatggacttgcgtttccggcttagaagtcaatgggatctggccaaaatactcggacattaatgatataaattcagtggatggcaactatattgggcaagtcctggtgactgccgacgactatggaattatcaaactgtttcgctacccgtgtctaaggaagggcgctaagtttagaaaatatattgggcatagcgctcatgtgaccaatgtgcgttggtcccacgattaccagtgggtcatatcaatcggcggcgccgatcatagtgtttttcaatggaaattcattcctgaaaggaagttgaaggacgctgtgcacatcgccccccaggagtcacttgccgactcacacagtgatgagagtgattcagatctgtccgacgttcctgagttagactccgagattgagcaggaaacccaacttacttacagaagacaagtctacaaggaggatctcccccagcttaaggagcaatgcaaggaaaagcagaagtcagctacttccaaaaggcgggaaagggcgcccggaaactccattcgcctgcactttgtccatggctaccgtgggtatgactgtagatcaaacctcttttatactcagatcggcgaaatcgtgtaccatgtcgcagccgtgggtgttatctacaaccgccagcaaaatactcagagattctacctgggacacgacgatgatatcttatgcctgactattcaccctctgaaggattatgtcgccaccggacaggtaggccgtgaccccagcatacacatatgggataccgagacaatcaaacccctcagcattctgaaagggcatcatcagtacggggtgagcgcagtcgatttttctgcggatggaaagaggctggcctcagtaggtatagatgattcgcataccgtcgtcctttgggattggaagaaaggggagaagctgtccattgcccgcggcagcaaggacaagatttttgtggtcaaaatgaacccttatgttccagacaaattgatcacagccgggataaaacatatgaagttctggagaaaggccggaggggggctcattggacgcaagggttacatcggcactttaggcaaaaatgacactatgatgtgcgccgtgtacggctggacagaggaaatggctttttcgggaacgtccacaggcgacgtgtgtatttggcgcgacatttttctggtcaagactgtgaaagctcacgacggtccagtcttttcaatgcacgccctggagaaaggctttgtgaccggagggaaagacggtattgtggccctgtgggacgactcattcgaacgctgcctgaaaacctacgcgatcaaacgggcggccctggctcctgggtccaaagggttgctgttggaagacaaccccagtatccgcgccatctctctaggacacggccacattctggtcggcactaagaacggcgaaatcctggaagtggataagtccggacccattacactactcgtacagggccatatggagggcgaagtttggggcctggcaacacatccttatctgcccatctgtgcaacagtctctgacgacaagacactcagaatttgggacttgtcaccttctcactgtatgctggccgtcagaaaactcaagaagggggggcgttgctgttgtttctctcccgatggcaaagctctggctgtgggactgaatgatgggagctttttgatggccaacgccgatacacttgaggacctggtgtcatttcatcatcgaaaggatatgatctccgacatcaggttttcccctggatctggaaagtatttggccgttgccagccatgatagtttcattgacatctataatgtgatgagttctaaaagggttggtatctgcaagggcgcgacatcatacattacacatattgattgggatattaggggcaagctcttgcaggtgaatacaggagcaaaagagcagctttttttcgaggcaccccggggcaagaagcagacgattccttcagttgaggtagagaagattgcgtgggcctcttggactagtgtgctggggctgtgttgtgaggggatttggccagtaattggcgaagttacggatgtaaccgcaagctgtttgacgtctgacaaaatggtgttagccactggtgatgatctcgggtttgtgaaactgttcaggtatcccacaaaaggcaagttcggaaagttcaaaagatacgtggctcacagcacccacgtcaccaacgtaagatggacctacgatgattcaatgctggttactctgggcggtactgacatgtcgttgatggtctggaccaatgaaatggaaggctatagagaaaaacgcccatgtgattccgaggagtctgacattgattctgaagaagatggagggtacgattctgacgtgactcgggagaatgaaattagctacacgataagagccctcagcacaaacattcgtcccatgttaggaatcaaaccgcatttgcagcagaaagagccttctattgatgagcgccctcctgtgtcacgcgcacctccccagccagaaaaactgcagacaaacaacgtggggaagaaaaagcgccctattgaagacctggtgttagagctgatatttgggtacaggggccgggattgcagaaataatgtgcattatctgaatgacggagacgatattatctaccatactgcttcagtcgggatactgcacaacgtggctacagggtctcaatctttctaccaggaacacaatgacgacattttgtgtctgaccgttaatcagcatcctaagttcattaacatcgtagcaacaggccaggtgggagatagcgctgatatgtctgccaccgctccatctattcacatctgggacgccatgaacaagcagaccctgtccatactgaggtgctaccattcgaaaggggtttgcagcgtctctttcagcgcaacaggaaagctgctgctaagtgtgggattggatcccgagcacacaatcaccatatggcggtggcaggaaggagcaaaaatcgcatctagggctggacacaatcagcggatctttgtagcagagttccgaccagatagtgatacacagttcgtgtctgtgggcgtgaaacacgtgaaattctggacgttggccggccgggctttactgagtaaaaagggtctgctctccactctggaggacgccagaatgcaaacgatgctggccattgcttttggagccaacaacctcacgttcaccggtacaatcagcggggacgtttgtgtttggaaggatcatattctgtgtaggatcgtcgccagagctcacaatggcccagtgtttgcaatgtataccactctaagagacggcttaatcgtcaccggcggcaaagagcggccatccaaggagggaggcgccgttaagttatgggaccaggaacttcggaggtgtcgcgcatttcgtttagaaaccggtcaggccaccgactgcgtgagaagcgtgtgtagggggaagggtaaaattctcgttggcacccgtaacgctgagatcatcgaagttggggaaaaaaatgccgcctgtaacattcttgtgaatggccacgtcgacggaccgatttggggccttgctacccatccatcaagagatttctttctgtccgcggctgaggatgggaccgtgagattgtgggatattgctgacaagaaaatgctgaacaaagtgaacttgggacacgctgcccgcaccgtgtgttacagccccgagggtgatatggtcgcaatcggtatgaagaacggcgaatttatcatcctcctggtgagcagtctgaaaatatggggcaaaaagcgtgataggcgctgcgccattcacgatatacgcttcagccccgactccagatacctggccgttggctcctccgaaaactcagtggatttttatgatcttacgctcggccccacattaaatcgtattagctactgcaaggatatcccgtccttcgtgatccagatggatttctccgctgactctagctacctccaagtttcctcaggctgctataagaggcatgtgtatgaagtcccttccgggaaacacctcatggaccatgcagctattgatcgaattacatgggcgacctggacatccatcctcggagatgaggtgcttggtatttggagtagacatgctgagaaggcggatgtgaactgcgcatgcgtgagccactctggaatctccctggtaaccggcgatgacttcgggatggttaagctgttcgattttccctgccccgagaagtttgcaaaacacaaaaggttccttggtcattcaccacacgttactaacatccggtttacttccggggacagacatgtggtgtcagctgggggtgacgactgctcgcttttcgtgtggaaatgcgtacacacgccgcactag

SEQ ID NO: 293282 - DNA, 5795 bp, Artificial Sequence
  derived and/or modified sequence
atggctgccagaagtgcgccaagttgtcacctccggctggagtgggtatacggctacagaggccaccagtgtcggaacaatctctattacaccgccgcaaaggaaattgtatatttcgtggctggtgtgggtgtggtctactcccctagggagcacagacaaaaattttatagaggccactcagacgacatcataagcctggccttgcatccggagagagtgctcgttgcaaccggacaggtcggaaaagaaccctatatctgcatctgggactcatatacggtgcagacaatttccgtgttgaaggacgtccatacccatgggattgcttgcctggcctttgaccttgacggccagaggctggtcagcgtgggcctcgattccaagaatgccgtgtgcgtgtgggattggaagcgcggaaagatgctgtccatggccccaggccataccgatagaatatttgatatctcctgggatttgtatcagcctaataagctggtctcctgcggagttaagcacatcaagttctggtcgctgtgcggaaacgcactaaccccaaaaaggggagtctttggcaagacgggcgacctgcagaccattctctgcctggcatgcgccagggacgaacttacgtacagtggcgctctcaacggagacatttatgtgtggaagggcataaacctcatacggacaatacagggagcacatgcagctggaatcttttctatgaacgcttgcgaggaggggtttgccacaggtggcagggacggatgcattcggctgtgggacctcacatttaagcctatcactgttatcgacctgcgggagactgaccaggggtacaaagggctctctgttcgctccgtttgctggaggggggaccacatcttggtcggcacacaggatagcgaaatatttgagatcgtggtgcaggagcgcaataagccatttctgatcatgcagggtcactgcgagggtgagctgtgggccctcgctgttcaccccaccaagccgctcgccgtgactgggtccgacgaccgcagtgtccggatctggagcctggtggaccacgcgctgatcgcccgatgcaatatggaagagcctataagatgcgccgctgtgaacgctgacggaattcatctggcactcggaatgaaggatggctcttttacagtgctgcgggtgagggacatgaccgaagttgttcatattaaagaccgaaaggaggccattcacgagctgaagtatagcccagacggaacctacctggctgtgggatgtaatgatagttccgtggatatctatggcgtggctcagcggtacaaaaaagtgggtgagtgccttgggtcactcagtttcattacccatcttgattggtcatccgatagcaggtacttgcaaacgaacgatggtaatggcaagagacttttttaccggatgcccggtgggaaggaggtcactagtacggaggagatcaagggagtgcattgggcctcttggacttgtgttagcgggctcgaagtgaacggcatctggcccaaatatagtgacatcaacgacataaattctgttgacggaaactacataggccaggtccttgttactgcggacgattacgggattataaagctgtttagatatccttgcctgaggaaaggagccaagttcaggaagtacatcgggcacagcgcgcacgtcaccaatgtgcggtggtctcacgattaccagtgggttatctctatcgggggagccgatcacagcgtctttcagtggaagtttattcctgagaggaaactgaaggatgccgttcacattgccccacaggaaagcttggctgacagccattctgatgagagcgactccgaccttagcgacgttcccgagctcgatagcgaaattgagcaggagactcagctcacctacaggcgacaggtttataaggaagacctgcctcaactgaaagagcaatgcaaggagaaacagaagtcagcgaccagtaaacgaagagagagagccccaggaaattcgatccgactgcacttcgtacacggataccgtggatatgactgtcgttcaaacctgttctatacacagattggcgaaatcgtgtaccatgtggccgcagttggcgtgatttataaccgacaacagaatacccagcgcttctacctgggtcacgacgacgatatcctgtgcctgactatccatcctcttaaggattatgtggccacagggcaggtgggacgagacccttctattcatatctgggatacggagaccattaagcctttgagtatcctgaaagggcaccaccagtatggcgtcagcgcagttgattttagcgctgatgggaaaaggcttgcaagtgtgggaatcgatgactctcacacagtggtcctgtgggattggaaaaaaggagagaagctgtctattgcaagaggaagcaaagacaagatctttgtcgtgaagatgaacccttacgtgccagacaagctcatcacagcagggattaaacatatgaagttctggaggaaagccggagacgtttgtatctggagggatattttcttggtaaaaactgtgaaagcccacgatggcccagttttctctatgcatgccttggaaaaaggtttcgttaccggaggaaaagatggcatcgttgctctgtgggatgatagtttcgagcgttgtttaaagacatatgcaatcaagagagcagccctcgccccagggtctaagggcctgctgctggaggataacccaagcattcgcgctatctccctgggacacggccatattctggtcggaactaaaaatggggagatcctagaagtggacaaaagcggtcctattacactgctcgtgcagggccacatggagggagaggtgtggggtctggccactcacccttatttaccaatttgtgccactgtttccgatgataagaccttgcgtatctgggacctctcaccctcccactgtatgctagctgtacgcaagctgaaaaagggtggaaggtgttgctgtttctcgcccgacgggaaggctctggctgtcggtttgaatgacggtagtttcctcatggcaaatgctgacacactagaggaccttgtttcattccaccacagaaaggacatgatttccgacatccgattctctcccggatccgggaaataccttgcagtggcaagtcacgactcgtttatagatatttacaacgtgatgagttcaaaaagagtcgggatctgtaagggcgcaacgagctatatcacgcacatcgactgggacatccgcggaaaattattgcaagttaacactggagctaaagaacaattgttcttcgaagcgcctagagggaagaagcaaaccatcccatccgtggaagtggaaaaaattgcgtgggcctcttggactagcgtactgggtttgtgctgcgaggggatctggccagtcattggggaagtgaccgacgtcactgcgtcttgtcttacctcggacaagatggtgttagccacaggcgatgacttagggttcgtgaagctgttccgatatccaacaaaaggaaaatttggcaaattcaagcggtacgtggctcacagcactcacgtaaccaacgtgagatggacatacgacgattctatgcttgtcaccctcggcggtacagacatgagtctgatggtttggaccaacgaaatggagggctacagggagaagcgtccatgtgatagcgaagaatcagatatagacagcgaagaagacgggggttacgacagcgatgtgacccgagagaatgagatcagttacactatcagagctttatctacaaatattcgcccaatgcttggtattaagcctcatttacagcaaaaagagccctctattgacgaaaggcctcctgtttccagagccccacctcaacctgagaagcttcagactaacaacgtcggaaaaaaaaaacgacccatcgaggaccttgtactcgaattgattttcggctacagaggccgagattgtcgcaataacgtacactatttgaacgatggcgatgacataatctaccacaccgcaagcgttgggattctgcacaatgtggcgaccggatcccagtccttctatcaggaacataatgacgatattctgtgcctcacagtcaaccagcatccgaagtttatcaatatagtggcaaccggccaggttgtactgtcctgctctttgcttactactgccccaagcatccacatatgggatgcaatgaacaagcaaaccctgtctattctgaggtgctaccatagcaagggagtgtgttctgtgtcgttcagtgcgacaggaaaactgctactttcagtggggcttgatccagagcatacaataacaatctggcggtggcaggagggagccaaaatcgcctcccgggcaggccacaaccaaaggatttttgtggcagagttcagacccgattctgacacccagttcgtgtccgtcggagttaagcatgttaaattctggaccctggccggtcgtgccctgcttagcaagaagggcctcctgtccactctggaggatgccagaatgcaaactatgctggcaattgcattcggcgcaaacaacctaactttcaccggaaccataagcggagatgtctgcgtgtggaaggaccacattttatgcaggatcgtggctcgtgcccataatgggccagtctttgcaatgtatacaacgctccgcgacggtctgattgttactgggggtaaagagaggccaagcaaggaaggcggtgccgtcaaattatgggaccaggaactgcgtcggtgccgcgcttttagattagagactgggcaggccaccgactgcgttcggtccgtctgtagggggaagggtaagatcctcgtcgggacacggaacgccgagatcatcgaggtcggagagaagaacgcagcatgcaacatcttggtcaacggtcacgtggacggcccaatttgggggctcgcaacccaccccagccgcgacttttttctgagcgctgccgaggacggaaccgtcagactgtgggatatcgcagacaagaaaatgctgaacaaggtgaatttgggacacgccgcacggacggtgtgctacagccccgagggcgatatggttgctatcggcatgaagaatggggagtttatcattttgctagtctctagtttgaaaatatgggggaagaagcgagacaggcggtgtgcgattcacgatatccgtttctcacccgacagtcgctatttggccgtaggcagcagtgagaattcagttgatttttatgatcttaccttaggtcctactcttaaccggatcagctactgtaaggacatcccctcattcgtgatccagatggacttttcagccgactcctcctacctgcaagttagctctgggtgctacaagcgtcacgtctatgaggtcccatctggaaagcatctaatggatcatgcagccatagacagaatcacatgggcgacttggactagtatcctgggcgacgaggttctgggtatatggagccgccacgctgagaaagctgacgtcaattgtgcctgcgtgagccattcagggatctctctggtcacaggagacgacttcggaatggtgaagttattcgacttcccgtgtccagagaaattcgctaagcacaaaagatttttagggcacagcccccacgtgactaatattaggttcacctctggcgacagacacgtggtgagtgccggtggcgacgattgttcgctgttcgtgtggaagtgtgtccacacgccacacta

SEQ ID NO: 293283 - DNA, 5909 bp, Artificial Sequence
  derived and/or modified sequence
atggctgccagatccgccccttcctgtcatttacggcttgaatgggtttacggatatagggggcatcagtgtcgtaataacctctactatacagccgctaaagaaatagtctatttcgtagccggtgtcggcgtggtgtattctccgagggaacaccggcaaaagttttacaggggacacagtgacgacattatcagtctggcattacaccctgaaagagttctagtggccacagggcaggtcggaaaggaaccttatatctgcatttgggacagctatacagttcagaccataagtgtgctgaaagatgttcacacgcacggaattgcctgtcttgcctttgatctggacgggcaaagacttgtgtcagtgggattggacagtaagaacgccgtatgcgtttgggattggaagcgtggaaaaatgctgtcgatggcccctggacataccgaccgcatattcgatatctcctgggacctataccagccaaataagctggtcagctgcggagtgaaacacataaaattctggtccctgtgtgggaatgcactgactccgaagagaggcgtgttcggaaagacaggtgatttacagacaattctttgtctggcctgtgcgcgtgatgagcttacttatagcggcgcattaaatggcgatatttacgtgtggaaggggataaatctgataagaaccatccagggagcccacgctgccggtatatttagcatgaatgcgtgcgaggaagggtttgcaacaggtggtagggacgggtgtatccgcctttgggacctgaccttcaaacctatcactgtgattgatttacgagaaacagatcaaggctataagggcttgtccgtgcgcagtgtgtgctggcgcggtgaccacatactggtgggtactcaggatagtgaaatatttgagatcgtcgtacaggagaggaataaaccgttcttgattatgcagggccactgcgaaggagaactatgggccctcgccgtgcaccctactaaaccactggcagtgaccgggagcgacgatagatcagttcgaatttggtcccttgtagaccatgcactcatagcccgatgcaacatggaggaacccatccgatgtgcagctgtaaacgccgacggaattcacttagccttgggcatgaaagatggatcgttcactgtgctcagggttagggacatgacagaggtggttcacatcaaggaccgtaaggaggctatccacgaactgaaatactcaccggacggaacctacttagccgttgggtgtaatgattcaagcgtggatatttatggggttgctcagcggtacaagaaggtgggggagtgtttaggaagcctgtcctttatcacccacctggactggagcagtgacagccgctatttgcagacaaacgacggtaatggaaaaaggctgttttaccgaatgcctgggggaaaggaggtgacttccacggaagagatcaagggtgtccactgggcttcatggacatgcgtgagtggactagaagtcaatggaatttggcccaaatatagtgatatcaacgatatcaacagtgtcgatgggaattacatcgggcaggtgcttgtaactgcagacgactacggaattatcaagctgttccggtacccttgtctgcggaagggtgccaagttcagaaagtatatcggtcactctgcccacgtgactaatgtacgatggtcccatgactatcaatgggtaattagtattggcggagccgaccacagcgtgttccagtggaaatttattccagaaagaaaattgaaggacgccgtgcacatcgcaccacaggagagtctggctgactcccactccgatgaatctgacagcgacctgagcgacgtgccggagctagacagcgaaattgagcaggagacccagctgacctacagaagacaggtgtacaaggaggacctgccgcaactcaaggagcagtgcaaggaaaaacagaagtccgcgacgtctaaacgcagagagcgtgcccctggcaactccattagactacattttgtgcatggttatcggggttatgactgtcggtctaacctcttctacacacagataggggagatcgtgtatcatgtggccgcagttggggtgatctacaaccgccagcagaacacgcaaaggttctacctggggcacgacgatgatattctctgtttaacaattcatccactgaaggattacgtcgcaacagggcaggtgggaagggatcctagcatccatatttgggacacagaaaccatcaaacccctgtccattctcaagggccatcatcaatacggtgtaagcgccgtggacttttcagcagatggaaagcgtctcgcttcagtaggaattgacgattctcacaccgtagtgctgtgggattggaaaaaaggtgagaagctctcgatagcgcgtggaagcaaagataaaatcttcgttgtgaagatgaatccatacgttcctgataagctgatcacagctgggatcaaacatatgaagttttggagaaaggccggaggcggattaattggcaggaaaggctacattggcacactgggaaagaacgacacaatgatgtgcgcggtctacgggtggaccgaggaaatggcattttccggaactagcactggggatgtctgcatctggagggatatctttctggtgaaaacagtcaaggctcacgacgggcctgtgttttctatgcatgctctggaaaaaggatttgttacagggggtaaagacggtatcgtggccctatgggacgattccttcgaacggtgtctaaagacgtatgccattaaaagagcagctctagcaccgggttctaagggccttctgttagaagataatccctccatccgggcaatcagcttaggtcatggtcatattctggtggggactaaaaatggcgaaattttagaggtggacaagtctgggcctattacactcttggtccagggacacatggaaggagaagtttggggtttggcaacgcacccctacttgcctatttgcgctactgtttcagacgataagacgctccgcatttgggatctgtctccaagtcactgcatgcttgccgtgcgaaagctgaaaaaggggggtcggtgttgctgtttctccccagacggcaaggctctcgccgttggccttaacgacggttcgttcctaatggcgaacgccgataccctggaagatctagtatccttccaccataggaaagacatgattagtgacatacgttttagccccggttctgggaagtacctcgccgtggccagccacgatagcttcatagatatctacaatgttatgtctagcaagagagtcgggatctgtaaaggggctacttcatatattacacatatcgactgggacatcaggggaaaactgctgcaagttaatacaggcgctaaggagcagctctttttcgaagccccaaggggaaaaaaacagaccattcccagtgtggaagttgagaagattgcttgggcatcctggacctcggtgctgggcctctgctgtgaagggatctggcctgtgataggtgaggtaaccgacgtgaccgcctcttgcctcacttccgataaaatggtactcgcaacgggcgatgacttagggtttgtgaaactctttcgataccccacaaaagggaaattcgggaaatttaaacgttacgttgctcactctactcacgtgacaaatgtgaggtggacctatgatgattctatgttggtaacactaggaggaaccgatatgtccctgatggtctggactaacgaaatggaaggctatagagaaaaaagaccttgcgactccgaggagtcggacattgacagtgaagaagatggcggatatgatagtgacgtcacaagagagaacgaaattagttatacgataagagcactgtccacgaatatccggccaatgctcgggattaaacctcatctgcagcagaaagaaccatccattgatgaaagaccaccggtctctagagcaccgccacagcccgagaagcttcagacgaataacgtaggcaagaagaaacggcctatcgaggacctagtgctcgaactgatcttcgggtaccgcggaagggactgtcgcaacaatgtccattacctgaatgatggggatgatataatctatcacacagccagcgttggcatcctgcataacgttgcaaccggctcgcagtccttctaccaggagcacaatgacgacatcctgtgcctgactgtgaatcaacatcccaagtttataaatatcgtggcaaccggccaggtgggtgactcggcagacatgagtgctacagcaccaagcattcacatctgggacgccatgaataagcagaccctgtcaatcctccgatgttaccattcgaagggggtctgttccgtgtcctttagcgccaccggcaagctgttgctgtccgttggacttgatcccgaacacacaatcactatctggcggtggcaggagggggctaagattgcctcaagagctggtcacaaccagcggatttttgtggccgaattcaggcccgacagcgacacccagttcgtgagcgttggggtgaaacacgtcaaattttggacattggcagggagagccctgctgagcaaaaaaggattattaagcacactggaagatgcaagaatgcagaccatgttagcaatcgcattcggggcaaacaatctgacattcacaggcaccatttctggtgatgtttgcgtatggaaagaccatatcctgtgccggatcgtggccagggcccataatgggccagtgttcgcaatgtacaccacgcttagagatggactcatcgtgacagggggtaaagaacgcccatctaaagaagggggagcagtgaagttgtgggaccaagaactccgaagatgccgcgcatttaggttagaaacgggacaggccaccgactgcgtgagatctgtgtgcaggggtaagggaaagatccttgtgggcactagaaacgctgagataattgaagttggtgaaaagaatgcggcttgcaacattctggtgaacgggcatgttgatggacccatatggggactcgctactcacccgtcccgggatttcttcctgtctgccgctgaggatggcaccgtccgcctctgggatattgcagacaagaagatgttaaataaggtgaaccttggccacgctgctcggaccgtgtgttactccccggagggcgacatggtggccataggaatgaagaacggtgagttcattattctcctcgtgtctagcttgaagatttgggggaagaaaagggaccggagatgtgcaattcacgacatacggttcagcccagacagtcggtatttggctgtcggatcatccgaaaattctgtggacttttacgacctcaccttaggcccaactcttaaccggatctcctactgcaaagacatccccagtttcgtaattcagatggattttagcgccgattcatcttacctgcaggtgagctctggatgttacaagcggcacgtttacgaagtaccatctggcaagcacttaatggatcacgccgcaatcgaccgaataacctgggccacctggacctctatcctgggtgacgaagtgctcggtatctggagtcgtcacgccgaaaaggctgacgttaactgcgcatgtgtgtcccacagcggaatttccctcgtgacgggcgacgactttggcatggtaaaattattcgacttcccgtgtcctgagaaattcgcaaagcacaagcggtttttgggacactcgccccatgtgaccaacatcaggttcaccagtggcgataggcatgtcgtgtcagctgggggagacgactgctcactgtttgtgtggaagtgcgtccatacaccacacta

SEQ ID NO: 293284 - DNA, 615 bp, Artificial Sequence
  derived and/or modified sequence
atgcccggcggcaagaaggtggccggcggcggcagcagcggcgccactccgactagcgcagccgccactgcccccagtggagtgcgtcggctggagacatccgaggggacatccgcgcaacgggatgaagagccagaagaagagggcgaggaagacctgcgcgacgggggcgtgccattttttgtaaacagaggaggcttgccagtggacgaagcaacatgggaacggatgtggaagcacgttgccaagatccaccccgacggggagaaagtagcacagcgcattagaggagccactgacttacccaagataccgattcccagtgtccccacatttcagccctccacccctgtccccgaaaggctggaggcagtccagcgctatatcagagagctacaatataaccatactggcacccaattctttgaaataaagaagtcccgaccactcaccggactcatggatctggctaaagagatgacgaaagaagctctgcccatcaaatgcctcgaggcagttattctggggatgtaccccagctcacctgagggagaaggatctggcctcttatgggcctccgcttcctgtagtgagagtgaaggaggtgtagggtag

SEQ ID NO: 293285 - DNA, 615 bp, Artificial Sequence
  derived and/or modified sequence
atgcccggtggtaagaaggtcgctggtggcggaagttcaggagccacccctacttcagcagcagctactgccccaagtggcgttcgcaggcttgagacctccgaaggcacatctgcccagagggacgaggaacccgaggaagaaggcgaggaggatctgcgggatggcggagtgcctttcttcgttaatagaggtggacttccagttgatgaagctacctgggaacgaatgtggaagcacgtggctaagatccatccggatggggagaaagtcgcgcagcggatacgcggagcaacggatttacctaaaatccctatcccttctgtgcccacttttcagccctcgacacctgtccctgaacggctggaggccgtgcaacgctacattagagaactgcagtacaatcatacagggactcagtttttcgaaataaagaagtcacggcctctgaccggtctgatggatctggccaaagagatgactaaagaggcattacccattaagtgcctggaggccgtgatcctcggtatgtatccaagcagccctgaaggagagggttccggactgctgtgggcttctgcgagttgctctgagtcagaaggtggcgttggctag

SEQ ID NO: 293286 - DNA, 615 bp, Artificial Sequence
  derived and/or modified sequence
atgcctggcggaaagaaagtggctggtggtggttcttcaggggccacccctacttcggctgccgcaactgcgccatcaggcgtgagacgccttgaaacttctgaggggacttctgcccagagagacgaagagcccgaggaggagggggaggaggatctacgtgatggtggtgtcccattttttgtaaatcgcggggggctaccggttgatgaggccacatgggaaaggatgtggaaacatgtcgccaaaatccacccagacggagagaaagttgcccaacgcatcagaggcgctacagacctaccaaaaattcccattccttccgtgcctacgttccagccgtcaacaccggtaccagaaagacttgaggccgtccagcggtacattcgtgaactgcagtacaatcacactggcacccaattcttcgagattaaaaagagcagacccctcacgggactgatggacctggcaaaggagatgaccaaggaagccctgccaattaagtgcctggaagctgtcatcctgggaatgtatcccagctctccagagggcgaaggatccggattattatgggcttctgctagctgcagtgaaagtgagggcggggtggggtag

SEQ ID NO: 293287 - DNA, 615 bp, Artificial Sequence
  derived and/or modified sequence
atgcctgggggcaaaaaagttgccggcggcgggagcagcggggccactccaacaagcgcagccgcgacagcccccagcggcgtgagaaggctggagacatctgaaggaacaagtgcacagagggatgaagaacccgaggaagagggagaagaggatctgagagatggcggtgtgcctttctttgtgaataggggagggctgccggtcgatgaggcaacgtgggagcgcatgtggaaacacgttgcaaagatacaccccgacggtgaaaaagtagcacagagaattcgtggcgccactgatctaccaaaaattcccattccttccgtgcctacgttccagccgtcaacaccggtaccagaaagacttgaggccgtccagcggtacattcgtgaactgcagtacaatcacactggcacccaattcttcgagattaaaaagagcagacccctcacgggactgatggacctggcaaaggagatgaccaaggaagccctgccaattaagtgcctggaagctgtcatcctgggaatgtatcccagctctccagagggcgaaggatccggattattatgggcttctgctagctgcagtgaaagtgagggaggagtgggatag

SEQ ID NO: 293288 - DNA, 1462 bp, Artificial Sequence
  derived and/or modified sequence
cgcgcagatgtgagcgtgcgagagttgtgtaggggattttgttccctccgaaactgagacccagggcgcccagtgggcacccgtgccttgactctgtcctttctgcagccgctggtccgagctgtctggcctcagtttccctccgacttttctccgctctgccagccctcactgctgcccgtcattgttctcgcagttagatgggggtgctttgtgacggctgccaagttggggtgtgttctctttattccgtttttcaaacagaacaaggcctccaaggctgaccccagacaacccaccccctcggaccctaattcaccttattgcactgattttttttatcaagtcgtattttattgtacaggagccacgccctgatttcttaaaggcgccttgcactctggccatgtgttatctctgcagccggtgtgtgggaggcctcttgtgagccagttgttttcccgcctccaccacccccctcgaagatttagggatgccaggggggaagaaggtggctgggggtggcagcagcggtgccactccaacgtccgctgcggccaccgccccctctggggtcaggcgtttggagaccagcgaaggaacctcagcccagagagatgaggagccagaagaggaaggggaagaggacctgcgagacggaggcgtccccttctttgtcaaccggggtgggctacctgtggatgaggccacctgggaaaggatgtggaaacacgtggccaagatccaccccgatggagagaaggtggcgcaacggatccgtggggccacagacctgcccaagatccccataccgagtgtgcctacgttccagccgtctacacctgtccctgagcgcctggaagctgtgcagcgctacatcagagagctgcagtacaatcacacagggacacagttctttgaaattaagaagagcagacctctgacagggctgatggacctggccaaggaaatgaccaaagaggccctgccaatcaaatgcctggaagccgtgatcctgggaatgtatccttcctcacctgaaggggaggggtccgggcttctctgggcctcagcttcctgctctgaaagtgagggtggggtaggttgaatgggctccagggctctcccatatgcagtcatctgcttggccccaagatggagaagcaccccactaaagtggaagaaccccccaaaatggaggagccccgaggtcccagtaccccacatctcagttgctaccttcccaggcttactgggcagctcttttttgagtcacgtggatacagggaccgttttctgaaccccaaatcagggcacagtgtctcacaaagacagttgtaccatttccaagaactagacagtctgggaggcacagttggaatgcccagatgttggcatttccagaacatgttgatttctggacgagatattaaagcaaaactgccttaaaaaaaaaaaaaac

SEQ ID NO: 293289 - DNA, 615 bp, Artificial Sequence
  derived and/or modified sequence
atgcccggcggcaagaaggtggccggcggcggcagcagcggcgccacccccaccagcgccgccgccaccgcccccagcggcgtgagaagactggagaccagcgagggcaccagcgcccagagagacgaggagcccgaggaggagggcgaggaggacctgagagacggcggcgtgcccttcttcgtgaacagaggcggcctgcccgtggacgaggccacctgggagagaatgtggaagcacgtggccaagatccaccccgacggcgagaaggtggcccagagaatcagaggcgccaccgacctgcccaagatccccatccccagcgtgcccaccttccagcccagcacccccgtgcccgagagactggaggccgtgcagagatacatcagagagctgcagtacaaccacaccggcacccagttcttcgagatcaagaagagcagacccctgaccggcctgatggacctggccaaggagatgaccaaggaggccctgcccatcaagtgcctggaggccgtgatcctgggcatgtaccccagcagccccgagggcgagggcagcggcctgctgtgggccagcgccagctgcagcgagagcgagggcggcgtgggctag

SEQ ID NO: 293290 - DNA, 615 bp, Artificial Sequence
  derived and/or modified sequence
atgccaggcggtaagaaggtcgcaggaggtggctcttccggagcgactcccacttctgcggcagcaaccgccccatctggtgtcaggagactagagaccagcgaagggacctcggcgcaaagggacgaggaacccgaagaagaaggtgaggaggatttacgggacggcggcgttccttttttcgtcaatcgcggagggctcccggtggatgaagctacctgggagcgcatgtggaaacatgttgcaaagatacatcccgatggagagaaagtcgcccagcggatccgaggcgccacagatttgcccaaaatccccatcccttcagtacctaccttccagccaagtacccctgtgcccgagcgactcgaggctgtgcagaggtatatcagagagctgcagtacaatcatactggtactcagttctttgagatcaaaaagtcacggccacttactgggcttatggacctggccaaagagatgacaaaggaggcgctcccaattaaatgcttagaagctgtgatccttgggatgtatccctcttcacccgagggagaaggctcaggactcctgtgggcgagcgctagttgttcagaatccgagggcggggtgggatag

SEQ ID NO: 293291 - DNA, 615 bp, Artificial Sequence
  derived and/or modified sequence
atgcctgggggcaagaaggtggccggcggcggcagcagcggggccacccccaccagcgctgctgccacagcccccagcggcgtgcggcggctggagaccagcgagggcaccagcgcccagagagatgaggagcctgaggaggagggggaggaggacctgagagatggaggagtgcccttctttgtgaacagaggaggcctgcctgtggatgaggccacctgggagaggatgtggaagcacgtggccaagatccacccagatggagagaaggtggcccagaggatccggggggccacagacctgcccaagatccccatccccagcgtgcccaccttccagcccagcacccctgtgcctgagcggctggaggccgtgcagcgctacatccgggagctgcagtacaaccacacaggcacccagttctttgagatcaagaagagccggcccctgaccggcctgatggacctggccaaggagatgaccaaggaggccctgcccatcaagtgcctggaggccgtcatcctgggcatgtaccccagcagccctgagggggagggcagcggcctgctgtgggccagcgccagctgcagcgagagcgagggcggcgtgggctag

SEQ ID NO: 293292 - RNA, 615 nt, Artificial Sequence
  derived and/or modified sequence
augccuggcggaaagaaaguggcugguggugguucuucaggggccaccccuacuucggcugccgcaacugcgccaucaggcgugagacgccuugaaacuucugaggggacuucugcccagagagacgaagagcccgaggaggagggggaggaggaucuacgugaugguggugucccauuuuuuguaaaucgcggggggcuaccgguugaugaggccacaugggaaaggauguggaaacaugucgccaaaauccacccagacggagagaaaguugcccaacgcaucagaggcgcuacagaccuaccaaaaauucccauuccuuccgugccuacguuccagccgucaacaccgguaccagaaagacuugaggccguccagcgguacauucgugaacugcaguacaaucacacuggcacccaauucuucgagauuaaaaagagcagaccccucacgggacugauggaccuggcaaaggagaugaccaaggaagcccugccaauuaagugccuggaagcugucauccugggaauguaucccagcucuccagagggcgaaggauccggauuauuaugggcuucugcuagcugcagugaaagugagggcggggugggguag

SEQ ID NO: 293293 - RNA, 615 nt, Artificial Sequence
  derived and/or modified sequence
augccugggggcaaaaaaguugccggcggcgggagcagcggggccacuccaacaagcgcagccgcgacagcccccagcggcgugagaaggcuggagacaucugaaggaacaagugcacagagggaugaagaacccgaggaagagggagaagaggaucugagagauggcggugugccuuucuuugugaauaggggagggcugccggucgaugaggcaacgugggagcgcauguggaaacacguugcaaagauacaccccgacggugaaaaaguagcacagagaauucguggcgccacugaucuaccaaaaauucccauuccuuccgugccuacguuccagccgucaacaccgguaccagaaagacuugaggccguccagcgguacauucgugaacugcaguacaaucacacuggcacccaauucuucgagauuaaaaagagcagaccccucacgggacugauggaccuggcaaaggagaugaccaaggaagcccugccaauuaagugccuggaagcugucauccugggaauguaucccagcucuccagagggcgaaggauccggauuauuaugggcuucugcuagcugcagugaaagugagggaggagugggauag

SEQ ID NO: 293294 - protein, 6824 aa, Artificial Sequence
  derived and/or modified sequence
MASSPELPTEDEQGSWGIDDLHISLQAEQEDTQKKAFTCWINSQLARHTSPSVISDLFTDIKKGHVLLDLLEVLSGQQLPRDKGSNTFQCRINIEHALTFLRNRSIKLINIHVTDIIDGNPSIILGLIWTIILHFHIEKLAQTLSCNYNQPSLDDVSVVDSSPASSPPAKKCSKVQARWQMSARKALLLWAQEQCATYESVNVTDFKSSWRNGMAFLAIIHALRPDLIDMKSVKHRSNKDNLREAFRIAEQELKIPRLLEPEDVDVVDPDEKSIMTYVAQFLQYSKDAPGTGEEAQGKVKDAMGWLTLQKEKLQKLLKDSENDTYFKKYNSLLSFMESFNEEKKSFLDVLSIKRDLDELDKDHLQLREAWDGLDHQINAWKIKLNYALPPPLHQTEAWLQEVEELMDEDLSASQDHSQAVTLIQEKMTLFKSLMDRFEHHSNILLTFENKDENHLPLVPPNKLEEMKRRINNILEKKFILLLEFHYYKCLVLGLVDEVKSKLDIWNIKYGSRESVELLLEDWHKFIEEKEFLARLDTSFQKCGEIYKNLAGECQNINKQYMMVKSDVCMYRKNIYNVKSTLQKVLACWATYVENLRLLRACFEETKKEEIKEVPFETLAQWNLEHATLNEAGNFLVEVSNDVVGSSISKELRRLNKRWRKLVSKTQLEMNLPLMIKKQDQPTFDNSGNILSKEEKATVEFSTDMSVELPENYNQNIKAGEKHEKENEEFTGQLKVAKDVEKLIGQVEIWEAEAKSVLDQDDVDTSMEESLKHLIAKGSMFDELMARSEDMLQMDIQNISSQESFQHVLTTGLQAKIQEAKEKVQINVVKLIAALKNLTDVSPDLDIRLKMEESQKELESYMMRAQQLLGQRESPGELISKHKEALIISNTKSLAKYLKAVEELKNNVTEDIKMSLEEKSRDVCAKWESLHHELSLYVQQLKIDIEKGKLSDNILKLEKQINKEKKLIRRGRTKGLIKEHEACFSEEGCLYQLNHHMEVLRELCEELPSQKSQQEVKRLLKDYEQKIERLLKCASEIHMTLQPTAGGTSKNEGTITTSENRGGDPHSEAPFAKSDNQPSTEKAMEPTMKFSLASVLRPLQEESIMEKDYSASINSLLERYDTYRDILEHHLQNNKFRITSDFSSEEDRSSSCLQAKLTDLQVIKNETDARWKEFEIISLKLENHVNDIKKPFVIKERDTLKERERELQMTLNTRMESLETALRLVLPVEKASLLLCGSDLPLHKMAIQGFHLIDADRIYQHLRNIQDSIAKQIEICNRLEEPGNFVLKELHPFDLHAMQNIILKYKTQFEGMNHRVQRSEDTLKALEDFLASLRTAKLSAEPVTDLSASDTQVAQENTLTVKNKEGEIHLMKDKAKHLDKCLKMLDMSFKDAERGDDTSCENLLDAFSIKLSETHGYGVQEEFTEENKLLEACIFKNNELLKNIQDVQSQISKIGLKDPTVPAVKHRKKSLIRLDKVLDEYEEEKRHLQEMANSLPHFKDGREKTVNQQCQNTVVLWENTKALVTECLEQCGRVLELLKQYQNFKSILTTLIQKEESVISLQASYMGKENLKKRIAEIEIVKEEFNEHLEVVDKINQVCKNLQFYLNKMKTFEEPPFEKEANIIVDRWLDINEKTEDYYENLGRALALWDKLFNLKNVIDEWTEKALQKMELHQLTEEDRERLKEELQVHEQKTSEFSRRVAEIQFLLQSSEIPLELQVMESSILNKMEHVQKCLTGESNCHALSGSTAELREDLDQAKTQIGMTESLLKALSPSDSLEIFTKLEEIQQQILQQKHSMILLENQIGCLTPELSELKKQYESVSDLFNTKKSVLQDHFSKLLNDQCKNFNDWFSNIKVNLKECFESSETKKSVEQKLQKLSDFLTLEGRNSKIKQVDSVLKHVKKHLPKAHVKELISWLVGQEFELEKMESICQARAKELEDSLQQLLRLQDDHRNLRKWLTNQEEKWKGMEEPGEKTELFCQALARKREQFESVAQLNNSLKEYGFTEEEEIIMEATCLMDRYQTLLRQLSEIEEEDKLLPTEDQSFNDLAHDVIHWIKEIKESLMVLNSSEGKMPLEERIQKIKEIILLKPEGDARIETIMKQAESSEAPLVQKTLTDISNQWDNTLHLASTYLSHQEKLLLEGEKYLQSKEDLRLMLIELKKKQEAGFALQHGLQEKKAQLKIYKKFLKKAQDLTSLLKELKSQGNYLLECTKNPSFSEEPWLEIKHLHESLLQQLQDSVQNLDGHVREHDSYQVCVTDLNTTLDNFSKEFVSFSDKPVDQIAVEEKLQKLQELENRLSLQDGTLKKILALAKSVKQNTSSVGQKIIKDDIKSLQCKQKDLENRLASAKQEMECCLNSILKSKRSTEKKGKFTLPGREKQATSDVQESTQESAAVEKLEEDWEINKNFVENVMAVSKNCHHSMYIFESIVKNFISDEMQDSAVEMAMSKQLSLNAQESMKNTEDERKVNELQNQPLELDTMLRNEQLEEIEKLYTQLEAKKAAIKPLEQTECLNKTETGALVLHNIGYSAQHLDNLLQALITLKKNKESQYCVLRDFQEYLAAVESSMKALLTDKESLKVGPLDSVTYLDKIKKFIASIEKEKDSLGNLKIKWENLSNHVTDMDKKLLESQIKQLEHGWEQVEQQIQKKYSQQVVEYDEFTTLMNKVQDTEISLQQQQQHLQLRLKSPEERAGNQSMIALTTDLQATKHGFSVLKGQAELQMKRIWGEKEKKNLEDGINNLKKQWETLEPLHLEAENQIKKCDIRNKMKETILWAKNLLGELNPSIPLLPDDILSQIRKCKVTHDGILARQQSVESLAEEVKDKVPSLTTYEGSDLNNTLEDLRNQYQMLVLKSTQRSQQLEFKLEERSNFFAIIRKFQLMVQESETLIIPRVETAATEAELKHHHVTLEASQKELQEIDSGISTHLQELTNIYEELNVFERLFLEDQLKNLKIRTNRIQRFIQNTCNEVEHKIKFCRQFHEKTSALQEEADSIQRNELLLNQEVNKGVKEEIYNLKDRLTAIKCCILQVLKLKKVFDYIGLNWDFSQLDQLQTQVFEKEKELEEKIKQLDTFEEEHGKYQALLSKMRAIDLQIKKMTEVVLKAPDSSPESRRLNAQILSQRIEKAKCLCDEIIKKLNENKTFDDSFKEKEILQIKLNAEENDKLYKVLQNMVLELSPKELDEKNCQDKLETSLHVLNQIKSQLQQPLLINLEIKHIQNEKDNCEAFQEQVWAEMCSIKAVTAIEKQREENSSEASDVETKLREFEDLQMQLNTSIDLRTNVLNDAYENLTRYKEAVTRAVESITSLEAIIIPYRVDVGNPEESLEMPLRKQEELESTVAHIQDLTEKLGMISSPEAKLQLQYTLQELVSKNSAMKEAFKAQETEAERYLENYKCYRKMEEDIYTNLSKMETVLGQSMSSLPLSYREALERLEQSKALVSNLISTKEELMKLRQILRLLRLRCTENDGICLLKIVSALWEKWLSLLEAAKEWEMWCEELKQEWKFVSEEIEREAIILDNLQEELPEISKTKEAATTEELSELLDCLCQYGENVEKQQLLLTLLLQRIRSIQNVPESSGAVETVPAFQEITSMKERCNKLLQKVQKNKELVQTEIQERHSFTKEIIALKNFFQQTTTSFQNMAFQDHPEKSEQFEELQSILKKGKLTFENIMEKLRIKYSEMYTIVPAEIESQVEECRKALEDIDEKISNEVLKSSPSYAMRRKIEEINNGLHNVEKMLQQKSKNIEKAQEIQKKMWDELDLWHSKLNELDSEVQDIVEQDPGQAQEWMDNLMIPFQQYQQVSQRAECRTSQLNKATVKMEEYSDLLKSTEAWIENTSHLLANPADYDSLRTLSHHASTVQMALEDSEQKHNLLHSIFMDLEDLSIIFETDELTQSIQELSNQVTALQQKIMESLPQIQRMADDVVAIESEVKSMEKRVSKIKTILLSKEIFDFSPEEHLKHGEVILENIRPMKKTIAEIVSYQVELRLPQTGMKPLPVFQRTNQLLQDIKLLENVTQEQNELLKVVIKQTNEWDEEIENLKQILNNYSAQFSLEHMSPDQADKLPQLQGEIERMEKQILSLNQRKEDLLVDLKATVLNLHQHLKQEQEGVERDRLPAVTSEEGGVAERDASERKLNRRGSMSYLAAVEEEVEESSVKSDHDKDMEEDRASSSSGTIVQEAYGKISTSDNSMAQILTPDSLNTEQGPECSLRPNQTEEGTTPPIEADTLDSSDAQGGLEPRVEKTRPEPTEVLHACKTQVAELELWLQQANVAVEPETLNADMQQVLEQQLVGCQAMLTEIEHKVAFLLETCKDQGLGDNGATQHEAEALSLKLKTVKCNLEKVQMMLQEKHSEDQHPTILKKSSEPEHQEALQPVNLSELESIVTERPQFSRQKDFQQQQVLELKPMEQKDFIKFIEFNAKKMWPQYCQHDNDTTQESSARYPTTEELKTYTTQLEDLRQEASNLQTQENMTEEAYINLDKKLFELFLTLSQCLSSVEEMLEMPRLYREDGSGQQVHYETLALELKKLYLALSDKKGDLLKAMTWPGENTNLLLECFDNLQVCLEHTQAAAVCRSKSLKAGLDYNRSYQKADAYTVELENAESRVAKLRDEGERLHLPYALLQEVYKLEDVLDSMWGMLRARYTELSSPFVTESQQDALLQGMVELVKIGKEKLAHGHLKQTKSKVALQAQIENHKVFFQKLVADMLLIQAYSAKILPSLLQNRETFWAEQVTEVKILEEKSRQCGMKLQSLLQKWEEFDENYASLEKDLEILISTLPSVSLVEETEERLVERISFYQQIKRNIGGKHARLYQTLNEGKQLVASVSCPELEGQIAKLEEQWLSLNKKIDHELHRLQALLKHLLRSAFLGVYNRDSDQLTKWLESSQHTLNYWKEQSLNVSQDLDTIRSNINNFFEFSKEVDEKSSLKTAVISIGNQLLHLKETDTATLRASLAQFEQKWTMLITQLPDIQEKLHQLQMEKLPSRKAITEMISWMNNVEHQTSDEDSVHSPSSASQVKHLLQKHKEFRMEMDYKQWIVDFVNQSLLQLSTCDVESKRYERTEFAEHLGEMNRQWHRVHGMLNRKIQHLEQLLESITESENKIQILNNWLEAQEERLKTLQKPESVISVQKLLLDCQDIENQLAIKSKALDELKQSYLTLESGAVPLLEDTASRIDELFQKRSSVLTQVNQLKTSMQSVLQEWKIYDQLYDEVNMMTIRFWYCMEHSKPVVLSLETLRCQVENLQSLQDEAESSEGSWEKLQEVIGKLKGLCPSVAEIIEEKCQNTHKRWTQVNQAIADQLQKAQSLLQLWKAYSNAHGEAAARLKQQEAKFQQLANISMSGNNLAEILPPALQDIKELQHDVQKTKEAFLQNSSVLDRLPQPAESSTHMLLPGPLHSLQRAAYLEKMLLVKANEFENHVLALTAQSPDIEHLNEVSLKLPLSDVAVKTLQNMNRQWIRATATALERCSELQGIGLNEKFLYCCEKWIQLLEKIEEALKVDVANSLPELLEQQKTYKMLEAEVSINQTIADSYVTQSLQLLDTTEIENRPEFITEFSKLTDRWQNAVQGVRQRKGDVDGLNAHVARCGGASLKKQDLRYSLHTACGAALLCRSSHGANKEIHFQRRRTTCALTLEAGEKLLLTTDLKTKESVGRRISQLQDSWKDMEPQLAEMIKQFQSTVETWDQCEKKIKELKSRLQVLKAQSEDPLPELHEDLHNEKELIKVAIRKQEIEDRLNTWVVFNEKNKELCAWLVQMENKVLQTADISIEEMIEKLQKRTVGREEVPERWECETIVSGHGTEESCFLSIRKFHQGRGLHILTCQLIPQDCMEEINLFSENKLQLKQMGDQLIKASNKSRAAEIDDKLNKINDRWQHLFDVIGSSMADQTNSRWMFFQWPRGIQRTVTWPWDHLCSCASTGHTGPFHSSVLRCFEQHIEFGIYRRTYKVNKELGGDKNGQRCPIIYPHGLVQCIRLGEPLILKRVKKLKETFAFIQQLDKNMSNLRTWLARIESELSKPVVYDVCDDQEIQKRLAEQQDLQRDIEQHSAGVESVFNICDVLLHDSDACANETECDSIQQTTRSLDRRWRNICAMSMERRMKIEETWRLWQKFLDDYSRFEDWLKSAERTAACPNSSEVLYTSAKEELKRFERQIHERLTQLELINKQYRRLARENRTDTASRLKQMVHEGNQRWDNLQRRVTAVLRRLRHFTNQREEFEGTRESILVWLTEMDLQLTNVEHFSESDADDKMRQLNGFQQEITLNTNKIDQLIVFGEQLIQKSEPLDAVLIEDELEELHRYCQEGLEDEKEASENETDMEDPREIQTDSWRKRGESEEPSSPQSLCHLVAPGHERSGCETPVSVDSIPLEWDHTGDVGGSSSHEEDEEGPYYSALSGKSISDGHSWHVPDSPSCPEHHYKQMEGDRNVPPVPPASSTPYKPPYVSLNFTGSTAYVCAFDRWEMIQAQELHNKLKIKQNLQQLNSDISAITTWLKKTEAELEMLKMAKPPSDIQEIELRVKRLQEILKAFDTYKALVVSVNVSSKEFLQTESPESTELQSRLRQLSLLWEAAQGAVDSWRGGLRQSLMQCQDFHQLSQNLLLWLASAKNRRQKAHVTDPKADPRALLECRRELMQLEKELVERQPQVDMLQEISNSLLIKGHGEDCIEAEEKVHVIEKKLKQLREQVSQDLMALQGTQNPASPLPSFDEVDSGDQPPATSVPAPRAKFLYPAVQSSENYRRRGGDREQGPRQHTATALLPLKGGPGSPTPAAAPPAAAAPGLPAALLRRRLQLHSGQQLCPVLLPHAEVHQWATPHIEGIAGHSATPPA

SEQ ID NO: 293295 - DNA, 20475 bp, Artificial Sequence
  derived and/or modified sequence
atggccagcagccccgagctgcccaccgaggacgagcagggcagctggggcatcgacgacctgcacatcagcctgcaggccgagcaggaggacacccagaagaaggccttcacctgctggatcaacagccagctggccagacacaccagccccagcgtgatcagcgacctgttcaccgacatcaagaagggccacgtgctgctggacctgctggaggtgctgagcggccagcagctgcccagagacaagggcagcaacaccttccagtgcagaatcaacatcgagcacgccctgaccttcctgagaaacagaagcatcaagctgatcaacatccacgtgaccgacatcatcgacggcaaccccagcatcatcctgggcctgatctggaccatcatcctgcacttccacatcgagaagctggcccagaccctgagctgcaactacaaccagcccagcctggacgacgtgagcgtggtggacagcagccccgccagcagcccccccgccaagaagtgcagcaaggtgcaggccagatggcagatgagcgccagaaaggccctgctgctgtgggcccaggagcagtgcgccacctacgagagcgtgaacgtgaccgacttcaagagcagctggagaaacggcatggccttcctggccatcatccacgccctgagacccgacctgatcgacatgaagagcgtgaagcacagaagcaacaaggacaacctgagagaggccttcagaatcgccgagcaggagctgaagatccccagactgctggagcccgaggacgtggacgtggtggaccccgacgagaagagcatcatgacctacgtggcccagttcctgcagtacagcaaggacgcccccggcaccggcgaggaggcccagggcaaggtgaaggacgccatgggctggctgaccctgcagaaggagaagctgcagaagctgctgaaggacagcgagaacgacacctacttcaagaagtacaacagcctgctgagcttcatggagagcttcaacgaggagaagaagagcttcctggacgtgctgagcatcaagagagacctggacgagctggacaaggaccacctgcagctgagagaggcctgggacggcctggaccaccagatcaacgcctggaagatcaagctgaactacgccctgcccccccccctgcaccagaccgaggcctggctgcaggaggtggaggagctgatggacgaggacctgagcgccagccaggaccacagccaggccgtgaccctgatccaggagaagatgaccctgttcaagagcctgatggacagattcgagcaccacagcaacatcctgctgaccttcgagaacaaggacgagaaccacctgcccctggtgccccccaacaagctggaggagatgaagagaagaatcaacaacatcctggagaagaagttcatcctgctgctggagttccactactacaagtgcctggtgctgggcctggtggacgaggtgaagagcaagctggacatctggaacatcaagtacggcagcagagagagcgtggagctgctgctggaggactggcacaagttcatcgaggagaaggagttcctggccagactggacaccagcttccagaagtgcggcgagatctacaagaacctggccggcgagtgccagaacatcaacaagcagtacatgatggtgaagagcgacgtgtgcatgtacagaaagaacatctacaacgtgaagagcaccctgcagaaggtgctggcctgctgggccacctacgtggagaacctgagactgctgagagcctgcttcgaggagaccaagaaggaggagatcaaggaggtgcccttcgagaccctggcccagtggaacctggagcacgccaccctgaacgaggccggcaacttcctggtggaggtgagcaacgacgtggtgggcagcagcatcagcaaggagctgagaagactgaacaagagatggagaaagctggtgagcaagacccagctggagatgaacctgcccctgatgatcaagaagcaggaccagcccaccttcgacaacagcggcaacatcctgagcaaggaggagaaggccaccgtggagttcagcaccgacatgagcgtggagctgcccgagaactacaaccagaacatcaaggccggcgagaagcacgagaaggagaacgaggagttcaccggccagctgaaggtggccaaggacgtggagaagctgatcggccaggtggagatctgggaggccgaggccaagagcgtgctggaccaggacgacgtggacaccagcatggaggagagcctgaagcacctgatcgccaagggcagcatgttcgacgagctgatggccagaagcgaggacatgctgcagatggacatccagaacatcagcagccaggagagcttccagcacgtgctgaccaccggcctgcaggccaagatccaggaggccaaggagaaggtgcagatcaacgtggtgaagctgatcgccgccctgaagaacctgaccgacgtgagccccgacctggacatcagactgaagatggaggagagccagaaggagctggagagctacatgatgagagcccagcagctgctgggccagagagagagccccggcgagctgatcagcaagcacaaggaggccctgatcatcagcaacaccaagagcctggccaagtacctgaaggccgtggaggagctgaagaacaacgtgaccgaggacatcaagatgagcctggaggagaagagcagagacgtgtgcgccaagtgggagagcctgcaccacgagctgagcctgtacgtgcagcagctgaagatcgacatcgagaagggcaagctgagcgacaacatcctgaagctggagaagcagatcaacaaggagaagaagctgatcagaagaggcagaaccaagggcctgatcaaggagcacgaggcctgcttcagcgaggagggctgcctgtaccagctgaaccaccacatggaggtgctgagagagctgtgcgaggagctgcccagccagaagagccagcaggaggtgaagagactgctgaaggactacgagcagaagatcgagagactgctgaagtgcgccagcgagatccacatgaccctgcagcccaccgccggcggcaccagcaagaacgagggcaccatcaccaccagcgagaacagaggcggcgacccccacagcgaggcccccttcgccaagagcgacaaccagcccagcaccgagaaggccatggagcccaccatgaagttcagcctggccagcgtgctgagacccctgcaggaggagagcatcatggagaaggactacagcgccagcatcaacagcctgctggagagatacgacacctacagagacatcctggagcaccacctgcagaacaacaagttcagaatcaccagcgacttcagcagcgaggaggacagaagcagcagctgcctgcaggccaagctgaccgacctgcaggtgatcaagaacgagaccgacgccagatggaaggagttcgagatcatcagcctgaagctggagaaccacgtgaacgacatcaagaagcccttcgtgatcaaggagagagacaccctgaaggagagagagagagagctgcagatgaccctgaacaccagaatggagagcctggagaccgccctgagactggtgctgcccgtggagaaggccagcctgctgctgtgcggcagcgacctgcccctgcacaagatggccatccagggcttccacctgatcgacgccgacagaatctaccagcacctgagaaacatccaggacagcatcgccaagcagatcgagatctgcaacagactggaggagcccggcaacttcgtgctgaaggagctgcaccccttcgacctgcacgccatgcagaacatcatcctgaagtacaagacccagttcgagggcatgaaccacagagtgcagagaagcgaggacaccctgaaggccctggaggacttcctggccagcctgagaaccgccaagctgagcgccgagcccgtgaccgacctgagcgccagcgacacccaggtggcccaggagaacaccctgaccgtgaagaacaaggagggcgagatccacctgatgaaggacaaggccaagcacctggacaagtgcctgaagatgctggacatgagcttcaaggacgccgagagaggcgacgacaccagctgcgagaacctgctggacgccttcagcatcaagctgagcgagacccacggctacggcgtgcaggaggagttcaccgaggagaacaagctgctggaggcctgcatcttcaagaacaacgagctgctgaagaacatccaggacgtgcagagccagatcagcaagatcggcctgaaggaccccaccgtgcccgccgtgaagcacagaaagaagagcctgatcagactggacaaggtgctggacgagtacgaggaggagaagagacacctgcaggagatggccaacagcctgccccacttcaaggacggcagagagaagaccgtgaaccagcagtgccagaacaccgtggtgctgtgggagaacaccaaggccctggtgaccgagtgcctggagcagtgcggcagagtgctggagctgctgaagcagtaccagaacttcaagagcatcctgaccaccctgatccagaaggaggagagcgtgatcagcctgcaggccagctacatgggcaaggagaacctgaagaagagaatcgccgagatcgagatcgtgaaggaggagttcaacgagcacctggaggtggtggacaagatcaaccaggtgtgcaagaacctgcagttctacctgaacaagatgaagaccttcgaggagccccccttcgagaaggaggccaacatcatcgtggacagatggctggacatcaacgagaagaccgaggactactacgagaacctgggcagagccctggccctgtgggacaagctgttcaacctgaagaacgtgatcgacgagtggaccgagaaggccctgcagaagatggagctgcaccagctgaccgaggaggacagagagagactgaaggaggagctgcaggtgcacgagcagaagaccagcgagttcagcagaagagtggccgagatccagttcctgctgcagagcagcgagatccccctggagctgcaggtgatggagagcagcatcctgaacaagatggagcacgtgcagaagtgcctgaccggcgagagcaactgccacgccctgagcggcagcaccgccgagctgagagaggacctggaccaggccaagacccagatcggcatgaccgagagcctgctgaaggccctgagccccagcgacagcctggagatcttcaccaagctggaggagatccagcagcagatcctgcagcagaagcacagcatgatcctgctggagaaccagatcggctgcctgacccccgagctgagcgagctgaagaagcagtacgagagcgtgagcgacctgttcaacaccaagaagagcgtgctgcaggaccacttcagcaagctgctgaacgaccagtgcaagaacttcaacgactggttcagcaacatcaaggtgaacctgaaggagtgcttcgagagcagcgagaccaagaagagcgtggagcagaagctgcagaagctgagcgacttcctgaccctggagggcagaaacagcaagatcaagcaggtggacagcgtgctgaagcacgtgaagaagcacctgcccaaggcccacgtgaaggagctgatcagctggctggtgggccaggagttcgagctggagaagatggagagcatctgccaggccagagccaaggagctggaggacagcctgcagcagctgctgagactgcaggacgaccacagaaacctgagaaagtggctgaccaaccaggaggagaagtggaagggcatggaggagcccggcgagaagaccgagctgttctgccaggccctggccagaaagagagagcagttcgagagcgtggcccagctgaacaacagcctgaaggagtacggcttcaccgaggaggaggagatcatcatggaggccacctgcctgatggacagataccagaccctgctgagacagctgagcgagatcgaggaggaggacaagctgctgcccaccgaggaccagagcttcaacgacctggcccacgacgtgatccactggatcaaggagatcaaggagagcctgatggtgctgaacagcagcgagggcaagatgcccctggaggagagaatccagaagatcaaggagatcatcctgctgaagcccgagggcgacgccagaatcgagaccatcatgaagcaggccgagagcagcgaggcccccctggtgcagaagaccctgaccgacatcagcaaccagtgggacaacaccctgcacctggccagcacctacctgagccaccaggagaagctgctgctggagggcgagaagtacctgcagagcaaggaggacctgagactgatgctgatcgagctgaagaagaagcaggaggccggcttcgccctgcagcacggcctgcaggagaagaaggcccagctgaagatctacaagaagttcctgaagaaggcccaggacctgaccagcctgctgaaggagctgaagagccagggcaactacctgctggagtgcaccaagaaccccagcttcagcgaggagccctggctggagatcaagcacctgcacgagagcctgctgcagcagctgcaggacagcgtgcagaacctggacggccacgtgagagagcacgacagctaccaggtgtgcgtgaccgacctgaacaccaccctggacaacttcagcaaggagttcgtgagcttcagcgacaagcccgtggaccagatcgccgtggaggagaagctgcagaagctgcaggagctggagaacagactgagcctgcaggacggcaccctgaagaagatcctggccctggccaagagcgtgaagcagaacaccagcagcgtgggccagaagatcatcaaggacgacatcaagagcctgcagtgcaagcagaaggacctggagaacagactggccagcgccaagcaggagatggagtgctgcctgaacagcatcctgaagagcaagagaagcaccgagaagaagggcaagttcaccctgcccggcagagagaagcaggccaccagcgacgtgcaggagagcacccaggagagcgccgccgtggagaagctggaggaggactgggagatcaacaagaacttcgtggagaacgtgatggccgtgagcaagaactgccaccacagcatgtacatcttcgagagcatcgtgaagaacttcatcagcgacgagatgcaggacagcgccgtggagatggccatgagcaagcagctgagcctgaacgcccaggagagcatgaagaacaccgaggacgagagaaaggtgaacgagctgcagaaccagcccctggagctggacaccatgctgagaaacgagcagctggaggagatcgagaagctgtacacccagctggaggccaagaaggccgccatcaagcccctggagcagaccgagtgcctgaacaagaccgagaccggcgccctggtgctgcacaacatcggctacagcgcccagcacctggacaacctgctgcaggccctgatcaccctgaagaagaacaaggagagccagtactgcgtgctgagagacttccaggagtacctggccgccgtggagagcagcatgaaggccctgctgaccgacaaggagagcctgaaggtgggccccctggacagcgtgacctacctggacaagatcaagaagttcatcgccagcatcgagaaggagaaggacagcctgggcaacctgaagatcaagtgggagaacctgagcaaccacgtgaccgacatggacaagaagctgctggagagccagatcaagcagctggagcacggctgggagcaggtggagcagcagatccagaagaagtacagccagcaggtggtggagtacgacgagttcaccaccctgatgaacaaggtgcaggacaccgagatcagcctgcagcagcagcagcagcacctgcagctgagactgaagagccccgaggagagagccggcaaccagagcatgatcgccctgaccaccgacctgcaggccaccaagcacggcttcagcgtgctgaagggccaggccgagctgcagatgaagagaatctggggcgagaaggagaagaagaacctggaggacggcatcaacaacctgaagaagcagtgggagaccctggagcccctgcacctggaggccgagaaccagatcaagaagtgcgacatcagaaacaagatgaaggagaccatcctgtgggccaagaacctgctgggcgagctgaaccccagcatccccctgctgcccgacgacatcctgagccagatcagaaagtgcaaggtgacccacgacggcatcctggccagacagcagagcgtggagagcctggccgaggaggtgaaggacaaggtgcccagcctgaccacctacgagggcagcgacctgaacaacaccctggaggacctgagaaaccagtaccagatgctggtgctgaagagcacccagagaagccagcagctggagttcaagctggaggagagaagcaacttcttcgccatcatcagaaagttccagctgatggtgcaggagagcgagaccctgatcatccccagagtggagaccgccgccaccgaggccgagctgaagcaccaccacgtgaccctggaggccagccagaaggagctgcaggagatcgacagcggcatcagcacccacctgcaggagctgaccaacatctacgaggagctgaacgtgttcgagagactgttcctggaggaccagctgaagaacctgaagatcagaaccaacagaatccagagattcatccagaacacctgcaacgaggtggagcacaagatcaagttctgcagacagttccacgagaagaccagcgccctgcaggaggaggccgacagcatccagagaaacgagctgctgctgaaccaggaggtgaacaagggcgtgaaggaggagatctacaacctgaaggacagactgaccgccatcaagtgctgcatcctgcaggtgctgaagctgaagaaggtgttcgactacatcggcctgaactgggacttcagccagctggaccagctgcagacccaggtgttcgagaaggagaaggagctggaggagaagatcaagcagctggacaccttcgaggaggagcacggcaagtaccaggccctgctgagcaagatgagagccatcgacctgcagatcaagaagatgaccgaggtggtgctgaaggcccccgacagcagccccgagagcagaagactgaacgcccagatcctgagccagagaatcgagaaggccaagtgcctgtgcgacgagatcatcaagaagctgaacgagaacaagaccttcgacgacagcttcaaggagaaggagatcctgcagatcaagctgaacgccgaggagaacgacaagctgtacaaggtgctgcagaacatggtgctggagctgagccccaaggagctggacgagaagaactgccaggacaagctggagaccagcctgcacgtgctgaaccagatcaagagccagctgcagcagcccctgctgatcaacctggagatcaagcacatccagaacgagaaggacaactgcgaggccttccaggagcaggtgtgggccgagatgtgcagcatcaaggccgtgaccgccatcgagaagcagagagaggagaacagcagcgaggccagcgacgtggagaccaagctgagagagttcgaggacctgcagatgcagctgaacaccagcatcgacctgagaaccaacgtgctgaacgacgcctacgagaacctgaccagatacaaggaggccgtgaccagagccgtggagagcatcaccagcctggaggccatcatcatcccctacagagtggacgtgggcaaccccgaggagagcctggagatgcccctgagaaagcaggaggagctggagagcaccgtggcccacatccaggacctgaccgagaagctgggcatgatcagcagccccgaggccaagctgcagctgcagtacaccctgcaggagctggtgagcaagaacagcgccatgaaggaggccttcaaggcccaggagaccgaggccgagagatacctggagaactacaagtgctacagaaagatggaggaggacatctacaccaacctgagcaagatggagaccgtgctgggccagagcatgagcagcctgcccctgagctacagagaggccctggagagactggagcagagcaaggccctggtgagcaacctgatcagcaccaaggaggagctgatgaagctgagacagatcctgagactgctgagactgagatgcaccgagaacgacggcatctgcctgctgaagatcgtgagcgccctgtgggagaagtggctgagcctgctggaggccgccaaggagtgggagatgtggtgcgaggagctgaagcaggagtggaagttcgtgagcgaggagatcgagagagaggccatcatcctggacaacctgcaggaggagctgcccgagatcagcaagaccaaggaggccgccaccaccgaggagctgagcgagctgctggactgcctgtgccagtacggcgagaacgtggagaagcagcagctgctgctgaccctgctgctgcagagaatcagaagcatccagaacgtgcccgagagcagcggcgccgtggagaccgtgcccgccttccaggagatcaccagcatgaaggagagatgcaacaagctgctgcagaaggtgcagaagaacaaggagctggtgcagaccgagatccaggagagacacagcttcaccaaggagatcatcgccctgaagaacttcttccagcagaccaccaccagcttccagaacatggccttccaggaccaccccgagaagagcgagcagttcgaggagctgcagagcatcctgaagaagggcaagctgaccttcgagaacatcatggagaagctgagaatcaagtacagcgagatgtacaccatcgtgcccgccgagatcgagagccaggtggaggagtgcagaaaggccctggaggacatcgacgagaagatcagcaacgaggtgctgaagagcagccccagctacgccatgagaagaaagatcgaggagatcaacaacggcctgcacaacgtggagaagatgctgcagcagaagagcaagaacatcgagaaggcccaggagatccagaagaagatgtgggacgagctggacctgtggcacagcaagctgaacgagctggacagcgaggtgcaggacatcgtggagcaggaccccggccaggcccaggagtggatggacaacctgatgatccccttccagcagtaccagcaggtgagccagagagccgagtgcagaaccagccagctgaacaaggccaccgtgaagatggaggagtacagcgacctgctgaagagcaccgaggcctggatcgagaacaccagccacctgctggccaaccccgccgactacgacagcctgagaaccctgagccaccacgccagcaccgtgcagatggccctggaggacagcgagcagaagcacaacctgctgcacagcatcttcatggacctggaggacctgagcatcatcttcgagaccgacgagctgacccagagcatccaggagctgagcaaccaggtgaccgccctgcagcagaagatcatggagagcctgccccagatccagagaatggccgacgacgtggtggccatcgagagcgaggtgaagagcatggagaagagagtgagcaagatcaagaccatcctgctgagcaaggagatcttcgacttcagccccgaggagcacctgaagcacggcgaggtgatcctggagaacatcagacccatgaagaagaccatcgccgagatcgtgagctaccaggtggagctgagactgccccagaccggcatgaagcccctgcccgtgttccagagaaccaaccagctgctgcaggacatcaagctgctggagaacgtgacccaggagcagaacgagctgctgaaggtggtgatcaagcagaccaacgagtgggacgaggagatcgagaacctgaagcagatcctgaacaactacagcgcccagttcagcctggagcacatgagccccgaccaggccgacaagctgccccagctgcagggcgagatcgagagaatggagaagcagatcctgagcctgaaccagagaaaggaggacctgctggtggacctgaaggccaccgtgctgaacctgcaccagcacctgaagcaggagcaggagggcgtggagagagacagactgcccgccgtgaccagcgaggagggcggcgtggccgagagagacgccagcgagagaaagctgaacagaagaggcagcatgagctacctggccgccgtggaggaggaggtggaggagagcagcgtgaagagcgaccacgacaaggacatggaggaggacagagccagcagcagcagcggcaccatcgtgcaggaggcctacggcaagatcagcaccagcgacaacagcatggcccagatcctgacccccgacagcctgaacaccgagcagggccccgagtgcagcctgagacccaaccagaccgaggagggcaccaccccccccatcgaggccgacaccctggacagcagcgacgcccagggcggcctggagcccagagtggagaagaccagacccgagcccaccgaggtgctgcacgcctgcaagacccaggtggccgagctggagctgtggctgcagcaggccaacgtggccgtggagcccgagaccctgaacgccgacatgcagcaggtgctggagcagcagctggtgggctgccaggccatgctgaccgagatcgagcacaaggtggccttcctgctggagacctgcaaggaccagggcctgggcgacaacggcgccacccagcacgaggccgaggccctgagcctgaagctgaagaccgtgaagtgcaacctggagaaggtgcagatgatgctgcaggagaagcacagcgaggaccagcaccccaccatcctgaagaagagcagcgagcccgagcaccaggaggccctgcagcccgtgaacctgagcgagctggagagcatcgtgaccgagagaccccagttcagcagacagaaggacttccagcagcagcaggtgctggagctgaagcccatggagcagaaggacttcatcaagttcatcgagttcaacgccaagaagatgtggccccagtactgccagcacgacaacgacaccacccaggagagcagcgccagataccccaccaccgaggagctgaagacctacaccacccagctggaggacctgagacaggaggccagcaacctgcagacccaggagaacatgaccgaggaggcctacatcaacctggacaagaagctgttcgagctgttcctgaccctgagccagtgcctgagcagcgtggaggagatgctggagatgcccagactgtacagagaggacggcagcggccagcaggtgcactacgagaccctggccctggagctgaagaagctgtacctggccctgagcgacaagaagggcgacctgctgaaggccatgacctggcccggcgagaacaccaacctgctgctggagtgcttcgacaacctgcaggtgtgcctggagcacacccaggccgccgccgtgtgcagaagcaagagcctgaaggccggcctggactacaacagaagctaccagaaggccgacgcctacaccgtggagctggagaacgccgagagcagagtggccaagctgagagacgagggcgagagactgcacctgccctacgccctgctgcaggaggtgtacaagctggaggacgtgctggacagcatgtggggcatgctgagagccagatacaccgagctgagcagccccttcgtgaccgagagccagcaggacgccctgctgcagggcatggtggagctggtgaagatcggcaaggagaagctggcccacggccacctgaagcagaccaagagcaaggtggccctgcaggcccagatcgagaaccacaaggtgttcttccagaagctggtggccgacatgctgctgatccaggcctacagcgccaagatcctgcccagcctgctgcagaacagagagaccttctgggccgagcaggtgaccgaggtgaagatcctggaggagaagagcagacagtgcggcatgaagctgcagagcctgctgcagaagtgggaggagttcgacgagaactacgccagcctggagaaggacctggagatcctgatcagcaccctgcccagcgtgagcctggtggaggagaccgaggagagactggtggagagaatcagcttctaccagcagatcaagagaaacatcggcggcaagcacgccagactgtaccagaccctgaacgagggcaagcagctggtggccagcgtgagctgccccgagctggagggccagatcgccaagctggaggagcagtggctgagcctgaacaagaagatcgaccacgagctgcacagactgcaggccctgctgaagcacctgctgagaagcgccttcctgggcgtgtacaacagagacagcgaccagctgaccaagtggctggagagcagccagcacaccctgaactactggaaggagcagagcctgaacgtgagccaggacctggacaccatcagaagcaacatcaacaacttcttcgagttcagcaaggaggtggacgagaagagcagcctgaagaccgccgtgatcagcatcggcaaccagctgctgcacctgaaggagaccgacaccgccaccctgagagccagcctggcccagttcgagcagaagtggaccatgctgatcacccagctgcccgacatccaggagaagctgcaccagctgcagatggagaagctgcccagcagaaaggccatcaccgagatgatcagctggatgaacaacgtggagcaccagaccagcgacgaggacagcgtgcacagccccagcagcgccagccaggtgaagcacctgctgcagaagcacaaggagttcagaatggagatggactacaagcagtggatcgtggacttcgtgaaccagagcctgctgcagctgagcacctgcgacgtggagagcaagagatacgagagaaccgagttcgccgagcacctgggcgagatgaacagacagtggcacagagtgcacggcatgctgaacagaaagatccagcacctggagcagctgctggagagcatcaccgagagcgagaacaagatccagatcctgaacaactggctggaggcccaggaggagagactgaagaccctgcagaagcccgagagcgtgatcagcgtgcagaagctgctgctggactgccaggacatcgagaaccagctggccatcaagagcaaggccctggacgagctgaagcagagctacctgaccctggagagcggcgccgtgcccctgctggaggacaccgccagcagaatcgacgagctgttccagaagagaagcagcgtgctgacccaggtgaaccagctgaagaccagcatgcagagcgtgctgcaggagtggaagatctacgaccagctgtacgacgaggtgaacatgatgaccatcagattctggtactgcatggagcacagcaagcccgtggtgctgagcctggagaccctgagatgccaggtggagaacctgcagagcctgcaggacgaggccgagagcagcgagggcagctgggagaagctgcaggaggtgatcggcaagctgaagggcctgtgccccagcgtggccgagatcatcgaggagaagtgccagaacacccacaagagatggacccaggtgaaccaggccatcgccgaccagctgcagaaggcccagagcctgctgcagctgtggaaggcctacagcaacgcccacggcgaggccgccgccagactgaagcagcaggaggccaagttccagcagctggccaacatcagcatgagcggcaacaacctggccgagatcctgccccccgccctgcaggacatcaaggagctgcagcacgacgtgcagaagaccaaggaggccttcctgcagaacagcagcgtgctggacagactgccccagcccgccgagagcagcacccacatgctgctgcccggccccctgcacagcctgcagagagccgcctacctggagaagatgctgctggtgaaggccaacgagttcgagaaccacgtgctggccctgaccgcccagagccccgacatcgagcacctgaacgaggtgagcctgaagctgcccctgagcgacgtggccgtgaagaccctgcagaacatgaacagacagtggatcagagccaccgccaccgccctggagagatgcagcgagctgcagggcatcggcctgaacgagaagttcctgtactgctgcgagaagtggatccagctgctggagaagatcgaggaggccctgaaggtggacgtggccaacagcctgcccgagctgctggagcagcagaagacctacaagatgctggaggccgaggtgagcatcaaccagaccatcgccgacagctacgtgacccagagcctgcagctgctggacaccaccgagatcgagaacagacccgagttcatcaccgagttcagcaagctgaccgacagatggcagaacgccgtgcagggcgtgagacagagaaagggcgacgtggacggcctgaacgcccacgtggccagatgcggcggcgccagcctgaagaagcaggacctgagatacagcctgcacaccgcctgcggcgccgccctgctgtgcagaagcagccacggcgccaacaaggagatccacttccagagaagaagaaccacctgcgccctgaccctggaggccggcgagaagctgctgctgaccaccgacctgaagaccaaggagagcgtgggcagaagaatcagccagctgcaggacagctggaaggacatggagccccagctggccgagatgatcaagcagttccagagcaccgtggagacctgggaccagtgcgagaagaagatcaaggagctgaagagcagactgcaggtgctgaaggcccagagcgaggaccccctgcccgagctgcacgaggacctgcacaacgagaaggagctgatcaaggtggccatcagaaagcaggagatcgaggacagactgaacacctgggtggtgttcaacgagaagaacaaggagctgtgcgcctggctggtgcagatggagaacaaggtgctgcagaccgccgacatcagcatcgaggagatgatcgagaagctgcagaagagaaccgtgggcagagaggaggtgcccgagagatgggagtgcgagaccatcgtgagcggccacggcaccgaggagagctgcttcctgagcatcagaaagttccaccagggcagaggcctgcacatcctgacctgccagctgatcccccaggactgcatggaggagatcaacctgttcagcgagaacaagctgcagctgaagcagatgggcgaccagctgatcaaggccagcaacaagagcagagccgccgagatcgacgacaagctgaacaagatcaacgacagatggcagcacctgttcgacgtgatcggcagcagcatggccgaccagaccaacagcagatggatgttcttccagtggcccagaggcatccagagaaccgtgacctggccctgggaccacctgtgcagctgcgccagcaccggccacaccggccccttccacagcagcgtgctgagatgcttcgagcagcacatcgagttcggcatctacagaagaacctacaaggtgaacaaggagctgggcggcgacaagaacggccagagatgccccatcatctacccccacggcctggtgcagtgcatcagactgggcgagcccctgatcctgaagagagtgaagaagctgaaggagaccttcgccttcatccagcagctggacaagaacatgagcaacctgagaacctggctggccagaatcgagagcgagctgagcaagcccgtggtgtacgacgtgtgcgacgaccaggagatccagaagagactggccgagcagcaggacctgcagagagacatcgagcagcacagcgccggcgtggagagcgtgttcaacatctgcgacgtgctgctgcacgacagcgacgcctgcgccaacgagaccgagtgcgacagcatccagcagaccaccagaagcctggacagaagatggagaaacatctgcgccatgagcatggagagaagaatgaagatcgaggagacctggagactgtggcagaagttcctggacgactacagcagattcgaggactggctgaagagcgccgagagaaccgccgcctgccccaacagcagcgaggtgctgtacaccagcgccaaggaggagctgaagagattcgagagacagatccacgagagactgacccagctggagctgatcaacaagcagtacagaagactggccagagagaacagaaccgacaccgccagcagactgaagcagatggtgcacgagggcaaccagagatgggacaacctgcagagaagagtgaccgccgtgctgagaagactgagacacttcaccaaccagagagaggagttcgagggcaccagagagagcatcctggtgtggctgaccgagatggacctgcagctgaccaacgtggagcacttcagcgagagcgacgccgacgacaagatgagacagctgaacggcttccagcaggagatcaccctgaacaccaacaagatcgaccagctgatcgtgttcggcgagcagctgatccagaagagcgagcccctggacgccgtgctgatcgaggacgagctggaggagctgcacagatactgccaggagggcctggaggacgagaaggaggccagcgagaacgagaccgacatggaggaccccagagagatccagaccgacagctggagaaagagaggcgagagcgaggagcccagcagcccccagagcctgtgccacctggtggcccccggccacgagagaagcggctgcgagacccccgtgagcgtggacagcatccccctggagtgggaccacaccggcgacgtgggcggcagcagcagccacgaggaggacgaggagggcccctactacagcgccctgagcggcaagagcatcagcgacggccacagctggcacgtgcccgacagccccagctgccccgagcaccactacaagcagatggagggcgacagaaacgtgccccccgtgccccccgccagcagcaccccctacaagcccccctacgtgagcctgaacttcaccggcagcaccgcctacgtgtgcgccttcgacagatgggagatgatccaggcccaggagctgcacaacaagctgaagatcaagcagaacctgcagcagctgaacagcgacatcagcgccatcaccacctggctgaagaagaccgaggccgagctggagatgctgaagatggccaagccccccagcgacatccaggagatcgagctgagagtgaagagactgcaggagatcctgaaggccttcgacacctacaaggccctggtggtgagcgtgaacgtgagcagcaaggagttcctgcagaccgagagccccgagagcaccgagctgcagagcagactgagacagctgagcctgctgtgggaggccgcccagggcgccgtggacagctggagaggcggcctgagacagagcctgatgcagtgccaggacttccaccagctgagccagaacctgctgctgtggctggccagcgccaagaacagaagacagaaggcccacgtgaccgaccccaaggccgaccccagagccctgctggagtgcagaagagagctgatgcagctggagaaggagctggtggagagacagccccaggtggacatgctgcaggagatcagcaacagcctgctgatcaagggccacggcgaggactgcatcgaggccgaggagaaggtgcacgtgatcgagaagaagctgaagcagctgagagagcaggtgagccaggacctgatggccctgcagggcacccagaaccccgccagccccctgcccagcttcgacgaggtggacagcggcgaccagccccccgccaccagcgtgcccgcccccagagccaagttcctgtaccccgccgtgcagagcagcgagaactacagaagaagaggcggcgacagagagcagggccccagacagcacaccgccaccgccctgctgcccctgaagggcggccccggcagccccacccccgccgccgccccccccgccgccgccgcccccggcctgcccgccgccctgctgagaagaagactgcagctgcacagcggccagcagctgtgccccgtgctgctgccccacgccgaggtgcaccagtgggccaccccccacatcgagggcatcgccggccacagcgccaccccccccgcctag

SEQ ID NO: 293296 - DNA, 20475 bp, Artificial Sequence
  derived and/or modified sequence
atggccagcagccccgagctgcccactgaggacgaacagggctcttgggggatagacgacctgcacatttcactgcaggccgaacaggaagatacccagaaaaaagccttcacctgctggatcaattcccagcttgcaagacacacgtccccgtctgtgattagtgacttattcaccgacattaagaagggacacgtcctgctagatcttctggaggtcctctctgggcagcagctcccaagagataaggggtccaatactttccaatgcaggattaatattgaacacgcactgacttttttacgtaaccgttctattaagcttataaatatccacgtgacagacattattgacggaaaccctagcatcatcttgggccttatatggaccattattttgcacttccatattgaaaaactggcgcaaactctgtcatgcaattacaatcagcccagcctggacgacgtgtccgtggtggattcttccccggcttctagcccccctgccaagaagtgtagcaaggtccaggccaggtggcagatgtctgcccggaaggccctgctcctgtgggcccaggaacagtgcgccacatacgaatctgtgaatgttactgactttaagtcctcctggcgcaatggcatggcgtttttagcaatcatacatgccctccggcctgacctgatcgatatgaaaagcgttaaacatcgttcaaacaaggacaacctacgggaggcattccggattgctgaacaagaactaaaaatcccacgcctgctggaacctgaggacgtggatgtggtggatccagatgaaaaaagtatcatgacatatgtggcccagttccttcaatactcgaaagacgctcctggaaccggcgaagaggcgcaaggtaaggtgaaggacgccatgggatggctcaccctgcagaaggaaaaattgcagaagctcctgaaagactctgaaaatgatacgtactttaaaaaatataatagcctgctttcattcatggagtcattcaacgaggaaaagaaaagctttctggatgtgttgtccattaagcgcgacctagacgagctggacaaggaccacctgcagctacgcgaggcctgggatggactggatcatcagattaatgcctggaagatcaaactaaactatgcacttccacctccattgcaccagaccgaggcatggttgcaggaggtggaagaactgatggatgaggatcttagtgccagccaggaccactcgcaagcagttaccctgattcaggaaaagatgactcttttcaagtcacttatggaccggttcgagcaccactccaatattctgcttacttttgaaaacaaggacgagaaccacttgcccctggtgcctccaaacaaactggaagagatgaagagacgaattaataacatactggaaaagaagttcatccttctgcttgaattccattactataagtgtctggtgcttgggctcgtggacgaggtgaagtctaaactggacatttggaatatcaaatatgggtctcgggaaagcgtcgagcttttattggaagactggcacaagttcatagaagagaaggagtttctcgcccgcttggacacaagcttccagaagtgtggggagatttacaaaaacctggccggtgagtgccaaaatataaataaacagtatatgatggtgaagagcgatgtctgtatgtatcggaaaaacatctacaacgttaaatccacattacagaaagttctggcatgctgggccacttacgtggaaaatctacggcttctgcgggcttgtttcgaggagactaagaaggaggaaattaaagaagttccatttgagaccctcgcacagtggaaccttgaacacgctaccctcaacgaagccggtaatttcctcgtcgaggtgagcaatgacgtagttggatcgagcatcagtaaggaactgcgtaggctgaacaagcgctggcggaaactggtcagtaaaacccagctcgagatgaatctccctctgatgatcaagaaacaagatcaacccaccttcgataattcgggaaatattctttctaaagaagaaaaggctactgtggagtttagtactgatatgtcagtcgaacttcccgagaattacaatcaaaacatcaaggctggggaaaagcacgagaaagaaaacgaggagttcacaggccagctgaaggtggctaaagacgtggagaaacttatcggccaggtcgaaatttgggaagctgaggccaagtccgttctggatcaggacgatgtggacactagcatggaggagtcgctgaaacatttaattgctaagggttctatgttcgacgaactaatggctagaagtgaggatatgcttcagatggacatccagaatatctcctcacaggaatctttccaacacgtgcttactactggactgcaggctaaaattcaggaggccaaggaaaaggtacagattaatgtagtgaagctcatcgctgccctgaagaacctgactgatgtttcccccgatttagacataagattgaaaatggaagagtcccagaaggaactggaaagctatatgatgagagcccaacagcttttggggcagcgcgaaagcccgggcgaacttatttctaagcacaaagaagctcttatcattagtaacacaaaatccttggccaagtaccttaaggctgttgaggagttgaaaaacaatgtaactgaggacatcaaaatgtccttagaagaaaagagccgagatgtgtgcgctaaatgggagtctctgcaccacgaactgtcattatacgtccaacaactgaaaattgacatcgagaagggcaaactttccgacaatatattgaagctcgaaaagcagatcaacaaggagaagaaattgattaggagagggcgaaccaaaggacttatcaaggagcacgaggcctgtttctccgaagaagggtgtctgtaccagctgaaccatcatatggaggtactgcgggagctctgcgaagaattgccaagccagaaatcgcaacaggaggtgaagcgattactgaaggattacgagcagaagatagaacgcttgctgaaatgcgccagcgagatccacatgacattacagcctaccgccgggggcacgagcaaaaacgagggcaccatcacgacgagcgagaaccgtggcggtgacccccattccgaagctcctttcgctaagagcgataatcagccaagcaccgagaaggcaatggaacctaccatgaagttcagcctggcctcagtgctcaggcctctgcaggaggaatctatcatggaaaaagactactccgccagcatcaacagcctgctggagcgttatgacacctacagggatatcctggaacaccacctccagaacaacaagtttaggattacctcagatttttcctccgaagaggaccgcagttcttcatgcctgcaggccaaacttacagatcttcaggttattaaaaatgagacagacgcaaggtggaaagaatttgaaattatctcacttaaactggaaaatcatgtgaatgacatcaaaaagccattcgtgatcaaggagagggatactcttaaagaaagagaaagagaactccagatgaccctcaatacaaggatggagtctctggaaactgctctgcggctagtactgccggtcgaaaaggcctctctgctgttatgtggatcagacctgccgcttcataagatggcaattcagggtttccatctgatcgacgcagataggatatatcagcacctcagaaacatccaggatagtattgctaaacaaatcgaaatctgcaatcggctggaggaaccaggcaatttcgtcctaaaggaactgcatccgttcgacctgcacgccatgcagaacatcattctgaaatataagactcaattcgaagggatgaatcatagagtccagaggagtgaggataccctgaaggcgttggaagattttctggcatccttgagaacagcaaagttgtccgcagaacccgttaccgatctctccgcgtcagacacacaggtcgctcaggagaacacactgaccgttaaaaacaaagaaggagagatccacttgatgaaagataaagcaaaacacctggataagtgcctgaagatgctggacatgagctttaaggatgctgagaggggcgatgataccagttgcgaaaacttgctcgacgcgttctccattaagctctctgagacccacggatacggtgtgcaagaagagtttactgaggagaacaagttactggaggcctgcatttttaaaaacaacgaactgctaaagaacatccaggatgtgcagagccaaatctcaaagatcggtctgaaagaccccacggttccagccgtaaaacacaggaaaaaatcactcattcgcctggataaagtactcgacgagtatgaggaggaaaagcgtcacctgcaggagatggccaacagtttaccccatttcaaagacgggcgcgagaagacagttaaccagcagtgtcagaataccgtggttctgtgggagaataccaaggcacttgttactgaatgtctcgagcagtgtggaagagtcctggaactgctgaaacagtaccagaactttaaatcgatccttaccactctcatccaaaaagaggagtctgtgattagtttgcaggcaagctatatggggaaggaaaacttaaagaagcggatcgccgagatagagattgtaaaggaggagttcaatgagcacctggaggttgtcgataagattaaccaggtgtgtaagaatctccaattctacctcaataaaatgaagaccttcgaagagccgccctttgagaaggaagccaatataatcgtcgacagatggctcgatatcaacgaaaaaaccgaagactactatgaaaatctgggaagggccttggccttatgggacaaactatttaatctgaagaacgtcatcgacgaatggacagaaaaggccctgcagaaaatggagttgcaccagctcaccgaggaagacagagagagacttaaggaggaactgcaagtccacgaacagaaaactagcgagtttagccggcgggtggctgagatccagttcctactgcagagctcagagattccgcttgagctgcaggtaatggagagcagtatcctaaacaaaatggagcacgtccagaagtgcctcaccggcgagtctaactgccacgcgctcagcggttcgaccgccgagcttagggaagatctggaccaggctaaaacacagattggcatgaccgaatccctgctcaaagcattatccccctctgattctcttgaaattttcacaaagctcgaagagatccagcagcagattctgcaacaaaagcattctatgatcttactggagaaccaaataggatgcctgactcccgagctgagtgaactgaaaaaacagtacgagtccgtgtctgatctcttcaacacaaagaaatcagtccttcaggatcacttctccaaactgctgaatgatcaatgtaagaatttcaatgactggttcagtaatataaaagtgaacttgaaggagtgcttcgagtcaagcgaaacgaagaagtctgttgagcagaagctgcagaagctatcagacttcttgaccctcgagggtcgtaactcaaaaataaaacaggtcgatagcgtcctgaagcacgtaaaaaaacatctgccaaaggcccatgtgaaggagctaatatcttggctggtagggcaagagttcgagctagagaagatggaatccatttgtcaggcccgtgctaaagagctggaagatagcctccagcagcttctgagattgcaggatgatcacagaaacctgcgcaaatggttaacaaaccaggaggagaaatggaaaggcatggaagaaccaggagaaaaaactgagctgttctgccaggccctcgcaagaaaacgggagcagttcgagtccgtggcccagctcaataactctctgaaagagtacggctttaccgaggaagaggaaataattatggaagcaacctgtcttatggaccgttaccaaacactgctgagacagttgtccgaaattgaagaggaggacaagttgctgccaacagaagatcaaagttttaatgatctggcccacgatgtgattcactggatcaaagaaattaaggagagcctcatggtgctcaatagctctgagggtaagatgccattagaagagagaatccagaagatcaaagagatcatcctcctgaagccagagggcgacgccaggattgagacaatcatgaaacaggcagagtcatctgaagccccactagtgcagaaaaccctcacagatatcagcaatcagtgggacaacactctgcatctggcctctacttaccttagtcaccaggagaagctgctcctcgaaggcgaaaagtacttgcaatccaaggaggacctgcggctgatgctaatcgagctgaaaaaaaagcaggaagccggatttgctctacaacacggcctacaggaaaagaaggctcagctcaaaatctacaagaagttcctgaagaaagcacaggacctgacttcactgctgaaagagctgaaatctcagggaaactatctgctggagtgcacgaaaaacccatccttttcagaggagccatggctcgagatcaagcatcttcatgaaagcctgctccagcagttgcaggacagcgtgcaaaatctggatgggcatgtacgcgagcatgacagttaccaagtctgcgtgaccgacctcaacaccaccctggataattttagtaaagagttcgtttccttctctgacaagccagtggaccagatcgcggttgaagagaaacttcaaaagcttcaggaactggaaaacaggctatccttgcaggatggcacactgaaaaaaatcctagctcttgcaaaatctgtcaagcaaaatacatcaagcgtgggtcagaagattattaaggatgacattaaatcactccagtgcaagcaaaaggatctggagaatcgacttgcttcagcgaagcaggagatggaatgctgcctgaacagtattctcaaatcgaaaaggagcaccgagaaaaaaggcaagttcacattgccagggagggaaaagcaagcaacatccgatgtacaggaaagcacccaagaatcagccgcagttgagaagttggaggaggattgggaaatcaacaagaactttgttgagaatgtcatggccgttagcaagaactgtcatcacagcatgtacatcttcgaaagcatcgttaagaactttatatctgacgagatgcaagatagcgctgtagagatggctatgtcgaaacagctctcacttaacgcacaggaatccatgaagaatacagaggacgagagaaaggttaatgaactgcaaaaccagcccctggagctcgacaccatgctaagaaatgagcagcttgaggaaatcgagaaattgtacacccagctggaagcaaagaaagccgctattaagcccctggagcagaccgaatgtctgaacaagactgagacaggtgcactggttctgcataacatcggctactctgctcagcatctggacaacttactgcaggcgcttattaccctcaaaaagaataaggaatcccagtattgtgtgctgagggactttcaggagtatctcgctgccgttgaatcctcaatgaaggcccttctcacagataaagaaagtctcaaagttggccccctggattccgtcacctacctggataaaatcaagaagtttatcgctagcatagagaaagagaaggacagtctcggtaatcttaaaatcaagtgggaaaacttgagcaatcacgtgacagacatggacaagaaattgctcgagagccagataaaacagttggagcatgggtgggaacaagtcgaacaacagatccagaaaaagtactcgcagcaggtcgttgaatacgatgagttcactactctgatgaataaggtgcaggacaccgaaatcagcctccagcaacagcagcagcatctccagctccggctcaaatctcccgaagagagggcagggaaccaatccatgattgctctgaccactgatctgcaggccactaaacatggcttctccgttctgaagggtcaggccgaacttcaaatgaaacgcatctggggcgaaaaggagaagaagaacttggaggacggcatcaacaatctgaagaagcaatgggagactctggaacccctgcatctggaggctgagaaccagatcaagaaatgtgacattagaaataaaatgaaggaaaccatcctttgggcgaaaaacctactaggcgagctgaatccttccattccactgctgcccgatgacatcctatcacagattaggaagtgcaaggtcacacatgacggtatcctcgcacggcaacaaagtgtcgaatcactggcggaagaggtgaaggataaagttccaagcctcacaacctatgaggggtccgacctaaataatacactggaggatctccggaaccagtatcagatgctcgtacttaagtcgacgcaacggtcacagcagctggagttcaagctggaggagcgctcaaacttttttgcaattataaggaagtttcagttgatggtacaggaaagcgagacgctaatcatcccaagggtggaaaccgccgctactgaggctgagctgaagcaccatcatgttactctggaagcaagccagaaggagctgcaggagatcgactctggaatttccacacacctccaggagctcaccaatatatatgaagaattaaacgtgtttgagcgcctgttcttggaggaccagctcaaaaacctaaaaatcaggaccaacaggattcagcgcttcatccagaacacctgtaatgaggttgagcataaaattaagttttgccggcagtttcatgagaaaacgtccgcattacaagaggaagcagatagcatccaacggaatgagctgctcttgaaccaggaagtgaataaaggtgtgaaagaagagatctacaacctgaaggaccggcttacagcgataaaatgctgcatcctgcaggtgctgaaactgaaaaaagtcttcgactatattggtctgaattgggatttctcgcagctggatcagttgcagacacaggtgttcgaaaaggaaaaggagcttgaagaaaaaattaagcagttagacacattcgaggaggagcacggtaaatatcaggcgttgctgtctaaaatgagggcaattgatctgcagatcaagaaaatgacggaggtcgtattgaaggcaccggactcatcacctgaatctcgtagactgaatgcacagatattgtcccaacgcattgaaaaggccaaatgtctgtgcgacgagattattaaaaagctcaatgagaataagacgttcgatgatagctttaaagaaaaggagattctgcagatcaagttaaacgccgaggagaacgacaaactttacaaggtgttacaaaacatggtgttggagcttagccccaaagaactggatgaaaagaattgccaagataaattggaaacttcattacacgtgctgaaccagatcaaatcgcagctgcagcagcctctgctgatcaatcttgaaatcaaacacatacagaacgaaaaggacaactgtgaggcttttcaggagcaggtgtgggccgaaatgtgtagtatcaaggctgtaactgctattgagaagcaaagagaggagaactccagcgaggcctctgacgtggagacaaagttacgtgagttcgaggatctacagatgcaactgaatacatcaatcgacctgagaacaaatgtgcttaatgatgcctacgaaaatcttaccaggtacaaggaagctgtcacacgcgcagtggagagcatcacatcgcttgaggcaattatcattccctaccgcgtagacgtcggaaaccccgaggaaagtttggaaatgcccctacggaagcaggaggagctcgaaagtaccgttgcccatatccaagatttgacggagaagctggggatgatctcgtccccagaagccaagttacagttacagtatactttgcaggagctcgttagcaaaaactctgcgatgaaagaagcctttaaggcgcaagaaactgaggccgagaggtacctcgagaattacaaatgctataggaaaatggaagaggatatatacaccaacctcagcaaaatggagacagtcctggggcagtccatgtctagccttcccttaagttacagggaggccctcgagcggttagaacaatccaaagccctggtctccaacttgatctccaccaaggaggagttgatgaagttgagacagattctgcggctgctgagattacggtgcaccgagaatgacggaatctgcctacttaagattgtctcggctctctgggaaaagtggctgagcctgttagaagctgcaaaggagtgggaaatgtggtgcgaggagctcaagcaggaatggaagttcgtctccgaagaaatcgagcgtgaggccatcatcctcgacaatttgcaggaggaattgccggagatcagcaagacgaaagaggctgcaacaactgaggaactcagtgagttgttggactgcctgtgccagtatggggagaacgtcgaaaagcagcagctgttacttaccctgctgctacaaagaattagatccattcagaacgtgcctgaatctagtggggccgtcgagacggtgccagcatttcaggagataactagcatgaaggaaagatgcaacaagctgctccaaaaggtccagaagaacaaagaacttgtgcagactgaaattcaagagcgccacagtttcacaaaagaaatcattgccctcaagaatttctttcaacagaccactacctcgttccaaaacatggcctttcaggatcaccccgagaaatctgagcagtttgaagaactgcagtcaatacttaaaaagggaaaattgacctttgaaaatattatggagaagctacgaattaagtacagtgagatgtacacgattgtgccggctgagatcgagtctcaagtggaagagtgccgcaaagcactcgaagacattgatgaaaagatcagtaacgaagtgctgaagtcgagcccttcttacgccatgagacggaaaatcgaggagatcaataatggactccataacgtggaaaagatgctgcagcagaagtccaaaaacatcgaaaaagcgcaggaaatccaaaagaagatgtgggacgagctggatctctggcatagcaaactgaatgaattggactcggaggtgcaggacatagtcgaacaggaccccggccaggcccaggaatggatggataacctgatgattccgtttcagcagtatcagcaggtgtcccaaagagcagaatgccgcaccagtcagttgaacaaggcgaccgtgaaaatggaagagtattcagatctcctgaaatccacagaggcctggatcgagaacacctcccaccttctcgcgaaccccgccgattatgattctctccgcacactgtctcatcacgcctcaactgtccaaatggcacttgaggatagtgaacaaaaacacaacctactgcactctattttcatggatctcgaggatctttctattatctttgaaactgacgaactgacccagtctatccaggaactgtccaaccaagtaacagccttgcagcagaagattatggagtcgcttccccagattcagcggatggcggacgacgtcgtggctatcgagtcagaggtgaaatctatggagaagcgtgtgtccaaaattaaaaccatactactgtctaaagaaatctttgacttcagtcccgaggaacacctaaagcacggagaggttatactggaaaatatcagaccaatgaaaaagaccatcgccgagattgtaagctatcaggtggagttgaggctgccccagactggaatgaaacctctgccagtttttcagaggacaaatcagttgctccaagacatcaagttactcgagaatgttacacaagagcaaaatgagctcttgaaggttgttattaagcagacaaacgagtgggacgaagagatcgaaaacctgaagcagatattgaataactactccgcccaattctccctcgagcatatgtcacccgatcaggctgataagctgccccagctgcaaggagaaatcgagaggatggaaaagcagatcctctcgctgaatcagagaaaggaggatctcctggttgacctgaaggcaactgtcctaaacctgcaccagcacctcaaacaagagcaggagggtgtcgaacgcgatcgattaccagccgtcacaagcgaggagggaggggtggcagagagggatgcctcagagcgcaagctaaatcgtcggggcagcatgtcttacctcgctgctgttgaggaagaggtggaggaatcttctgtcaaatcagatcacgataaggatatggaggaagacagagcgtctagtagtagcggtactatcgtccaggaggcctatggaaagatatccactagcgacaactccatggcgcagattttgacaccggacagcttaaacaccgaacaaggtcccgagtgtagtcttcggccaaaccaaaccgaagaaggaactaccccgccaatcgaagctgacacactggactcctccgatgctcaagggggcctggaaccccgggtggagaagacccgcccagagccgactgaggtcctgcatgcgtgcaaaacccaggttgcggaattggagctgtggctgcagcaggctaacgtggcagtcgagcccgagaccctgaatgctgacatgcaacaggttctcgaacagcagttagtgggttgccaggccatgttaaccgagattgagcataaagtggcgttcctgctcgagacctgcaaggaccagggactgggagacaacggtgccacccagcatgaagccgaagcactctctcttaagctgaaaacggtaaagtgtaacttagagaaggttcaaatgatgctccaggagaaacacagcgaggaccagcaccctacaattctgaaaaaaagctcagagccagaacaccaagaagcgctgcagccagtgaaccttagtgagttggagagcatcgtcacagagcgaccccagttttcacgacagaaggacttccagcagcagcaggtgctggagctgaaacccatggaacaaaaggatttcattaagttcatagaatttaacgccaagaagatgtggccccagtactgtcaacacgataacgataccacccaggaaagttcagcccgataccccacaactgaggagctaaagacatatacaactcagctggaagatttgcggcaggaagcgagcaacctccagacccaagagaacatgactgaagaagcttacattaatctggacaaaaaactgtttgagttatttttgactctgtcccaatgtctaagctctgtcgaggaaatgctagagatgccaaggctctaccgtgaggatggcagtgggcagcaagtacactacgaaaccctcgctctggaactcaaaaagctttacttggcactgtctgataagaaaggcgacctgctgaaagcaatgacatggcccggcgagaatacaaatcttctattggagtgctttgacaatctgcaagtgtgtctggagcatacacaggccgccgccgtctgcaggtccaagagtctcaaagctgggctcgattacaatagatcttatcagaaggcggacgcatatactgtggagttggaaaacgccgagtctcgagttgcaaaattgagagatgagggagagcgcttacacctgccctatgcccttctgcaggaagtttacaaactcgaggacgtcttagacagtatgtggggaatgctccgagcgcggtataccgaactgtcttctcctttcgtcaccgaatcacagcaagacgcactgttacagggcatggtggaactggtcaaaatcggaaaggagaagctagctcatggccacttaaagcagaccaagtccaaagtggccctgcaggctcagatcgagaaccacaaggtgtttttccagaaactcgtcgccgacatgttactgatccaggcgtatagtgcaaagatactcccatctctgctccagaaccgcgagaccttctgggctgagcaggtgactgaggtgaaaatcctggaagaaaaatctcgccagtgtggtatgaagctccagtctcttctccagaaatgggaggagttcgacgagaattacgcctcactagaaaaagacctggaaattttgatcagtaccctcccaagtgtcagcctagtggaagagactgaggagcgactggtggagcgcatatctttctatcagcagattaagaggaatatcggtggcaaacatgcccgcctttaccagactctgaatgagggcaaacaattagttgcttcagtgtcttgcccagagttggagggacagattgccaagcttgaggagcaatggttgtcactaaataagaaaatagaccatgagctgcacagacttcaggctctccttaaacacttactgcgatcagccttcctgggggtgtacaatcgcgatagcgatcagcttaccaagtggctggagtcaagccaacacacactgaactattggaaggaacaatcactgaacgtttctcaggacctggataccatccgatcgaatattaataacttctttgaattcagtaaggaggtggatgagaaatcttccctgaagactgccgtgatatcgattggaaaccaactccttcatttaaaagagaccgatacagcgacactgcgggccagcctggctcagtttgaacagaaatggaccatgctgattacccaactgcccgacattcaggagaaactgcatcagcttcagatggaaaagctcccgagccgcaaggcaattacagaaatgatctcctggatgaacaatgtggagcaccaaacgagcgacgaggattctgttcactccccgtcttctgccagtcaagttaaacatcttctccagaagcacaaagaattcaggatggagatggactataagcagtggatagtggattttgtgaaccagagcctcctccagttgagcacctgtgatgtcgaatccaagcgatacgagcggactgaattcgctgagcatctcggagaaatgaatagacagtggcatcgggtgcacggcatgctgaataggaagatccagcacttggagcaactgttggagtccatcactgagagcgaaaataaaatccagattttaaacaattggttggaggcccaggaggaaagactgaaaacgttgcaaaagcccgagtcggtgatatctgtgcaaaagctgctcctggactgtcaagacattgagaaccagttagctataaagagtaaagccttggatgagctgaaacagtcctatttgactctcgaatccggagcagtccctttactggaggacactgccagtagaatcgacgaattatttcagaagaggagttcagtgctcacgcaggttaaccagctcaaaacatcaatgcaatcagtgctgcaggagtggaaaatctatgaccagctgtatgacgaggtgaatatgatgacaataagattctggtattgcatggagcactcaaaacctgtggttctgtctctcgaaactctgcgttgtcaagtggaaaacctgcagtctttgcaggacgaagccgagtccagcgagggctcgtgggaaaagttgcaggaggttatcgggaaactgaagggactgtgtccatccgttgccgaaattatagaggaaaaatgccagaacactcataagaggtggactcaggtcaatcaagccatcgccgaccaactccaaaaggcccagagcctccttcaactatggaaggcatactctaacgcacatggtgaagcagccgccagactaaagcaacaggaggccaagtttcaacagttagccaacatctcaatgagcggcaataacctcgcggagattcttcccccagccttacaggatataaaagagctgcaacacgatgtgcagaagaccaaagaagctttccttcaaaactcatcagttttggatagattgcctcagcccgcagagtctagtacacatatgctattaccgggaccactgcactcactccagcgcgctgcctatttggagaaaatgctgctagtgaaggcaaacgaatttgagaatcacgttctggcccttaccgctcagtctcccgacattgagcaccttaatgaggtctccctcaaactgcccctgtctgacgtagccgtgaagacgctgcagaacatgaacagacaatggatccgggccactgccacggctctggagagatgttccgagttacaggggatcggccttaacgagaaattcctttactgttgtgagaaatggatccagctgctagagaagattgaggaagctcttaaagtggacgtagcaaattctctcccagaattactagagcaacagaaaacttacaagatgctcgaggccgaggtcagcataaatcaaacaatagccgacagctacgttacgcagagcctccaactgctagacaccacagagattgagaatcgacctgaattcattaccgagttcagcaaattgactgatcgctggcagaacgcggtgcagggagtcagacagagaaaaggtgatgtggatggactgaatgctcacgtggctaggtgtgggggggccagtctgaagaagcaggatctgcggtactccctgcataccgcatgtggagcggccctgttatgcagatcaagtcatggagcgaataaagaaatacactttcagaggcggagaaccacttgtgctctgaccctcgaagccggagaaaagctattactgacaacagatctgaaaaccaaagagagtgtgggcaggagaattagccagctgcaagacagctggaaggatatggaaccacagctggctgagatgattaaacagttccagagcaccgtggaaacctgggatcagtgcgaaaaaaagataaaagagctgaagagccggctgcaggtgctgaaagcccagtccgaagatcccttacccgagcttcacgaggacctgcacaacgaaaaggagttgattaaagttgctatccgaaaacaagaaatcgaggacagattgaatacatgggtggttttcaatgagaagaataaggagttgtgtgcctggttggtccagatggaaaataaggttctgcagaccgctgatattagcatagaggaaatgatcgagaagctccagaagagaacagttggccgcgaagaggtgcccgaaaggtgggaatgcgagacaatcgtgtcggggcatggcaccgaggaatcttgcttcctgtcaattcggaaattccaccagggccgcggcctgcacatactcacctgccagcttatcccacaggattgtatggaggaaattaacttgtttagcgagaacaagttgcaattaaaacagatgggtgaccagctgatcaaggcttccaataagagccgcgctgccgagatcgacgacaaattgaacaagatcaacgatagatggcagcatcttttcgacgtcatcggcagcagtatggccgatcaaacaaacagtaggtggatgttttttcagtggccaagaggaatccaacgaaccgtaacctggccctgggaccacctgtgttcatgtgcgtccaccggacacactgggcctttccattctagtgtcttgcgctgctttgagcagcacatcgagtttggtatttataggaggacctacaaggtgaacaaggagctaggtggggacaagaatggccagagatgtccaattatctatccgcatgggctggtgcagtgtatccggttgggggagcccttgatactgaaaagggtaaagaagctgaaggagacattcgccttcatccagcagttggataagaatatgagcaacctgcgcacctggctggcgagaatcgaatctgaactgagcaaacctgtagtttatgatgtatgtgatgatcaagagattcagaagcgcctggccgaacagcaggaccttcagcgtgatatcgagcagcatagtgccggtgtcgaatcagtgtttaatatttgcgatgtgctcttgcatgatagtgatgcatgcgcaaatgagactgagtgcgattctatccagcagactacccggtccctggaccgcagatggcgcaatatctgcgctatgtcaatggagaggaggatgaagattgaggaaacttggaggctctggcagaagtttttagatgattatagcagattcgaggattggctcaagtccgctgagcggactgccgcctgcccaaattcctccgaggtcttatatacgtcagcaaaggaagaattgaagagattcgagcggcaaatccatgagcggctgacacagctagagcttataaataagcagtataggaggctggcaagggagaatcgaacagatacggccagcagactgaagcagatggttcacgaaggcaatcagcgctgggataatctgcagagaagagtgacagccgtgcttcgaaggctgcgtcacttcaccaatcagcgagaagagtttgaggggacgcgcgaatcgatactcgtgtggctaaccgaaatggacctgcagctaacaaatgttgagcatttctccgaaagcgacgccgacgataagatgcggcagcttaatggcttccagcaagagattacgctcaatacaaataaaattgaccagctgattgtgtttggagagcagttgattcagaaaagtgagcccctggacgcagtactcatcgaggacgagcttgaagagttgcatcgttattgtcaggaaggcttggaagacgagaaggaagctagtgaaaacgaaacggatatggaagacccgcgagaaatccagaccgatagttggcgcaagcgtggagagagcgaagagccttcgtcccctcagagcttgtgtcacctggttgcccctggacatgagcgatccggctgcgagacgcccgtgagcgtggattctattccactcgaatgggaccatacaggtgatgtggggggaagctctagccatgaggaagacgaggagggtccttattatagcgctctatcaggaaagagtatcagcgatggccattcgtggcatgtgcctgactccccctcctgcccggagcatcattacaaacagatggaaggcgatcggaatgtgccacctgtgcctcctgcatccagtactccctataaacctccatatgtttcccttaacttcactggctctactgcgtatgtgtgcgcctttgatcgatgggagatgatacaggctcaggagttacataacaaacttaagatcaaacagaacctgcagcagctaaactccgacatctccgccatcacaacgtggttaaaaaaaacagaggcggagctggagatgctcaaaatggctaaaccgcctagtgatattcaggagatcgaactcagggtcaagagactccaggaaattttgaaggccttcgatacttataaggccttagtggtttctgtaaacgtgtcctcaaaggaatttctgcagaccgagtcccccgaatctactgagctgcagtctcggctgaggcagttgtccctgctgtgggaggcagcacagggtgccgtggactcctggaggggagggctcagacaaagcctcatgcagtgtcaggatttccaccagctgagccagaatctcttgttgtggcttgcgagtgctaagaataggcggcaaaaggcccatgtcactgatcccaaggccgatccacgggcccttctggagtgtcggagggagctgatgcagcttgagaaagagctggtagagcggcaaccgcaggttgacatgctacaggaaatcagcaactcactgctgataaaagggcatggtgaggactgtatcgaggctgaggagaaggtacatgtgatcgagaaaaaactcaaacagcttcgcgaacaggtcagccaggatcttatggctctccaaggtacccagaatcctgctagcccactcccatcctttgacgaagtcgattccggagaccagccaccggccacctctgttcctgccccaagagcaaagttcttatatccagcagtccagagcagcgagaattatcggcgccgaggtggcgatcgagagcagggaccaagacagcatacggctaccgcactgttgcctctaaaggggggtcccggaagcccaaccccagccgctgctcctcctgccgcagctgcacctggtctccctgccgcgttgctgcgaagaaggttgcagctgcactctggccagcagctttgtcccgttttgctgccccatgcggaggtgcaccagtgggccactccacacatcgagggtatcgcaggtcattcggctactcccccagcctag

SEQ ID NO: 293297 - DNA, 20475 bp, Artificial Sequence
  derived and/or modified sequence
atggccagcagccctgagctgcccacagaagatgagcagggctcctggggcattgatgacctgcacatcagcctgcaggccgagcaggaggacacccagaagaaggccttcacctgctggatcaacagccagctggcccggcacaccagccccagcgtcatcagtgacctcttcacagacatcaagaagggccacgtgctgctggacctgctggaggtgctgagcggccagcagctgccccgggacaagggcagcaacaccttccagtgccgcatcaacatcgagcacgccctgaccttcctgaggaacagaagcatcaagctgatcaacatccacgtgacagacatcattgatggcaaccccagcatcatcctgggcctcatctggaccatcatcctgcacttccacatcgagaagctggcccagaccctgagctgcaactacaaccagcccagcctggatgatgtgtctgtggtggacagcagccctgccagcagccccccagccaagaagtgcagcaaggtgcaggcccgctggcagatgtctgccaggaaggccctgctgctgtgggcccaggagcagtgtgccacctatgagagcgtgaatgtgacagacttcaagagctcctggagaaatggcatggccttcctggccatcatccacgccctgcggccagacctgattgacatgaagtctgtgaagcacaggagcaacaaggacaacctgcgggaggccttcagaattgctgagcaggagctgaagatcccccggctgctggagccagaagatgtggatgtggtggaccctgatgagaagagcatcatgacctacgtggcccagttcctgcagtacagcaaggatgcccctggcactggagaggaggcccagggcaaggtgaaggatgccatgggctggctgaccctgcagaaggagaagctgcagaagctgctgaaggacagtgaaaatgacacctacttcaagaagtacaacagcctgctgtccttcatggagagcttcaatgaggagaagaagagcttcctggatgtgctgagcatcaagagggacctggatgagctggacaaggaccacctgcagctgcgggaggcctgggatggcctggaccaccagatcaatgcctggaagatcaagctgaactatgccctgcccccacccctgcaccagacagaggcctggctgcaggaggtggaggagctgatggatgaggacctgagcgccagccaggaccacagccaggccgtgaccctcatccaggagaagatgaccctcttcaagagcctgatggacagatttgagcaccacagcaacatcctgctgacctttgagaacaaggatgagaaccacctgcccctggtgccccccaacaagctggaggagatgaagaggcgcatcaacaacatcctggagaagaagttcatcctgctgctggagttccactactacaagtgcctggtgctgggcctggtggatgaggtgaagagcaagctggacatctggaacatcaagtatggcagccgggagagcgtggagctgctgctggaggactggcacaagttcatcgaggagaaggagttcctggcccggctggacaccagcttccagaagtgtggggagatctacaagaacctggccggggagtgccagaacatcaacaagcagtacatgatggtgaagagtgatgtgtgcatgtacaggaagaacatctacaacgtgaagagcaccctgcagaaggtgctggcctgctgggccacctacgtggagaacctgcggctgctgcgggcctgctttgaggagaccaagaaggaggagatcaaggaggtgccctttgagaccctggcccagtggaacctggagcacgccaccctgaatgaagctggcaacttcctggtggaggtgtccaatgatgtggtgggcagcagcatcagcaaggagctgcggcggctgaacaagcgctggaggaagctggtgtccaagacccagctggagatgaacctgcccctgatgatcaagaagcaggaccagcccacctttgacaacagcggcaacatcctgagcaaggaggagaaggccaccgtggagttcagcacagacatgtctgtggagctgcctgagaactacaaccagaacatcaaggccggggagaagcatgagaaggaaaatgaggagttcaccggccagctgaaggtggccaaggatgtggagaagctgattggccaggtggagatctgggaggccgaggccaagtctgtgctggaccaggatgatgtggacacctccatggaggagagcctgaagcacctgattgccaagggctccatgtttgatgagctgatggcccggtctgaggacatgctgcagatggacatccagaacatcagcagccaggagagcttccagcacgtgctgaccaccggcctgcaggccaagatccaggaggccaaggagaaggtgcagatcaacgtggtgaagctgattgctgccctgaagaacctgacagatgtgtccccagacctggacatccggctgaagatggaggagagccagaaggagctggagagctacatgatgagggcccagcagctgctgggccagcgggagagccctggagagctgatcagcaagcacaaggaggccctgatcatcagcaacaccaagagcctggccaagtacctgaaggctgtggaggagctgaagaacaacgtgacagaggacatcaagatgagcctggaggagaagagcagagatgtgtgtgccaagtgggagagcctgcaccacgagctgagcctgtatgtgcagcagctgaagattgacatcgagaagggcaagctgagtgacaacatcctgaagctggagaagcagatcaacaaggagaagaagctgatccggcggggccgcaccaagggcctcatcaaggagcacgaggcctgcttcagcgaggagggctgcctgtaccagctgaaccaccacatggaggtgctgcgggagctgtgtgaggagctgcccagccagaagagccagcaggaggtgaagaggctgctgaaggactatgagcagaagattgaaaggctgctgaagtgtgccagcgagatccacatgaccctgcagcccacagctgggggcaccagcaagaatgaaggcaccatcaccaccagcgagaacagaggaggagacccccacagcgaggccccctttgccaagagtgacaaccagcccagcacagagaaggccatggagcccaccatgaagttcagcctggcctctgtgctgcggcccctgcaggaggagagcatcatggagaaggactacagcgccagcatcaacagcctgctggagagatatgacacctacagagacatcctggagcaccacctgcagaacaacaagttccgcatcaccagtgacttcagcagtgaagaagatagaagcagcagctgcctgcaggccaagctgacagacctgcaggtgatcaagaatgaaacagatgcccgctggaaggagtttgagatcatcagcctgaagctggagaaccacgtgaatgacatcaagaagccctttgtgatcaaggagcgggacaccctgaaggagcgggagcgggagctgcagatgaccctgaacaccaggatggagagcctggagacagccctgcggctggtgctgcctgtggagaaggccagcctgctgctgtgtggcagtgacctgcccctgcacaagatggccatccagggcttccacctgattgatgctgaccgcatctaccagcacctgaggaacatccaggacagcatcgccaagcagatcgagatctgcaaccggctggaggagcccggcaactttgtgctgaaggagctgcacccctttgacctgcacgccatgcagaacatcatcctgaagtacaagacccagtttgagggcatgaaccaccgggtgcagaggtctgaggacaccctgaaggccctggaggacttcctggccagcctgaggacagccaagctgtctgctgagcctgtgacagacctgagcgccagtgacacccaggtggcccaggagaacaccctgactgtgaagaacaaggagggggagatccacctgatgaaggacaaggccaagcacctggacaagtgcctgaagatgctggacatgtccttcaaggatgctgagagaggagatgacaccagctgtgagaacctgctggatgccttcagcatcaagctgtctgagacccacggctacggcgtgcaggaggagttcacagaggagaacaagctgctggaggcctgcatcttcaagaacaatgagctgctgaagaacatccaggatgtgcagagccagatcagcaagattggcctgaaggaccccaccgtgcctgctgtgaagcacaggaagaagagcctcatccggctggacaaggtgctggatgaatatgaggaggagaagaggcacctgcaggagatggccaacagcctgccccacttcaaggatggccgggagaagacagtgaaccagcagtgccagaacacagtggtgctgtgggagaacaccaaggccctggtgacagaatgtctggagcagtgtggccgggtgctggagctgctgaagcagtaccagaacttcaagagcatcctgaccaccctcatccagaaggaggagagcgtcatcagcctgcaggccagctacatgggcaaggagaacctgaagaagagaattgctgagattgaaattgtgaaggaggagttcaatgagcacctggaggtggtggacaagatcaaccaggtgtgcaagaacctgcagttctacctgaacaagatgaagacctttgaggagcccccatttgagaaggaggccaacatcatcgtggaccgctggctggacatcaatgagaagacagaggactactatgagaacctgggccgggccctggccctgtgggacaagctgttcaacctgaagaatgtgattgatgagtggacagagaaggccctgcagaagatggagctgcaccagctgacagaagaagatcgggagcggctgaaggaggagctgcaggtgcatgagcagaagaccagcgagttcagccggcgggtggccgagatccagttcctgctgcagagcagcgagatccccctggagctgcaggtgatggagagcagcatcctgaacaagatggagcacgtgcagaagtgcctgactggagagagcaactgccacgccctgagcggcagcacagctgagctgcgggaggacctggaccaggccaagacccagatcggcatgacagagagcctgctgaaggccctgagccccagcgacagcctggagatcttcaccaagctggaggagatccagcagcagatcctgcagcagaagcacagcatgatcctgctggagaaccagatcggctgcctgaccccagagctgtctgagctgaagaagcagtatgagagcgtgtctgacctcttcaacaccaagaagtctgtgctgcaggaccacttcagcaagctgctgaatgaccagtgcaagaacttcaatgactggttcagcaacatcaaggtgaacctgaaggagtgctttgagagcagcgagaccaagaagtctgtggagcagaagctgcagaagctgagtgacttcctgaccctggagggcaggaacagcaagatcaagcaggtggacagcgtgctgaagcacgtgaagaagcacctgcccaaggcccacgtgaaggagctgatctcctggctggtgggccaggagtttgagctggagaagatggagagcatctgccaggcccgggccaaggagctggaggacagcctgcagcagctgctgcggctgcaggatgaccacaggaacctgaggaagtggctgaccaaccaggaggagaagtggaagggcatggaggagcccggggagaagacagagctgttctgccaggccctggccaggaagcgggagcagtttgagagcgtggcccagctgaacaacagcctgaaggagtatggcttcacagaggaggaggagatcatcatggaggccacctgcctgatggaccgctaccagaccctgctgcggcagctgtctgaaattgaggaggaggacaagctgctgcccacagaggaccagagcttcaatgacctggcccatgatgtgatccactggatcaaggagatcaaggagagcctgatggtgctgaacagcagcgagggcaagatgcccctggaggagcgcatccagaagatcaaggagatcatcctgctgaagccagaaggagatgccagaattgagaccatcatgaagcaggccgagagcagcgaggcccccctggtgcagaagaccctgacagacatcagcaaccagtgggacaacaccctgcacctggccagcacctacctgagccaccaggagaagctgctgctggagggggagaagtacctgcagagcaaggaggacctgcggctgatgctgattgagctgaagaagaagcaggaggccggctttgccctgcagcacggcctgcaggagaagaaggcccagctgaagatctacaagaagttcctgaagaaggcccaggacctgaccagcctgctgaaggagctgaagagccagggcaactacctgctggagtgcaccaagaaccccagcttcagcgaggagccctggctggagatcaagcacctgcacgagagcctgctgcagcagctgcaggacagcgtgcagaacctggatggccacgtgcgggagcatgacagctaccaggtgtgtgtgacagacctgaacaccaccctggacaacttcagcaaggagtttgtgtccttcagtgacaagcctgtggaccagattgctgtggaggagaagctgcagaagctgcaggagctggagaaccggctgagcctgcaggacggcaccctgaagaagatcctggccctggccaagtctgtgaagcagaacaccagctctgtgggccagaagatcatcaaggatgacatcaagagcctgcagtgcaagcagaaggacctggagaaccggctggccagcgccaagcaggagatggagtgctgcctgaacagcatcctgaagagcaagaggagcacagagaagaagggcaagttcaccctgcccggccgggagaagcaggccaccagtgatgtgcaggagagcacccaggagagcgctgctgtggagaagctggaggaggactgggagatcaacaagaactttgtggagaatgtgatggctgtgtccaagaactgccaccacagcatgtacatctttgagagcatcgtgaagaacttcatcagtgatgagatgcaggacagcgctgtggagatggccatgagcaagcagctgagcctgaatgcccaggagagcatgaagaacacagaagatgagaggaaggtgaatgagctgcagaaccagcccctggagctggacaccatgctgagaaatgagcagctggaggagattgagaagctgtacacccagctggaggccaagaaggccgccatcaagcccctggagcagacagagtgcctgaacaagacagaaacaggagccctggtgctgcacaacatcggctacagcgcccagcacctggacaacctgctgcaggccctgatcaccctgaagaagaacaaggagagccagtactgtgtgctgcgggacttccaggagtacctggccgctgtggagagctccatgaaggccctgctgacagacaaggagagcctgaaggtgggccccctggacagcgtgacctacctggacaagatcaagaagttcatcgccagcattgagaaggagaaggacagcctgggcaacctgaagatcaagtgggagaacctgagcaaccacgtgacagacatggacaagaagctgctggagagccagatcaagcagctggagcacggctgggagcaggtggagcagcagatccagaagaagtacagccagcaggtggtggagtatgatgagttcaccaccctgatgaacaaggtgcaggacacagagatcagcctgcagcagcagcagcagcacctgcagctgcggctgaagagccctgaggagagagctggcaaccagagcatgattgccctgaccacagacctgcaggccaccaagcacggcttctctgtgctgaagggccaggccgagctgcagatgaagaggatctggggcgagaaggagaagaagaacctggaggatggcatcaacaacctgaagaagcagtgggagaccctggagcccctgcacctggaggccgagaaccagatcaagaagtgtgacatccggaacaagatgaaggagaccatcctgtgggccaagaacctgctgggggagctgaaccccagcatccccctgctgcctgatgacatcctgagccagatcaggaagtgcaaggtgacccatgatggcatcctggcccggcagcagagcgtggagagcctggccgaggaggtgaaggacaaggtgcccagcctgaccacctatgagggcagtgacctgaacaacaccctggaggacctgaggaaccagtaccagatgctggtgctgaagagcacccagaggagccagcagctggagttcaagctggaggagaggagcaacttctttgccatcatcaggaagttccagctgatggtgcaggagagcgagaccctcatcatcccccgggtggagacagctgccacagaagctgagctgaagcaccaccacgtgaccctggaggccagccagaaggagctgcaggagattgacagcggcatcagcacccacctgcaggagctgaccaacatctatgaggagctgaatgtgtttgagcggctcttcctggaggaccagctgaagaacctgaagatccgcaccaaccgcatccagcgcttcatccagaacacctgcaatgaggtggagcacaagatcaagttctgccggcagttccacgagaagaccagcgccctgcaggaggaggccgacagcatccagagaaatgagctgctgctgaaccaggaggtgaacaagggcgtgaaggaggagatctacaacctgaaggaccggctgacagccatcaagtgctgcatcctgcaggtgctgaagctgaagaaggtgtttgactacatcggcctgaactgggacttcagccagctggaccagctgcagacccaggtgtttgagaaggagaaggagctggaggagaagatcaagcagctggacacctttgaggaggagcacggcaagtaccaggccctgctgagcaagatgagggccatcgacctgcagatcaagaagatgacagaggtggtgctgaaggccccagacagcagccctgagagccggcggctgaatgcccagatcctgagccagagaattgagaaggccaagtgcctgtgtgatgagatcatcaagaagctgaatgaaaacaagacctttgatgacagcttcaaggagaaggagatcctgcagatcaagctgaatgctgaggagaatgacaagctgtacaaggtgctgcagaacatggtgctggagctgagccccaaggagctggatgagaagaactgccaggacaagctggagaccagcctgcacgtgctgaaccagatcaagagccagctgcagcagcccctgctgatcaacctggagatcaagcacatccagaatgagaaggacaactgtgaggccttccaggagcaggtgtgggccgagatgtgcagcatcaaggctgtgacagccatcgagaagcagcgggaggagaacagcagcgaggccagtgatgtggagaccaagctgcgggagtttgaggacctgcagatgcagctgaacaccagcattgacctgcggaccaacgtgctgaatgatgcctatgagaacctgacccgctacaaggaggccgtgaccagggctgtggagagcatcaccagcctggaggccatcatcatcccctacagagtggatgtgggcaaccctgaggagagcctggagatgcccctgaggaagcaggaggagctggagagcacagtggcccacatccaggacctgacagagaagctgggcatgatcagcagccctgaggccaagctgcagctgcagtacaccctgcaggagctggtgtccaagaacagcgccatgaaggaggccttcaaggcccaggagacagaagctgagcgctacctggagaactacaagtgctacaggaagatggaggaggacatctacaccaacctgagcaagatggagaccgtgctgggccagagcatgagcagcctgcccctgagctaccgggaggccctggagcggctggagcagagcaaggccctggtgagcaacctgatcagcaccaaggaggagctgatgaagctgcggcagatcctgcggctgctgcggctgcgctgcacagaaaatgatggcatctgcctgctgaagatcgtgtctgccctgtgggagaagtggctgagcctgctggaggccgccaaggagtgggagatgtggtgtgaggagctgaagcaggagtggaagtttgtgtctgaggagattgagcgggaggccatcatcctggacaacctgcaggaggagctgcctgagatcagcaagaccaaggaggccgccaccacagaggagctgtctgagctgctggactgcctgtgccagtacggggagaatgtggagaagcagcagctgctgctgaccctgctgctgcagaggatccgcagcatccagaatgtgcctgagagcagcggggctgtggagaccgtgcctgccttccaggagatcacctccatgaaggagcgctgcaacaagctgctgcagaaggtgcagaagaacaaggagctggtgcagacagagatccaggagcggcacagcttcaccaaggagatcatcgccctgaagaacttcttccagcagaccaccaccagcttccagaacatggccttccaggaccaccctgagaagtctgagcagtttgaggagctgcagagcatcctgaagaagggcaagctgacctttgagaacatcatggagaagctgcgcatcaagtacagcgagatgtacaccatcgtgcctgctgagattgagagccaggtggaggagtgcaggaaggccctggaggacattgatgagaagatcagcaatgaggtgctgaagagcagccccagctatgccatgaggaggaagattgaggagatcaacaacggcctgcacaacgtggagaagatgctgcagcagaagagcaagaacatcgagaaggcccaggagatccagaagaagatgtgggatgagctggacctgtggcacagcaagctgaatgagctggacagcgaggtgcaggacatcgtggagcaggaccccggccaggcccaggagtggatggacaacctgatgatccccttccagcagtaccagcaggtgtcccagagagcagaatgtaggaccagccagctgaacaaggccaccgtgaagatggaggagtacagcgacctgctgaagagcacagaggcctggattgagaacaccagccacctgctggccaacccagctgactatgacagcctgcggaccctgagccaccacgccagcacagtgcagatggccctggaggacagcgagcagaagcacaacctgctgcacagcatcttcatggacctggaggacctgagcatcatctttgaaacagatgagctgacccagagcatccaggagctgagcaaccaggtgacagccctgcagcagaagatcatggagagcctgccccagatccagaggatggctgatgatgtggtggccatcgagagcgaggtgaagtccatggagaagagggtgtccaagatcaagaccatcctgctgagcaaggagatctttgacttcagccctgaggagcacctgaagcacggggaggtgatcctggagaacatccggcccatgaagaagaccatcgccgagatcgtgtcctaccaggtggagctgcggctgccccagacaggcatgaagcccctgcccgtcttccagaggaccaaccagctgctgcaggacatcaagctgctggagaatgtgacccaggagcagaatgagctgctgaaggtggtgatcaagcagaccaatgagtgggatgaggagattgagaacctgaagcagatcctgaacaactacagcgcccagttcagcctggagcacatgagcccagaccaggccgacaagctgccccagctgcagggcgagattgaaagaatggagaagcagatcctgagcctgaaccagaggaaagaagacctgctggtggacctgaaggccaccgtgctgaacctgcaccagcacctgaagcaggagcaggagggcgtggagcgggaccggctgcctgctgtgaccagcgaggagggcggcgtggccgagagagatgccagcgagaggaagctgaacagaagaggctccatgagctacctggccgctgtggaggaggaggtggaggagagctctgtgaagagtgaccatgacaaggacatggaggaggaccgggccagcagcagcagcggcaccatcgtgcaggaggcctacggcaagatcagcaccagtgacaacagcatggcccagatcctgaccccagacagcctgaacacagagcagggccctgagtgcagcctgcggcccaaccagacagaggagggcaccaccccacccatcgaggccgacaccctggacagcagtgatgcccagggcggcctggagccccgggtggagaagaccaggcctgagcccacagaggtgctgcacgcctgcaagacccaggtggccgagctggagctgtggctgcagcaggccaacgtggccgtggagcctgagaccctgaatgctgacatgcagcaggtgctggagcagcagctggtgggctgccaggccatgctgacagaaattgagcacaaggtggccttcctgctggagacctgcaaggaccagggcctgggggacaacggggccacccagcatgaagctgaggccctgagcctgaagctgaagacagtgaagtgcaacctggagaaggtgcagatgatgctgcaggagaagcacagcgaggaccagcaccccaccatcctgaagaagagcagcgagcctgagcaccaggaggccctgcagcctgtgaacctgtctgagctggagagcatcgtgacagagcggccccagttcagccggcagaaggacttccagcagcagcaggtgctggagctgaagcccatggagcagaaggacttcatcaagttcatcgagttcaatgccaagaagatgtggccccagtactgccagcacgacaatgacaccacccaggagagcagcgcccgctaccccaccacagaggagctgaagacctacaccacccagctggaggacctgcggcaggaggccagcaacctgcagacccaggagaacatgacagaggaggcctacatcaacctggacaagaagctgtttgagctgttcctgaccctgagccagtgcctgagctctgtggaggagatgctggagatgccccggctgtaccgggaggatggcagcggccagcaggtgcactatgagaccctggccctggagctgaagaagctgtacctggccctgagtgacaagaagggggacctgctgaaggccatgacctggccaggagagaacaccaacctgctgctggagtgctttgacaacctgcaggtgtgcctggagcacacccaggccgctgctgtgtgccgcagcaagagcctgaaggccggcctggactacaacagaagctaccagaaggcagatgcctacacagtggagctggagaatgctgagagccgggtggccaagctgagagatgaaggagagcggctgcacctgccctatgccctgctgcaggaggtgtacaagctggaggatgtgctggacagcatgtggggcatgctgcgggcccgctacacagagctgagcagcccctttgtgacagagagccagcaggatgccctgctgcagggcatggtggagctggtgaagattggcaaggagaagctggcccacggccacctgaagcagaccaagagcaaggtggccctgcaggcccagatcgagaaccacaaggtgttcttccagaagctggtggccgacatgctgctgatccaggcctacagcgccaagatcctgcccagcctgctgcagaaccgggagaccttctgggccgagcaggtgacagaggtgaagatcctggaggagaagagccggcagtgtggcatgaagctgcagagcctgctgcagaagtgggaggagtttgatgagaactatgccagcctggagaaggacctggagatcctgatcagcaccctgcccagcgtgtccctggtggaggagacagaggagcggctggtggagcgcatctccttctaccagcagatcaagagaaatattggaggcaagcacgcccggctgtaccagaccctgaatgaaggcaagcagctggtggcctctgtgtcctgcccagagctggagggccagatcgccaagctggaggagcagtggctgagcctgaacaagaagattgaccacgagctgcaccggctgcaggccctgctgaagcacctgctgcggagcgccttcctgggcgtgtacaacagagacagcgaccagctgaccaagtggctggagagcagccagcacaccctgaactactggaaggagcagagcctgaatgtgtcccaggacctggacaccatccgcagcaacatcaacaacttctttgagttcagcaaggaggtggatgagaagagcagcctgaagacagctgtgatcagcatcggcaaccagctgctgcacctgaaggagacagacacagccaccctgcgggccagcctggcccagtttgagcagaagtggaccatgctgatcacccagctgcctgacatccaggagaagctgcaccagctgcagatggagaagctgcccagcaggaaggccatcacagagatgatctcctggatgaacaacgtggagcaccagaccagtgatgaagattctgtgcacagccccagcagcgccagccaggtgaagcacctgctgcagaagcacaaggagttcaggatggagatggactacaagcagtggatcgtggactttgtgaaccagagcctgctgcagctgagcacctgtgatgtggagagcaagagatatgaaagaacagaatttgctgagcacctgggggagatgaaccggcagtggcaccgggtgcacggcatgctgaacaggaagatccagcacctggagcagctgctggagagcatcacagaaagtgagaacaagatccagatcctgaacaactggctggaggcccaggaggagcggctgaagaccctgcagaagccagagagcgtcatctctgtgcagaagctgctgctggactgccaggacatcgagaaccagctggccatcaagagcaaggccctggatgagctgaagcagagctacctgaccctggagagcggggctgtgcccctgctggaggacacagccagcagaattgatgagctgttccagaagaggagctctgtgctgacccaggtgaaccagctgaagacctccatgcagagcgtgctgcaggagtggaagatctatgaccagctgtatgatgaggtgaacatgatgaccatccgcttctggtactgcatggagcacagcaagcctgtggtgctgagcctggagaccctgcgctgccaggtggagaacctgcagagcctgcaggatgaggccgagagcagcgagggctcctgggagaagctgcaggaggtgattggcaagctgaagggcctgtgccccagcgtggccgagatcatcgaggagaagtgccagaacacccacaagcgctggacccaggtgaaccaggccatcgctgaccagctgcagaaggcccagagcctgctgcagctgtggaaggcctacagcaatgcccatggagaggccgccgcccggctgaagcagcaggaggccaagttccagcagctggccaacatctccatgagcggcaacaacctggccgagatcctgcccccagccctgcaggacatcaaggagctgcagcatgatgtgcagaagaccaaggaggccttcctgcagaacagctctgtgctggaccggctgccccagcctgctgagagcagcacccacatgctgctgcccggccccctgcacagcctgcagagagctgcctacctggagaagatgctgctggtgaaggccaatgaatttgagaaccacgtgctggccctgacagcccagagcccagacatcgagcacctgaatgaggtgtccctgaagctgcccctgagtgatgtggccgtgaagaccctgcagaacatgaaccggcagtggatccgggccacagccacagccctggagcgctgcagcgagctgcagggcatcggcctgaatgagaagttcctgtactgctgtgagaagtggatccagctgctggagaagattgaggaggccctgaaggtggatgtggccaacagcctgcctgagctgctggagcagcagaagacctacaagatgctggaggccgaggtgtccatcaaccagaccatcgctgacagctatgtgacccagagcctgcagctgctggacaccacagaaattgagaacagacctgagttcatcacagagttcagcaagctgacagaccgctggcagaatgctgtgcagggcgtgcggcagaggaaaggagatgtggatggcctgaatgcccacgtggcccgctgtggcggggccagcctgaagaagcaggacctgcgctacagcctgcacacagcctgtggggccgccctgctgtgccgcagcagccacggggccaacaaggagatccacttccagaggaggaggaccacctgtgccctgaccctggaggccggggagaagctgctgctgaccacagacctgaagaccaaggagagcgtgggccgccgcatcagccagctgcaggacagctggaaggacatggagccccagctggccgagatgatcaagcagttccagagcacagtggagacctgggaccagtgtgagaagaagatcaaggagctgaagagccggctgcaggtgctgaaggcccagagcgaggaccccctgcctgagctgcacgaggacctgcacaatgagaaggagctgatcaaggtggccatcaggaagcaggagattgaggaccggctgaacacctgggtggtgttcaatgagaagaacaaggagctgtgtgcctggctggtgcagatggagaacaaggtgctgcagacagctgacatcagcattgaggagatgattgagaagctgcagaagaggacagtgggccgggaggaggtgcctgagcgctgggagtgtgagaccatcgtgtctggccatggaacagaggagagctgcttcctgagcatcaggaagttccaccagggccggggcctgcacatcctgacctgccagctgatcccccaggactgcatggaggagatcaacctcttcagcgagaacaagctgcagctgaagcagatgggagaccagctgatcaaggccagcaacaagagcagagctgctgagattgatgacaagctgaacaagatcaatgaccgctggcagcacctgtttgatgtgattggcagctccatggctgaccagaccaacagccgctggatgttcttccagtggccccggggcatccagaggacagtgacctggccctgggaccacctgtgcagctgtgccagcacaggccacacaggccccttccacagctctgtgctgcgctgctttgagcagcacattgaatttggcatctacagaaggacctacaaggtgaacaaggagctgggcggggacaagaatggccagcgctgccccatcatctacccccacggcctggtgcagtgcatccggctgggggagcccctcatcctgaagagggtgaagaagctgaaggagacctttgccttcatccagcagctggacaagaacatgagcaacctgcggacctggctggccagaattgaaagtgagctgagcaagcctgtggtgtatgatgtgtgtgatgaccaggagatccagaagaggctggccgagcagcaggacctgcagagggacatcgagcagcacagcgctggggtggagagcgtcttcaacatctgtgatgtgctgctgcatgacagtgatgcctgtgccaatgaaacagaatgtgacagcatccagcagaccaccaggagcctggaccggcgctggaggaacatctgtgccatgtccatggagaggaggatgaagattgaggagacctggaggctgtggcagaagttcctggatgactacagcagatttgaggactggctgaagtctgctgagaggacagctgcctgccccaacagcagcgaggtgctgtacaccagcgccaaggaggagctgaagagatttgagcggcagatccacgagcggctgacccagctggagctgatcaacaagcagtaccgccgcctggccagagaaaatagaacagacacagccagccggctgaagcagatggtgcatgagggcaaccagcgctgggacaacctgcagaggagagtgacagctgtgctgcggcggctgcggcacttcaccaaccagcgggaggagtttgagggcacccgggagagcatcctggtgtggctgacagagatggacctgcagctgaccaacgtggagcacttcagcgagagtgatgctgatgacaagatgaggcagctgaatggcttccagcaggagatcaccctgaacaccaacaagattgaccagctgattgtgtttggagagcagctgatccagaagtctgagcccctggatgctgtgctgattgaagatgagctggaggagctgcaccgctactgccaggagggcctggaggatgagaaggaggcctctgaaaatgaaacagacatggaggacccccgggagatccagacagacagctggaggaagagaggagagagcgaggagcccagcagcccccagagcctgtgccacctggtggcccctggccacgagaggagcggctgtgagacccctgtgtctgtggacagcatccccctggagtgggaccacactggagatgtgggcggcagcagcagccatgaagaagatgaggagggcccctactacagcgccctgagcggcaagagcatcagtgatggccacagctggcacgtgcctgacagccccagctgcccagagcaccactacaagcagatggagggggacagaaatgtgccccctgtgcccccagccagcagcaccccctacaagccaccctacgtgtccctgaacttcaccggcagcacagcctacgtgtgtgcctttgaccgctgggagatgatccaggcccaggagctgcacaacaagctgaagatcaagcagaacctgcagcagctgaacagcgacatcagcgccatcaccacctggctgaagaagacagaggccgagctggagatgctgaagatggccaagccacccagcgacatccaggagattgagctgcgggtgaagaggctgcaggagatcctgaaggcctttgacacctacaaggccctggtggtgtctgtgaatgtgagcagcaaggagttcctgcagacagagagccctgagagcacagagctgcagagccggctgcggcagctgagcctgctgtgggaggccgcccagggcgctgtggacagctggaggggcggcctgcggcagagcctgatgcagtgccaggacttccaccagctgagccagaacctgctgctgtggctggccagcgccaagaacagacggcagaaggcccacgtgacagaccccaaggctgacccccgggccctgctggagtgcagaagagagctgatgcagctggagaaggagctggtggagcggcagccccaggtggacatgctgcaggagatcagcaacagcctgctgatcaagggccatggagaggactgcatcgaggccgaggagaaggtgcacgtgattgagaagaagctgaagcagctgcgggagcaggtgtcccaggacctgatggccctgcagggcacccagaacccagccagccccctgcccagctttgatgaggtggacagcggggaccagcccccagccacctctgtgcctgccccccgggccaagttcctgtacccagctgtgcagagcagcgagaactacagaagaagaggaggagaccgggagcagggcccccggcagcacacagccacagccctgctgcccctgaagggcggccctggcagccccaccccagctgctgcccctcctgctgctgctgcccctggcctgcctgctgccctgctgcggcggcggctgcagctgcacagcggccagcagctgtgccctgtgctgctgccccacgccgaggtgcaccagtgggccaccccccacatcgagggcattgctggccacagcgccaccccaccagcctag

SEQ ID NO: 293298 - DNA, 20475 bp, Artificial Sequence
  derived and/or modified sequence
atggccagcagccccgagctgcccaccgaggacgagcagggcagctggggaatcgatgatctccacatatcactacaagcagagcaggaggatacccagaagaaggccttcacatgctggattaattcacagctagcacgacacactagtccgtctgtcattagtgacctatttacagacattaaaaagggccacgtcctccttgacctgctggaagtcctgtccggacaacagcttccccgggacaaaggcagcaatacttttcaatgccggatcaatatagagcatgctcttacgtttcttaggaatcgtagtatcaagcttataaacatacacgtgactgacattattgacggcaatcctagcattatcctgggtctgatttggaccatcatcctgcatttccacattgagaagctggcccaaaccctgtcatgcaattataatcagcccagtcttgatgacgtaagcgtggtcgattcttctcctgcatcaagtcctccagccaagaagtgttctaaagtgcaggctcgctggcaaatgtccgcaaggaaggcgctcctactgtgggcccaagagcagtgtgccacctacgagtccgtgaatgtaacggacttcaaatccagctggagaaatggcatggccttcctagccattatccatgctcttcggcctgacttgatcgacatgaagagcgtgaagcaccgatcgaataaggataacctcagggaggccttccgcatcgcagagcaggagctcaagatacctcgactgctggagcctgaagatgtggacgtcgtagatccagacgagaaatctatcatgacatacgtggcgcagtttctgcagtattctaaggacgcacctggcacaggggaggaagcgcagggtaaagtcaaagacgctatggggtggctcacgctccagaaggagaaattgcagaaactgctcaaggattccgagaacgacacttacttcaaaaaatataacagtcttctgtccttcatggagagtttcaacgaggaaaagaaatccttcctcgacgtcctaagcatcaaacgggatctggacgaactcgataaggaccacttacagcttagagaggcctgggatggcctcgaccaccagattaatgcatggaagatcaagcttaactacgctctgcccccgcccctgcatcagacagaggcttggctgcaagaggtcgaagagctgatggatgaggacctgagcgcttcacaagaccactctcaggccgtcaccctcattcaggagaaaatgaccctcttcaagagtctgatggacagattcgaacatcacagcaacattctgctgacattcgaaaataaggatgaaaatcatctgccgctggttcctcctaacaagctggaggagatgaagcgcaggatcaacaacattctcgagaaaaagtttatcttgctcctggaattccactattacaagtgtctcgtacttggtttggtggacgaagtcaaaagcaagttagacatttggaatatcaagtatggaagccgagagagcgtagagcttctgctggaagattggcacaaattcatcgaagagaaggagtttttggcacggcttgatacttcttttcagaaatgcggggaaatctacaaaaacctcgcaggagaatgccaaaacattaacaaacagtatatgatggttaaaagtgatgtttgtatgtatcgcaagaacatttataatgttaaatccacccttcagaaagtgctcgcttgctgggcaacttatgtggaaaacctgcggctattgagggcctgcttcgaggagacaaaaaaagaggagattaaagaggtgcccttcgagacactcgctcagtggaacctggaacacgctacccttaacgaggctggaaactttttggtggaggtgagtaatgacgtggtcggaagcagcatttccaaggaactgaggaggctaaacaagcgctggcgcaagctcgtgtcgaagacccagctagagatgaatctgccactgatgatcaaaaagcaagaccagcctacattcgataatagcgggaacatcctgagcaaagaggagaaagccactgttgaattcagcaccgacatgagtgtcgagttacctgaaaactacaatcaaaatatcaaagccggagaaaaacatgagaaggaaaacgaagaattcaccggtcagctgaaagtggctaaggacgtggaaaagttaatcggtcaggtggagatctgggaggcggaagcaaaaagtgtgctggatcaggacgatgtggataccagtatggaggaatccctcaagcacctcattgccaagggtagtatgttcgatgaactaatggcacgttctgaagacatgctccagatggatatacagaatatttcttctcaggaatcttttcaacatgtactgaccaccggcctgcaagccaaaatacaggaagcaaaggagaaagtgcagatcaatgtagttaagctgattgcagccctcaagaaccttaccgacgttagccctgacctggacatacgcctcaaaatggaggagtcacagaaggaactggagagttatatgatgcgcgcccagcagttacttggccaaagggagagccctggggagctaatcagcaaacataaagaagcgctgatcatatcgaatacaaaatcgctcgcaaaatacttaaaggcagtggaggagctgaagaataacgttaccgaggacatcaaaatgagtctggaagaaaagtcaagggatgtctgcgccaagtgggaatcgctgcaccatgagctttctttgtacgttcagcagttaaaaatcgacatagaaaaaggtaagttgagcgataacattctgaagttggagaagcaaatcaataaggagaaaaagctgatcagaagggggcgcacgaaagggctcatcaaagagcacgaggcgtgtttttccgaggagggctgtctgtaccagctcaatcaccacatggaagtgctcagggagctgtgcgaggaactgccaagtcagaagagccagcaggaggttaagcgcctcttaaaggattacgagcagaaaatcgagcggctgctgaagtgtgctagtgagatacacatgaccctgcagcctaccgccggcggtacgagtaaaaatgaggggaccataaccacctccgaaaatcgaggcggggacccacatagcgaagctcccttcgctaaatccgataaccaaccatcaacggagaaagcaatggagcccacaatgaagttcagcctggcctctgtgctgcgccctctccaggaagaatccatcatggagaaggactacagcgcatctattaattcgctcttggagcggtacgatacctacagagatattctcgaacaccaccttcagaacaataaattcagaatcacttctgatttctcatccgaagaagacagatcctcatcctgcctccaagccaagcttactgacctgcaggtgataaaaaatgagactgacgccagatggaaagaatttgagatcatcagtctgaagctggagaaccacgtcaacgatattaagaagcccttcgtgatcaaggagcgagacactctaaaggagagggaacgcgagctgcagatgacgctgaacactaggatggaatctctggaaaccgccttacggttggttcttcctgtggagaaggcttcactcctgctgtgtggctccgaccttcctctccacaaaatggccatacagggctttcacctaatcgatgccgaccgtatctatcagcaccttcgaaacattcaggactccattgccaaacagatcgagatctgtaaccgacttgaggagccaggaaacttcgttctgaaggagctgcatccctttgatctgcacgccatgcagaacataattctgaagtataaaacacaattcgaaggcatgaatcacagggtgcagaggagcgaagatacactgaaggctttagaagactttctggcatccttaaggaccgccaaactgtccgccgaaccagtaaccgacctgagcgctagtgatactcaggtcgcccaggaaaatactctgactgtgaagaataaagaaggtgagattcatcttatgaaggacaaagcaaagcacttagacaagtgtctgaagatgctagatatgagttttaaagatgccgagcgtggagacgacaccagctgcgaaaaccttcttgacgccttcagcataaagctgtctgagacccacggatacggggttcaagaagaatttaccgaggagaataagctactcgaagcgtgtattttcaagaataacgagctccttaaaaacatacaggacgtgcagtcgcagatcagcaagatcggactcaaagatcctacagtaccggcagtgaagcacaggaagaaatctttgattcggttggacaaagtgctagatgagtacgaagaagaaaagcgccacttacaagaaatggcgaacagcctcccccattttaaagatggccgcgaaaagaccgtcaaccagcagtgccaaaataccgtggtactctgggagaacacaaaggcactggtgactgagtgtctcgagcagtgcggtcgagtgcttgaacttctaaagcagtaccagaattttaaaagtatcctgacaaccctaatccagaaggaagaatcagtgatctcgctacaggcaagctatatgggcaaggaaaacctcaagaaaaggatcgccgaaattgaaatcgttaaagaagagtttaatgaacaccttgaagttgtagataagattaaccaggtgtgtaagaacctccagttttatttgaacaaaatgaaaacctttgaggagccacctttcgaaaaggaagccaacattatcgtggaccgttggctcgacatcaacgagaaaacggaagactattacgagaatctagggcgagccctggcactctgggacaagctgttcaatctgaagaatgtgatagatgagtggactgagaaggccctccagaaaatggagctgcaccagctgacagaggaagacagggagagactgaaagaggagcttcaggtgcacgagcagaagaccagtgaattttctcgaagagtagcggagattcaattcctgcttcagagtagcgagataccacttgaattgcaagttatggagtcttcgatattgaataaaatggaacacgtgcagaaatgccttactggggagtctaattgccacgccctctctggctctaccgccgagctgcgggaggatctggatcaggcgaaaactcagatcggcatgactgaatctctgctcaaagcattgtcccccagtgactctctggaaatctttacaaaattagaggaaatccagcagcaaattctgcagcagaagcactccatgatccttttggaaaatcagattgggtgcctcacccctgaactgagcgagttgaagaagcagtacgagagcgtgagtgatttgttcaacacaaagaaaagtgtactacaagatcatttttctaaactgctgaatgaccagtgtaagaattttaatgattggttctcaaatataaaggtcaaccttaaggagtgtttcgaatcatccgagactaaaaagtcagttgaacagaaactgcaaaagttgagtgatttcttgacacttgaaggacgaaattcgaagatcaagcaggttgattccgtgctcaaacatgtgaaaaaacatctccctaaagcgcacgtgaaagaacttatttcatggctggtgggacaagagttcgaactggagaaaatggagagtatctgccaggcccgagcaaaggaactagaagatagtctgcagcaattgcttcggctgcaggacgatcatcggaacctccgcaagtggctgacaaaccaagaagaaaagtggaaggggatggaggagcccggagagaagactgaacttttctgccaagccctcgcgagaaagcgagagcagtttgagagtgtcgcacaactgaacaactccctgaaagaatatggattcactgaagaagaagagataattatggaggcaacatgtctcatggaccggtatcagacactgctcaggcagctttcagagattgaggaggaagacaagcttttgccaacagaagatcagtcgttcaacgacctcgctcacgacgtcatccactggattaaggaaatcaaggaaagtctgatggtgctcaatagttccgagggcaagatgccattagaagaacgcattcagaaaatcaaagagatcatcttgctcaagcctgaaggagacgcacgtatcgagacaataatgaagcaggccgagagctccgaggcccccctggtgcagaaaactttgaccgatatctccaatcaatgggataatacactgcatctcgcctctacctacttatctcaccaagagaagcttctgttggagggggagaaatatctgcagtctaaagaggatctgcgtctgatgctaatagaactgaaaaagaaacaggaggccggcttcgccctgcagcacggcctgcaggaaaagaaggcccagttgaagatttataagaagttcctcaagaaagcacaggacctgacatctttacttaaggagctgaaatctcagggtaattatctgttagagtgtacaaaaaacccatcatttagcgaggagccatggctggaaattaagcacctgcatgagtccctgctgcagcagcttcaagacagtgttcagaatctggacggacatgtgcgagagcatgatagctatcaggtctgtgtgactgacctgaataccacactggataattttagcaaggagttcgtctccttttctgacaagccagtggaccaaattgccgtggaagaaaagttgcaaaagctccaggaactggaaaataggctgagtttgcaagacgggacccttaaaaagatccttgcactcgcaaagtccgtgaagcagaatacatcgagcgtcggacagaaaattattaaggacgacatcaaatctttacaatgtaaacagaaagatcttgagaacaggctggccagcgcaaaacaggaaatggagtgttgcttgaactcaatcttgaaaagcaagcgctccacagagaaaaagggcaagttcaccctgccagggcgcgagaagcaagcaacttctgacgtccaggaaagtacacaagagagtgctgcagtagaaaagctggaagaagactgggagattaacaagaacttcgtcgagaacgtgatggcagttagcaaaaattgccaccacagcatgtacatttttgaaagtattgtgaagaacttcatctccgatgagatgcaagactcggctgtggagatggccatgtcaaagcagctctcccttaacgctcaggagagtatgaagaacaccgaagacgaacgtaaggtgaatgaactgcagaatcagccactggaattggacaccatgctccgtaacgagcaactcgaggaaatagaaaaactgtatacccaactcgaggcaaagaaagcagcaataaaaccgctcgagcagaccgaatgtcttaacaaaaccgagactggagcactggtactccacaacatcgggtacagcgcgcagcatttggacaatctgcttcaggccctgattacactgaagaagaacaaagaatctcagtactgtgtgctacgggacttccaagagtatctggcagctgtcgaaagttccatgaaagctttgctgacagataaagaatccctgaaagtgggccccttggactcagtgacttaccttgacaagataaagaaatttatagctagtattgaaaaggagaaggatagtctcggcaacctgaaaatcaaatgggaaaacctgtcaaatcacgtgacggacatggataaaaagttgctggagtctcagattaagcagctcgagcatgggtgggagcaagtcgagcagcagatccagaagaagtacagccagcaggttgtcgagtacgacgagttcaccactctcatgaacaaggtgcaggatactgaaataagcttacagcagcaacagcagcatctccaactgcggctgaaatccccagaagaaagagccggcaatcagtctatgattgctctgactacagaccttcaggctacaaagcacgggtttagtgtactgaagggacaagctgaactgcagatgaaacggatttggggggagaaggaaaagaagaatttggaggacgggatcaataatctgaagaagcagtgggagaccctggagcctctgcatctcgaagctgagaaccagatcaagaaatgtgatattcgcaataagatgaaggagaccattctttgggctaaaaaccttctcggggaacttaatcccagcataccactgttgcccgatgatatcctcagccagatccgcaagtgtaaagttacacacgatgggattctggcacgccaacagagcgtagaatccctggcagaggaggtgaaggacaaggtgcccagcctgactacatacgagggaagcgatcttaataacactttagaagacctgcggaatcagtatcaaatgctggtcttaaagtcaacccaacgaagtcagcagttggaattcaagctggaggagaggtccaacttttttgccatcattcggaagttccaactgatggtgcaggagtccgaaacactcattatcccgcgcgtagagaccgcagctacagaagcagaattgaaacaccatcatgtaaccctcgaagcttcacagaaagagcttcaggagatcgattctgggatttcaacacatctccaggaactgactaatatctacgaggagctgaatgtgttcgagcggctgttcctggaagaccagttgaagaaccttaaaatccgcacaaatagaatacagaggttcatccagaacacctgtaatgaagttgaacacaagatcaagttctgtagacagtttcacgagaaaacatccgcccttcaagaggaggccgatagtatccagcgcaatgaactgctgctgaaccaggaggtgaacaagggcgtaaaagaggaaatttacaacctcaaagatcggctcaccgctattaagtgctgcattttacaggtgttgaagttgaaaaaggtattcgattatattggcctcaactgggacttctcccagttggaccagctgcagactcaagtatttgagaaagagaaggagttagaagaaaagataaaacagctggatacattcgaagaagagcatggaaagtatcaggccctcctctccaaaatgagggctatcgacctgcagataaaaaagatgacagaagtcgtgctcaaggctccagactcttccccagagtctcgcaggctgaacgctcagatcctttctcagcgaatagaaaaggcaaaatgtttatgtgatgagattattaagaaactgaacgaaaacaagactttcgatgattccttcaaggagaaggaaattcttcaaatcaaattgaacgcggaagaaaacgataagctctacaaggtgttgcaaaatatggtgctggagttaagtcccaaagagttggatgaaaagaactgtcaggacaaactagagacatctctacatgttctgaaccaaatcaaaagccagctccagcagcctctcctgatcaaccttgagattaaacacattcagaatgaaaaggacaactgcgaggctttccaagagcaggtatgggccgagatgtgctccattaaggctgtgaccgctattgaaaagcaacgcgaagaaaattcaagcgaagctagcgacgtagagaccaaacttagggagtttgaggacctgcagatgcaactgaacacttccatcgaccttaggaccaacgtgctgaacgatgcttatgagaatctaactagatataaagaggcggtcacaagggccgtggagtccatcacaagcctggaggccattattatcccctatagggtggacgtgggaaacccagaggagagcctagaaatgcctctcaggaaacaggaggaactggagtctacagtggctcacatccaggatctaacagagaaactgggaatgatctcttcgccagaggccaaactccagctacagtacaccctccaggaactagtgtcaaaaaatagcgctatgaaggaggcctttaaagcccaagagacggaggcggagcgttacctggagaactacaaatgttaccgcaagatggaggaggatatttataccaacctctccaaaatggaaaccgtgctggggcagtcaatgtcatcactgcctctgagttacagggaagcacttgaacgtctagaacaaagtaaagccctagtgtccaacctaatcagcactaaagaggaactgatgaagttgcggcaaatcctacgcctcttgagactccggtgcaccgagaacgacggcatttgcctgctgaagatcgtgtcagccttgtgggaaaagtggctaagtctcttagaagcagcaaaggaatgggaaatgtggtgtgaggaactgaaacaggaatggaaattcgtttcagaggagatagagagggaagctattatcctggataatttacaggaagaattacccgaaatttccaagactaaagaggcggccactactgaagagctgtccgaactgctggactgcctctgccagtacggcgaaaatgtagaaaagcagcaactcctcctaaccttgctgctgcagagaattagaagcattcagaacgtgccagaatccagtggagccgtagagaccgtgccagcattccaggagattacctccatgaaggaaagatgtaataagctgcttcagaaggtccaaaagaacaaggagttggttcagacagaaattcaggagcgccactcattcaccaaagagattatcgccctgaaaaactttttccagcaaaccaccaccagctttcagaacatggcgtttcaggaccatcccgagaagagcgagcagtttgaggaactgcagtctatcctgaaaaaaggaaaactcactttcgagaacatcatggagaagctgcggattaagtattccgaaatgtatacaatagtgccggctgaaatcgaaagtcaggtggaggagtgtcgtaaggccctcgaggatattgacgaaaagattagcaatgaagtactgaaatcttcccctagttatgccatgcggaggaaaatagaggaaattaacaacggactgcataacgttgagaagatgttgcagcagaagtccaagaatattgagaaggctcaggagattcagaaaaaaatgtgggacgagctcgatctttggcattcaaagctgaacgagcttgactccgaagttcaggatatcgtggagcaggatcccggacaggctcaagaatggatggacaatctaatgattccatttcagcagtatcagcaagtgagccaacgggccgagtgcaggacaagccagctcaacaaggcgacagtcaaaatggaggaatactcagatctgctgaaaagtaccgaggcctggatcgaaaataccagccatctgctggccaatcccgcagattatgatagtttgcggaccctgtcccaccacgcaagcacggtgcagatggcattggaggattctgagcagaagcataacctgctccactccattttcatggacctcgaagatctgtctattatatttgagaccgatgagttgacacagtcaattcaggagcttagcaatcaggtcacagccctgcagcaaaagatcatggaatctctcccccaaatccaacgcatggcagatgatgtcgtcgccatcgagtcagaagtcaaaagcatggaaaaaagagtctctaaaataaagacgattctcttatccaaagagatattcgactttagcccggaagaacatcttaaacatggcgaggttatcctggagaacatccgtcccatgaaaaaaactatcgccgaaatcgtgtcttatcaagtggaactcagactgccacagactgggatgaagccattgcccgtcttccagcggacaaaccaacttctgcaagatattaaacttttggaaaatgtgacccaggagcagaacgaactgttgaaggttgtaattaaacaaacaaacgaatgggacgaggaaatcgagaaccttaagcaaatacttaataactacagtgcacagttctccctggaacatatgtctcctgatcaggcagataaattgcctcagctgcaaggcgaaattgagaggatggaaaagcaaatcctctctttgaaccaaaggaaagaagatcttctcgtggacctaaaggccactgtgctcaacctccaccaacacctcaaacaggagcaagagggagttgaacgcgatcggttgcctgctgtgacctccgaggagggcggcgttgctgagcgggatgcatcagaaaggaaactgaatcgacggggaagcatgtcctacttggcagccgtggaggaagaggttgaagaatcatcagtaaaatctgatcacgataaagatatggaagaagacagggcctcctcctctagtgggacaatagtgcaggaggcttacggtaaaatctcaacctccgacaactctatggcccagatactaacccccgactcactgaatactgagcaaggtcctgagtgttcccttcgacccaaccagactgaagaggggactacccctccaatagaagcggataccctggactcctcagacgcacagggcggcctggaaccccgcgtggagaagacgcgacctgagcccactgaagttctgcatgcctgtaagacccaggtggctgagttggagctttggctgcaacaggctaatgtggcagtggagccagagaccctgaacgccgatatgcaacaagtcctcgaacagcagctggtgggctgccaggcaatgctgaccgaaatcgagcataaggtggcctttctgttagaaacctgtaaagaccaagggcttggagacaatggtgctactcagcacgaggcagaggcacttagcctgaagctgaagaccgtaaagtgtaatctggaaaaggttcaaatgatgttacaagagaagcacagtgaagaccagcatccgacaatcttgaaaaagtcctctgagccggaacatcaagaggcccttcagcctgttaacctctctgagctcgagtcgatcgtgactgaacggcctcagttctctaggcaaaaggacttccaacaacagcaagtgcttgagctgaagcccatggaacagaaggactttatcaaatttattgaattcaatgctaaaaaaatgtggccccagtactgtcagcacgataacgataccacccaggagtcatccgcaagataccccacaaccgaggagttgaagacttatacaacccagctggaggatctccggcaggaagcctccaacctgcaaactcaggaaaacatgactgaagaggcatatatcaacctagacaagaaactgtttgagttgttcctaactctctctcagtgtctgagcagtgtggaggagatgttggagatgccccggctttaccgggaggacggatctgggcagcaggtgcattatgaaaccttggcgctcgagctgaagaaactgtatcttgcgcttagcgataagaagggtgaccttttgaaggcaatgacttggccgggggaaaatacgaatttgttactggagtgtttcgacaacttgcaggtgtgtttggagcacacacaggcggcagcagtgtgccgatctaagagcctcaaagcggggttggattacaatcggtcgtaccaaaaggccgacgcttatactgtcgagctggagaacgctgaatcaagggtggcgaaactgagggacgagggagagaggcttcacctcccgtatgccctgctgcaagaagtgtacaaactggaagacgtgctggatagcatgtgggggatgttgcgtgccaggtacacagagctgtctagcccgtttgtgactgagtcacagcaagatgcactgctgcaagggatggttgagctggtaaagataggtaaagaaaagctggcccacggccatctgaaacagaccaagtccaaggtggctttgcaggcacagattgagaaccacaaagtattctttcagaagttagtggctgacatgttactcatacaggcatattctgccaagatcttaccaagcctcctgcagaatcgggagaccttctgggctgagcaagttacagaagtgaagatattggaggaaaagtcccggcagtgcggcatgaaactgcaatcattgctccagaagtgggaggagtttgacgaaaactacgcatcactggagaaggaccttgagatcctgatcagtactctccctagcgtctcactggtcgaggaaacagaagagcgtctggtggagcgaatctctttctaccagcagatcaaacgcaacattggaggtaaacacgctcggctttaccagactttaaatgaggggaagcagctggtagcaagtgtgagttgccccgagctggagggccagatcgcaaagctggaagagcagtggttgtccctcaacaaaaaaatcgaccacgagctccatagactgcaagcgctgctgaagcacctcctacgtagtgctttccttggcgtgtataatcgcgatagcgaccagctgacaaaatggcttgagagctctcagcataccctgaactactggaaggagcagtctctcaatgtctctcaggaccttgacacaattcggtctaacataaataactttttcgagttttcaaaggaggtggacgaaaagtcgagcctcaagaccgctgtgatcagcatcgggaatcagctgttgcatctgaaagagactgacacagctaccttgagggcctccctggcccaattcgagcagaagtggacaatgttgattacacaactccccgatatccaagagaagctgcatcagctgcaaatggaaaaacttccctctcgaaaggctattactgaaatgatctcctggatgaacaatgtggagcaccaaacttccgatgaggacagcgtacattcaccctccagcgcttcccaggtgaagcacctactacagaagcataaagaattccgaatggaaatggactacaagcaatggatcgtcgacttcgttaaccaatcactgttgcaacttagcacctgtgatgtcgaatccaagagatacgaacggacagaattcgccgagcacctgggagagatgaacagacagtggcacagagtacacgggatgttaaacagaaaaatccagcatttggaacagctgttagaatccataactgagagcgagaacaagattcagattcttaacaattggctcgaagctcaggaagagaggctgaaaactctgcaaaagcctgagagcgttattagcgttcagaaactgcttttagattgtcaggacatagaaaaccagcttgccattaagtcaaaggcattggatgagcttaaacaatcttaccttactttggaaagtggagccgtccctctgctagaggacaccgcatccagaattgacgagctgttccaaaagagaagctcggtactgacacaggtgaatcagctcaaaacctctatgcagagcgtccttcaggagtggaaaatttatgatcagctgtacgatgaagtaaatatgatgactatccgattttggtattgcatggagcactccaaaccagtggtgctgtctctggaaaccctgcggtgtcaggtagagaatctgcagagcctccaggatgaggccgagtcttccgagggctcttgggagaagctccaagaggtgattggcaaactgaaggggctgtgtcccagcgtcgccgaaatcatcgaggaaaagtgtcagaacacgcacaagcggtggactcaggtaaatcaggctattgctgaccaattgcagaaggctcagagcctcctgcagctgtggaaagcctatagtaacgcacacggagaagctgcggctcgtcttaaacagcaggaggcaaaattccagcagctagcaaacattagtatgagcggcaacaatctggccgaaatactcccccccgcactgcaggacattaaagagctgcagcacgacgtgcagaaaacaaaagaagcgttcttacagaattcctctgttctggacaggcttccacagcctgctgagagcagtactcacatgctcctgcctgggccccttcatagtctccagagagctgcgtacttggagaagatgctccttgtgaaagcgaacgagttcgaaaatcacgtgctggccctgaccgctcaaagtccagacattgagcatttgaacgaagtctctctgaagttgccactttccgacgtcgccgtaaaaacactgcagaatatgaatagacagtggataagagccactgcaaccgctttggagcggtgcagtgagctgcaaggtattggtctaaatgagaaatttttgtattgttgtgagaaatggatccaactgctagaaaagattgaagaggcgctcaaggtagatgttgccaactcactgcccgaattactggagcagcagaaaacatataagatgcttgaagcggaggtgtctattaatcaaactattgctgactcctacgtgacccagtcactccagctgctggacactacagagattgaaaacagacccgaattcattacagagtttagcaaattaacagaccggtggcaaaacgctgtccaaggcgtccgacagagaaagggagatgtcgacggactgaatgctcatgtcgcacgatgtggaggggcaagcttgaagaagcaagatctgcgatattctctgcacacggcttgcggagcagcactactgtgccgaagcagccacggcgctaataaggagatccattttcagaggagacggacaacttgcgctctgacattagaggctggggagaaattactgctcactaccgacttgaaaaccaaagaatctgtaggccggaggatttcgcaactccaggatagttggaaagacatggaaccgcagctggcagaaatgattaaacaattccaaagcactgttgagacttgggaccagtgcgaaaagaaaattaaggagttgaagagccgactgcaagttctgaaggcccaatcagaggatccccttcctgagctccatgaggacctgcacaacgaaaaggaattgattaaagttgccattcgcaagcaggagattgaagatcggttaaatacatgggtggtgttcaatgagaaaaataaggaactgtgcgcctggttggtgcaaatggaaaacaaggtgctgcagacggccgacatcagcatcgaggaaatgattgagaagcttcagaagcgaactgtaggcagagaagaggtccctgagaggtgggagtgtgagacaatcgtcagtgggcacgggacagaggagtcttgtttcctcagtatccggaaatttcatcagggccgcggactgcatatactgacgtgtcagttgattccccaagattgtatggaggagatcaatctcttcagcgagaacaagctgcagttaaaacagatgggggatcagcttatcaaggctagtaataagtctagggccgctgagattgacgacaaactgaacaagattaacgataggtggcagcatctctttgatgtgattggttcatccatggccgatcagaccaactcacgttggatgttcttccagtggccccggggtatccaacgaactgtgacctggccctgggaccatctgtgctcctgcgccagcaccggacataccggccccttccacagcagcgtgctgcggtgcttcgaacagcatatcgaatttggcatctacaggcgcacctacaaggtgaataaggagcttgggggagacaagaatggccagcggtgtcccattatttaccctcacgggctggtgcagtgtatcagattaggagaacccctgatcttgaaaagggttaagaaattgaaagagaccttcgctttcattcagcagctggataaaaacatgtcaaacttgcgaacctggctggctcgcattgaatcagaattgtcaaaacccgtggtttatgatgtgtgtgacgaccaggagattcagaagcgcctcgccgagcagcaagacctacaaagagacatcgaacagcattccgcgggcgtggagtctgttttcaatatctgcgacgtgctactgcacgactcagacgcatgtgcaaacgaaaccgagtgcgatagcatccagcaaacaacccgctcactagatcggagatggaggaacatttgcgcgatgtcaatggagcgaaggatgaaaattgaagaaacatggagattgtggcagaagttcctagacgattattcccgatttgaagattggttgaagagcgccgaacgcacagccgcctgcccaaactcatctgaggtgttgtacacctctgctaaagaagaactgaagagattcgaaaggcaaatccacgagcgactgactcagttggaacttatcaacaagcagtatcgcagactggcccgagaaaatcgcactgatactgcgtcacgactaaaacaaatggtacatgagggcaatcagaggtgggataatctgcagcgaagggtgaccgccgtacttaggagactacgccacttcacaaaccagagggaggaatttgaaggaactagggaatctattctggtgtggctgaccgaaatggatctgcagctgactaacgttgaacacttttccgaatcagacgcagacgataagatgcgccagctgaacggattccagcaggaaattaccctgaacaccaataaaattgatcagctgatagtgttcggggagcagctgattcagaaatctgaacccttagatgccgtgttaattgaagatgaacttgaggagctccatcggtactgtcaggaaggtctggaagacgaaaaggaagcatctgagaacgaaaccgacatggaagatcctcgtgagatccaaacggactcctggcgcaaacgcggtgaaagcgaggagccgagcagccctcagtcactgtgccatcttgtggcaccaggacacgaacgtagcggatgcgaaacccctgttagcgtagactcaatcccgctagagtgggaccatacgggcgacgtgggagggtcatccagccatgaggaagacgaggaggggccatattactctgcgctaagcggaaaaagcatctcagatggccactcttggcatgtccccgactccccgagctgcccagagcaccattataagcagatggagggagataggaatgttcccccagtccccccagcctccagcactccttataagccaccatatgtttcgctgaactttactggcagcactgcctacgtttgtgcattcgatcgctgggagatgatacaagcccaggagctacataacaagctgaaaattaaacaaaacctgcagcagttaaactcggatatctccgcaattacaacatggttgaaaaaaacggaggctgagttagaaatgcttaagatggcaaagcctccaagcgacatccaggagatcgaattacgagtcaagaggctgcaggagatcctgaaggcatttgatacatacaaggctttggtggtctccgtgaacgtatcttccaaagagttcttgcagaccgagtcaccagagagcacagaattgcagtccaggctgcgacagttgtctttactctgggaggctgcacagggagccgtcgacagttggcgtggcgggctcaggcaatccctaatgcagtgtcaagatttccaccagctgagccagaacttgctactttggctggcgtctgcaaaaaaccgacgccagaaggcgcatgtcactgatcccaaagcagacccaagagcgctcttggagtgtcggagagagctcatgcaactagagaaggagctcgtggaaagacagcctcaagtcgatatgctgcaggagattagtaattctctactgattaaaggacatggtgaggactgtatagaggccgaggagaaggtgcatgtaatcgaaaagaagttaaagcagctgcgcgagcaggtgagccaagatctgatggctttgcagggaactcagaatcccgcctcccccctcccaagcttcgacgaagttgactcaggagaccagcctcctgccacatccgtgcccgcccccagggcaaaatttctgtacccagctgtgcagagcagtgaaaattatcggagaagggggggggatagggagcagggcccccggcaacatacagctacggcccttttgcccctgaagggagggccaggaagtcccactcccgccgccgcacccccagctgctgccgcacctggacttccagcagctttattgcggcgacggctacaattgcatagcggtcagcagctgtgcccagtcttgttaccacacgctgaggtgcatcagtgggctaccccccacatagaagggatagcgggccatagcgccacccccccagcttag

SEQ ID NO: 293299 - DNA, 20474 bp, Artificial Sequence
  derived and/or modified sequence
atggcttcatctcccgagctgcctactgaagacgagcaaggcagctggggcatcgacgatctgcacattagtctacaggctgagcaagaagacacacagaaaaaagcttttacctgctggattaattcccaactggcacgccacacctccccgagcgtaatatcagatctcttcactgacatcaagaaaggccatgttctgcttgaccttctagaagtgttatcaggccagcagctccctcgtgacaagggttccaacacgttccaatgccgaattaacattgagcacgccctaactttcctaaggaaccggagcatcaaactgataaacatacatgtgacggatatcatcgacgggaatcctagcatcatcttaggtttaatctggactatcatcctccacttccacattgaaaaactggctcagactctctcttgcaactataaccagccgagcctggacgatgttagcgttgtggacagttctcccgcaagcagcccaccagccaagaaatgctctaaagtccaagccaggtggcaaatgagtgccagaaaggccctgcttctctgggcccaagaacaatgcgccacctacgaatccgtgaacgtgaccgacttcaagtctagctggcgcaatgggatggctttcctggcaattatccacgccctcaggcctgacctgattgacatgaagtctgtgaagcaccgttcaaacaaggacaacctccgcgaagcctttcgcatcgctgagcaggagcttaaaattcctagactgttagaaccggaagacgttgatgtggtggatcccgatgagaaaagcatcatgacgtatgttgctcagtttctacagtatagcaaagacgctccaggaacaggcgaagaagcccaggggaaagtcaaggatgccatgggatggctcacactgcaaaaagagaaactccagaagcttctgaaagactccgagaacgacacatacttcaaaaagtacaacagcctgttgtcattcatggagtcttttaacgaagaaaaaaagagctttctggacgtgctcagtattaaaagggacttagatgagttggataaggaccatctacaactgagagaggcatgggacggcctcgatcaccagataaacgcgtggaaaatcaagctaaattacgcattaccgcctccactgcatcagaccgaggcttggcttcaggaagttgaagaattgatggatgaagatcttagtgcttcacaggaccactcccaagcagtgaccttgatacaagagaagatgactctcttcaaaagtttgatggatcggtttgagcaccatagtaatatcctgttaacatttgagaacaaggacgaaaaccatcttccgttggttccgccaaacaaacttgaggagatgaagcgccgaattaacaatattcttgaaaaaaagtttattctgcttctcgagttccactactataaatgcttagtgctgggccttgtggatgaggtgaagagcaaactggacatctggaatataaaatatggatcgcgtgagtctgtggagcttttgcttgaagactggcacaagtttatcgaagaaaaggaatttttagctcgtctggacacatcattccagaagtgcggcgagatttacaaaaacctcgccggtgaatgtcaaaatatcaacaaacagtacatgatggtcaaatccgatgtgtgtatgtacagaaaaaatatatacaatgtgaaatcaactctgcagaaagtgctcgcctgctgggcgacttacgtggagaatctgaggcttctgagagcatgctttgaagagaccaaaaaggaggagatcaaggaggtgccgtttgaaaccctggcacagtggaacctggaacacgccacactcaacgaagcagggaatttcttagttgaggtctcaaacgacgtcgttggttcctctatatccaaagagctgagaaggttgaacaagaggtggaggaagctagtttctaaaactcagctggagatgaacctgccactgatgatcaaaaagcaggaccagcccactttcgacaattcaggcaatatattgtctaaagaggagaaggctacagtggaattctcaacagatatgagcgtggagctccctgagaattataaccagaacatcaaggctggggaaaaacatgagaaggagaatgaggaatttacaggccagctgaaggtggccaaagatgtggagaagctgattgggcaggtagagatctgggaagccgaggctaaaagcgttttggaccaagacgatgtcgatactagtatggaagagtccctgaagcacctcatagccaaaggaagtatgtttgatgagctgatggctcggagcgaggatatgttacagatggacatccaaaatatttcctcacaggagagcttccagcacgtcctgactacaggactgcaggctaagatacaagaggccaaggagaaggttcagattaatgtggttaaactcattgcagcactgaagaatctcaccgatgtgtcccctgatcttgacattaggctaaagatggaagaatcacagaaggaactggagtcctatatgatgcgcgctcaacagttgttgggccagcgggaaagccctggcgagctaataagcaagcacaaggaggccctcattatcagcaacacaaagagtctggctaagtacttgaaagccgtcgaggagctgaaaaataatgttacagaggatattaagatgtctttagaggagaagtccagagacgtctgtgcaaagtgggaaagtctgcaccacgagctctctctgtacgtacagcaactgaagattgacatagaaaagggaaagctttcggataacattttgaagctggagaagcagatcaataaggaaaaaaaattgattagacgcggacggaccaaaggactgatcaaggagcacgaggcttgcttctcagaggaaggctgcctatatcagctgaaccaccatatggaggtcctcagagagctctgtgaggagcttcccagtcaaaagagtcagcaggaagtaaaaagactgcttaaagactacgaacaaaagattgagcgcttgcttaagtgcgcttcagagattcacatgaccttacagcccacagccggtggaactagcaaaaatgaagggactatcacaacctcggagaaccgagggggagaccctcattccgaggccccttttgctaagtcagacaaccagccctctacagagaaggccatggagcctactatgaaatttagcctcgcttctgtgctgcgccctttgcaagaggagtccatcatggaaaaagattactcggctagcatcaactctctgttggaaaggtacgacacataccgcgatatactcgagcatcacttacaaaacaataagttccgcattacaagtgacttcagctccgaggaggatcggtctagtagctgcttgcaggccaagttgacggacctccaggttattaaaaacgaaaccgacgctagatggaaggaattcgaaatcatcagccttaagctggagaaccatgttaatgatatcaagaaaccatttgtaatcaaggagagagatacccttaaggaacgggagcgggaactgcagatgacgctcaacacacgtatggagtcgctggagaccgcactgcggttagtattgcctgtagagaaagcgtccctgctgctttgcgggagcgatctgcccctgcacaagatggctatccaggggtttcatcttattgatgctgatagaatttatcaacaccttcgcaacattcaggactccatcgctaagcagatagaaatctgcaaccggctggaagagcctggtaattttgtcctgaaggaacttcacccctttgatctccacgctatgcaaaatattatcctgaagtataaaacacagttcgagggcatgaaccaccgcgtccagaggtctgaggatactctcaaggcacttgaggattttctggcgagcctccgcacagccaaacttagtgctgagcccgtgacagacctgagcgcctctgacacccaggttgcccaggagaacacactgaccgtaaagaataaggaaggagaaatacacctgatgaaagataaagcaaagcacctagataaatgtctgaaaatgttagatatgtcattcaaagacgcagaaaggggagacgatacatcttgcgagaatctacttgacgccttctccatcaaacttagcgagacccatggctacggggttcaagaggagttcacagaagaaaataagctgctggaggcttgcatctttaaaaataatgaactgctgaagaacatacaggacgtgcaatcacagatcagcaaaatcggcttgaaggaccccactgtacctgccgttaagcaccgaaaaaagtctcttatccggctggataaagttctcgacgagtacgaagaggagaagcgtcacttacaggagatggctaactctctgcctcacttcaaagatgggcgagagaagaccgtgaatcagcaatgccagaacaccgtcgtactgtgggagaacacgaaggctttagtgaccgagtgcctcgaacagtgtggcagggtactggagctgctgaagcagtaccagaatttcaaatctattttgactacactgattcagaaggaggagtccgtcatctccctgcaggcctcatatatgggcaaagaaaatctgaagaagcggatcgccgagattgaaatcgttaaagaggagttcaacgagcatctcgaagtggtggataaaataaaccaagtctgcaaaaatctgcagttctatctcaacaagatgaaaaccttcgaggaacctccgttcgaaaaagaagcaaatattatcgttgatcggtggctggatatcaacgaaaaaactgaggactactatgaaaatctgggccgagctctggcgctgtgggataagctgttcaacctcaagaatgttatcgacgagtggacagagaaggcccttcaaaagatggaactccatcaacttaccgaagaggacagggagagactcaaagaagagcttcaagtccatgaacaaaaaacttctgagttctcacgcagggtcgctgagatccagttcctgttgcagagtagcgaaatacccttggaactgcaagtgatggagtctagcatcctaaataagatggagcatgtccagaaatgtctcaccggcgagagtaattgtcatgccctgtctggctcaaccgccgaactgagggaggaccttgatcaagcaaaaacccagatcgggatgaccgagagcctcttaaaagccctgagcccttccgactcattggaaattttcactaagctggaggagattcagcagcagatactgcagcaaaagcactccatgatcctgctagagaatcagatcggctgtttgaccccagagctgagtgaactgaaaaagcagtacgaatctgtgtcagacctgttcaacactaaaaaaagtgtgctgcaagatcactttagcaagcttctgaacgaccagtgtaaaaattttaacgactggtttagtaacatcaaggtcaacctgaaagagtgcttcgagtcgagcgaaacgaagaaatccgtggagcaaaaactacagaagctcagcgatttcctcacgcttgaagggcgaaactccaaaataaaacaggtggactccgtgcttaagcacgtcaaaaagcaccttccaaaggctcacgtaaaggaactgatcagttggttagtcggccaagaattcgagctcgagaagatggagtcaatttgccaggccagagctaaggagttggaagattccctgcagcaattattgcgcctgcaggatgaccaccgtaatcttcgcaagtggctgaccaaccaggaggaaaagtggaagggcatggaggaaccgggagagaagacagagctattctgtcaggcccttgccagaaaaagagagcagttcgaatcagttgcccagctcaacaatagtctcaaagaatatgggttcactgaagaagaggagatcattatggaggctacttgtctgatggacaggtatcagacccttcttagacaactaagcgaaatcgaggaggaagacaagctcctgcctaccgaggaccagagcttcaatgatctagctcatgatgtgatccactggataaaagaaatcaaagagtctttaatggtgctgaattccagtgaaggcaaaatgccactggaggaacgcatccagaaaattaaagaaattattctgcttaaacctgagggagatgcaagaattgaaacaatcatgaagcaggccgagtctagcgaggctccactggtgcaaaagacacttacagatatcagcaatcagtgggacaatactctgcatcttgcgtcaacatacttatcccatcaagaaaagcttctcctcgagggagaaaagtacctccaatcaaaagaggacctcaggcttatgctgatcgaattgaagaaaaagcaggaggctggctttgctctgcagcatgggcttcaggaaaaaaaagctcagcttaagatttataaaaagttcctgaaaaaggcacaggacctgacctccctcctcaaagaactaaagtctcagggcaactatctgctcgagtgcacaaagaatccctcctttagtgaggagccttggctcgaaatcaagcatctgcacgagtcactgctgcagcagctgcaggattccgtgcagaatctggatggccacgtgagggaacacgatagctatcaggtgtgcgtcactgatctgaataccaccttagacaacttttcaaaagaattcgtgagtttctcggacaaacctgtcgatcagatcgctgtcgaggaaaaattgcaaaaactacaggagcttgaaaaccgactcagcctgcaggatggaacactgaagaaaattctggccctcgccaagtcagtgaagcagaataccagctcagtggggcagaagattatcaaggacgatatcaaaagtctgcagtgtaagcagaaggacctcgagaaccgtctggctagtgccaaacaggagatggaatgttgcttaaatagtatcctgaaatcgaaaagatctactgagaaaaagggaaagtttactctgccaggtagagagaagcaggctacatctgacgttcaggagtctactcaggaatccgctgctgtggagaaacttgaggaagattgggaaattaataaaaacttcgttgagaacgtgatggcagtcagcaagaactgccatcacagtatgtatattttcgagtcgattgtgaagaacttcatcagcgacgagatgcaggattccgccgtcgagatggccatgagcaaacagctcagccttaacgctcaagagtcaatgaaaaacaccgaagacgagagaaaggtgaacgaactgcagaatcagccgctggagctggacactatgttacgtaacgagcagctggaggaaattgaaaaattatatacccagctcgaggccaagaaggcggcaattaagcccctggagcagaccgagtgcctaaataagacagaaactggggcattggtcctgcacaacatcggatactcggcccagcatctagacaacctgctgcaggcgctaataaccctcaagaagaataaggaatcccagtattgtgttttgcgcgacttccaggagtatttagctgcggtcgaatccagcatgaaggctctgctgaccgataaggagtcactgaaggtggggcctctagattcagtaacttatcttgacaaaattaaaaagtttatcgctagcatcgagaaggaaaaagactccctgggaaacttgaaaatcaagtgggaaaatttgagtaaccatgtaactgacatggacaaaaagctactggagtctcagattaaacaattggagcacggttgggagcaggtagagcagcagatacagaagaagtattcccagcaggtcgtggaatatgatgaatttaccactctgatgaataaagttcaggataccgagatcagccttcagcagcaacagcagcacctccaattgcgcctgaagtcaccggaagagagagcgggtaaccaaagcatgattgcgctcactaccgatctgcaggccaccaagcacgggttttcagtcctaaagggacaagccgagctgcagatgaaacgaatctggggagagaaagaaaaaaagaacctagaggatggaatcaacaatctgaaaaagcagtgggagactcttgagccactccacttggaggcagaaaatcaaatcaagaaatgtgatatcagaaacaaaatgaaggagaccatcctctgggccaagaacttgctgggagagctgaatccatccatcccattgctgccggatgacatactatctcaaatacgaaaatgcaaggtgacacacgatgggatactggctcgccaacagtcagtcgagtctctggccgaggaggtgaaggataaagtgccatccttgacaacatacgaggggagcgatctgaataacaccctcgaagaccttaggaatcagtaccaaatgctggtgctgaagtccacccaacggagtcagcagcttgagttcaaactggaagagaggtccaacttctttgcaatcatacggaagttccagttgatggtgcaggagagtgagacactgatcattcccagggttgaaaccgccgctacagaagccgagctcaagcaccatcacgtgactctggaagcttctcagaaagaattgcaggagatcgatagcgggatttctactcaccttcaggaactgacaaacatttatgaagagcttaatgtgtttgagcgccttttcctggaagaccagcttaagaatcttaagattcggaccaatagaatccagaggttcatccagaatacttgcaacgaggtcgagcacaaaattaagttctgtcggcaatttcacgagaagacgtctgcactgcaagaggaggccgacagtattcagaggaacgagctgcttctgaatcaggaggtcaacaagggggtaaaagaagagatttacaatctaaaggaccgattaaccgccattaaatgctgtattctgcaggttctgaagctaaagaaagtgtttgactacattggtctgaattgggactttagccagttagaccaattacagacgcaagtatttgagaaggaaaaggaacttgaggaaaaaatcaagcagctcgacacatttgaggaggagcatgggaagtaccaggccctgttaagcaaaatgcgcgctatcgacctgcagattaaaaagatgacggaggtggtactgaaagcaccggactccagtcctgaatcccgacgcctaaatgcgcagatcctctctcaaaggatcgagaaagccaagtgcctctgcgatgagattattaaaaagctgaatgagaacaagaccttcgatgacagcttcaaagaaaaggagatcctccagataaagctgaacgctgaagagaatgacaagctttacaaagtgctccagaacatggtgttggagctgtctccgaaggagttggacgagaagaactgccaggacaaactcgagaccagcctgcacgtgctcaaccaaatcaagagccagctgcagcagcctctcctcatcaatctcgagataaagcacatccagaatgaaaaggataattgtgaagcatttcaggagcaggtttgggctgaaatgtgcagtatcaaagccgtcacagctattgaaaagcagagggaagagaacagcagcgaggcatcagacgtcgagactaagctgcgtgaatttgaagacctacagatgcaattaaacacaagtatcgatctgcgtaccaacgtgctgaacgacgcctatgaaaacctgacaagatataaggaagccgtcactcgcgctgtagagtctatcacctcactcgaggccattattatcccctatcgggtcgacgttggaaatcctgaagaatctcttgagatgcctctgagaaaacaggaggagctggagagcacagtggctcatattcaggatctcactgagaagctgggcatgatttcttccccggaggccaagctgcagctgcagtacaccctgcaggaattggtgtccaagaattccgctatgaaggaagcgtttaaagctcaggaaaccgaagccgaacggtacctggaaaactataaatgctacagaaagatggaggaagatatatatactaatttatctaaaatggagaccgtcctgggacagtcaatgtcatctctccctctttcctacagggaggccctcgagcgcctagagcagtcaaaagctctagtcagtaacttgatctcaacaaaagaagagctgatgaaactgcgccaaattctgagactgctgaggttgagatgtactgagaacgacgggatatgtctcctgaagattgtctccgccctctgggagaaatggctctcactgctggaagccgcaaaggaatgggagatgtggtgcgaggagctgaagcaggagtggaaatttgtgagcgaagaaattgagagagaggctatcattctggacaacctccaagaggaacttcccgaaattagtaagaccaaggaagccgcaactaccgaagagttaagcgagctccttgactgcctgtgtcagtatggcgagaatgtagaaaagcagcagctgcttctgacattgctgcttcaacgtatcaggagtattcagaatgtgcccgagtcaagtggtgccgttgagacagtccccgctttccaggagatcacaagcatgaaagaaagatgcaataagctgctgcagaaggtgcagaaaaataaagaactagtccagacggaaatccaggagagacactccttcacgaaggagatcatagctttgaagaacttcttccagcagacaaccacatcgtttcagaatatggcctttcaggaccaccccgaaaaatcagagcagttcgaggaactccaaagcatcctgaaaaaaggaaaacttaccttcgagaacatcatggagaaactccgcatcaaatattcagagatgtacactattgtccccgctgagattgagagtcaggttgaagaatgccgaaaagcactcgaggatatagacgagaaaatttcaaatgaagtgttgaaatccagcccctcctatgctatgcgcaggaaaatcgaggagattaataacgggttacacaacgtagagaaaatgttgcagcagaagtccaagaatatcgagaaggcccaagaaattcagaagaagatgtgggacgagctggacctctggcattccaaactgaatgaactggattctgaggtacaggacattgtagagcaggaccctggccaggcacaagagtggatggataatcttatgattccatttcagcagtatcagcaggttagccagcgagccgaatgtcgaacatcacagctaaacaaggccactgtgaagatggaagagtacagcgaccttttgaaatctaccgaggcctggattgaaaatacgtcacacttactggcaaatcctgccgattatgatagcctgcgcactttaagtcaccatgcctccaccgtccagatggcgctggaagactccgagcagaaacataaccttttgcactcaatttttatggatttggaagacctgagcattatcttcgagacagacgagttaacacagtcgatccaggagctctcaaaccaagttaccgccttgcaacagaaaattatggagtcacttcctcagattcagaggatggccgacgatgttgtggctattgagagcgaggtgaaaagtatggagaaaagagtatctaaaattaagacaattctgctctcgaaggagatatttgacttcagccccgaggaacatcttaaacacggagaggtcatactggaaaacatcagaccaatgaaaaagacaatcgccgagatcgtcagctaccaggtcgaattgcgcttgcctcaaacaggaatgaaacctttaccagtgtttcaacgcacaaatcagctcctgcaggacattaaactgctggagaatgtgacgcaggaacagaatgagctattgaaagtcgtaatcaagcagacaaatgaatgggacgaagagatcgaaaatctgaaacagattcttaataattattctgcccagttcagtctggaacacatgtcgcccgaccaggccgacaagctccctcaattacagggcgagattgaacggatggaaaaacaaatcctgtccttgaaccaacgcaaagaggacctacttgttgatctgaaggccacagtgctgaacttgcaccagcatctgaagcaagagcaggagggagtagaacgtgatcggctccctgccgttacaagcgaggagggcggtgtggccgagagagacgcatccgaacggaagctgaatcggagagggtccatgagttatctggccgctgtcgaagaggaggttgaagagtcatcggtgaagagtgatcatgacaaagatatggaagaagacagagcaagtagctcatccgggacaattgtccaagaggcttatggaaagatcagtacgtccgataattccatggcccagattctgacaccggatagcctcaacactgagcaggggccagaatgctcactgcgccctaatcagacagaagagggaacaacccctccaatcgaggcggatacattggatagcagtgacgcccaaggaggactagaaccacgggtggagaaaactcgtccagagcccaccgaggtcctgcatgcttgcaaaacccaggtcgctgagctggagttgtggcttcagcaggcaaacgtggctgtcgagccagagacactgaacgccgatatgcagcaagtcttagagcagcagctagttgggtgtcaagcaatgctcacagagatcgagcacaaggttgcgtttctccttgagacttgcaaggatcaaggcctgggcgataacggggctacacagcatgaagccgaagccctgtctctgaaactaaagactgttaagtgcaatctcgaaaaagtgcagatgatgctacaagaaaaacattcagaggatcagcatcctacgatactgaagaagtcctccgaacctgagcaccaggaggcgctgcagccagtgaacctctccgaactagaaagcattgtcacagagcgtcctcagttctctagacaaaaggattttcagcagcaacaagtcctcgaactgaagcccatggaacagaaagattttattaaatttattgagttcaacgccaaaaagatgtggcctcaatactgtcagcatgacaacgacactacccaggaatctagcgctcgatatcccaccactgaggaactcaaaacttatactactcaattggaggacttgaggcaggaggcttcgaaccttcagacacaggaaaatatgacagaagaagcatatattaatctggacaagaaactctttgagctattcctaacactctcacagtgcctgtcatctgtggaggaaatgcttgagatgccacgtttgtatagggaggatgggtccggccaacaggtacactatgagacattggccctggaactgaaaaaactctatcttgcgctctccgataagaagggcgatctgctcaaggccatgacctggcccggagagaatactaacttgttattggagtgcttcgacaatttacaggtctgtttggaacatacacaggcagcggctgtgtgtcgctctaaatcacttaaggcaggtctggactataacaggtcctatcagaaggctgatgcctatactgtggagttggagaacgctgagagccgtgtggccaagcttcgcgacgaaggcgagaggttgcacttaccttatgcgttgctgcaggaggtctataagctggaggacgttttggactctatgtggggcatgctgcgagcccgttacacggaactgtctagtccatttgtgacggaaagccagcaggacgctttgctgcagggaatggtagagcttgtgaagataggcaaagaaaagttagcccatggtcatctgaaacagactaagtcaaaagtggcactgcaggcccagattgaaaaccacaaagtgttcttccagaagctcgtcgccgatatgctcctcattcaggcatattcagctaagatcctgccttctctgctgcagaatcgggaaaccttttgggctgaacaggtaacagaagtgaagatactggaggaaaagtcacggcaatgcggtatgaagctgcaaagcctcctgcagaaatgggaggagttcgatgagaactacgcctctctggaaaaggacctggagattctgatctcaaccctaccgagcgtgtctctggtggaggagaccgaggaacggcttgtagagcggattagtttctatcagcagattaaaagaaacatcggtggaaagcatgccaggctgtaccagaccttgaacgaggggaagcaactggtcgcttctgtgagttgccccgagttggagggccaaatcgccaaactggaagaacaatggttgagcctgaacaagaaaatcgatcatgagctgcacagactacaggccctcttgaagcatctcttgagatcagccttcctgggcgtctacaatagggactctgatcaactcactaaatggctggagagttcacagcacaccttaaactactggaaggagcagtctctcaatgtttctcaggacctggacactattaggtcaaatatcaataacttctttgagtttagcaaagaagtcgacgaaaagtcatccctcaaaactgctgtgatctccattggcaatcagttgctccacctgaaggagaccgacaccgccaccttgagagcctctctagcccagttcgaacagaagtggacgatgctgatcacccaacttccagacatacaggagaagcttcaccaactccagatggagaagttaccttcacggaaggctattacagagatgatcagctggatgaacaacgtggagcatcagacctctgatgaagactcagtgcactccccctcatcagctagccaggtcaaacatctcctccagaagcacaaggaattccggatggagatggattataagcagtggatagtagacttcgtgaatcaatctctcttgcagctgtccacatgtgatgtcgaatccaagcgttacgaacgtacagagttcgctgagcacctgggcgaaatgaatcgccaatggcacagggttcatggcatgttgaaccgtaaaatccagcacctcgagcagctgctcgagtcaattacagaatctgaaaataagatacagatccttaataattggctggaggcacaggaagaacgcctgaagacgcttcaaaagcctgagagcgtgatcagcgtgcaaaagcttttgctcgactgtcaagacatcgagaatcagctcgcgataaaaagtaaggctctggacgaacttaaacaaagctaccttacccttgaaagcggcgcagtgcctctcctcgaggatactgctagcagaatcgacgaactgttccagaaacggtcatcagttctaactcaggtgaaccagttaaagacatccatgcagagcgtgctacaggagtggaaaatctacgatcagctctatgatgaagtgaatatgatgacaatcagattttggtactgtatggaacactccaagcccgtagtcctctccctcgagaccttacggtgccaggtggaaaatcttcagtcccttcaagacgaggcagagagcagcgaaggatcttgggagaaactgcaggaagtcattgggaagctcaagggtctttgcccgagtgtggcagaaatcatcgaagagaaatgtcagaacacacacaagcgctggacgcaggtcaaccaagctatcgccgaccagttgcaaaaagcccaaagcttgctgcagctctggaaggcttattctaatgctcatggagaagccgctgccagattgaaacaacaagaggcgaaattccagcagctcgctaacatttccatgtcgggaaacaatctggcggaaatactgcctcccgctcttcaggacataaaggagttgcagcacgatgtgcaaaagacaaaggaagctttccttcagaatagctcagtcctggatcgcctcccccagcctgccgaaagctcaacgcatatgctcctccccggaccgctacactcgctgcagcgcgcagcgtacctggagaaaatgttgctggtgaaggctaatgagttcgaaaaccatgtgctggccctgactgcacagtctcccgacatcgagcacctgaacgaggtttccctcaaattgccgttgtcggatgtcgcagtgaagacactgcagaacatgaaccgccagtggatccgggcaacagccaccgctctagaaagatgcagcgagctgcagggcattggtctgaatgagaagttcctgtattgttgtgaaaaatggatccagctgttagagaagatcgaggaagccctgaaggtcgacgtggcaaactccctgcctgagctcttggaacagcagaagacatataaaatgcttgaagcagaggtgagcatcaaccagactattgcagacagctatgtgactcagtcactccagttgctcgatacaacagaaattgagaatcggccagaattcatcactgagttcagtaagctcaccgacaggtggcaaaatgccgtacagggagtgcgacagcgcaaaggcgatgtggatgggctcaatgcccacgtagcccgatgtggcggagcatctctaaaaaagcaggatctgcgatattccctgcacactgcgtgtggcgcagctctgctttgtaggtcgagtcatggggcaaacaaagagattcatttccagagaaggcggacaacctgtgccctcacattggaggccggagagaagctgttgctgaccacggacctaaaaaccaaggaatctgtaggtcgcaggatttcccagctgcaagattcttggaaagacatggaaccccagttagctgaaatgatcaaacaatttcagagcactgtagagacctgggatcagtgcgagaagaagataaaggaactcaaaagcaggctgcaggtgttgaaggcccagtccgaggatcctctaccagaactgcatgaggatctgcacaatgagaaggagctcattaaggttgctataaggaaacaagagatcgaggatcgcctgaacacctgggtggtatttaacgagaagaacaaggagctgtgcgcttggttggtccagatggagaataaagtccttcagaccgcagacatttcgatcgaggaaatgattgagaaactccaaaagcgaactgtcggcagagaggaagtgccggagagatgggaatgcgaaacgattgtcagcggtcacggcaccgaggaaagctgctttttgtcaatacggaagttccaccaggggagaggcctccatatcctgacttgtcagcttattccgcaggattgcatggaggagatcaacctgtttagtgaaaacaagctgcaacttaagcagatgggcgaccaacttattaaggcttctaacaagtctcgggcagcagagattgatgacaaattaaacaagatcaacgataggtggcaacatctgtttgacgtgattggcagcagcatggccgaccaaaccaattcaagatggatgtttttccagtggcctcgagggatccagagaactgtgacctggccatgggatcatctgtgcagctgcgccagcacagggcatactggccctttccacagttctgtgctgcgctgctttgagcagcatatagaattcggaatctaccggaggacatacaaggtgaacaaggagcttggcggagacaagaacggtcagaggtgtcctattatctatcctcacgggctggtgcagtgtattagacttggagaacccctgatccttaaacgcgtgaagaaactgaaagaaactttcgcttttatccagcaattggataaaaacatgtcaaatctaagaacttggttggcccgtatcgaaagcgaattgagtaaacccgtagtttacgacgtctgtgacgatcaggaaattcagaaacggctggctgaacagcaggatctgcagagggacatcgaacaacattcagcaggcgtggaatctgtgttcaatatctgtgacgtcctgctgcatgattctgacgcttgcgccaatgagaccgagtgcgattcgatccagcagacaaccagaagcttggacaggcgctggcgaaacatatgtgctatgtccatggaaaggcgaatgaaaattgaggagacctggcgcctgtggcagaagttcctggatgactactcgagattcgaggattggctgaagagtgccgagagaacagcggcatgcccaaactcgtcggaagttttatacacatctgcgaaagaagaactgaaacgcttcgagagacagattcacgagcgcctgacacaactggagctgatcaataagcagtatagaaggctggcgcgtgagaataggactgacactgcttcccggctcaagcagatggtccatgagggcaatcagcgctgggataacctccagcgcagggtcaccgctgtgctccggcgtctgcgccacttcacaaatcagagagaggagtttgaaggaactcgagagtcgattctcgtctggttgacagaaatggacttacagctgactaatgtcgaacatttctcagagtcggatgccgacgacaagatgcggcaactgaacgggttccagcaagagataacactcaacaccaacaagatagatcagctgattgtgttcggagagcaactgattcagaagagcgagcccttggatgctgttctgatcgaagatgaactggaagaactgcaccggtactgccaggaaggcctagaagacgaaaaagaagccagtgaaaacgaaacagacatggaggatcccagggaaatccaaaccgacagttggagaaagaggggtgaaagcgaggagccttcctccccccagagcctctgccatctggttgcccctggacatgagcgtagcggctgcgagacccccgtgtcagtggattctatacccctggaatgggatcataccggagacgtcgggggaagctcatcacacgaagaagacgaagaaggcccatattatagtgcgctctccggaaagtctattagcgacggccattcctggcatgtccccgacagcccatcctgtccagaacaccactacaaacagatggagggtgaccgtaatgtgccacctgtaccaccggctagcagcaccccatacaagcccccttacgttagcctgaattttactggaagcacggcgtacgtttgcgcttttgaccggtgggagatgattcaggctcaggagctgcacaacaagctcaaaatcaaacagaacctccagcaactgaatagcgacatatctgcaattacgacttggctcaagaaaaccgaagccgagctggagatgctgaaaatggccaaaccaccgtctgacatacaggagattgagctgcgagtgaaaaggctgcaggagatcctcaaagcattcgacacctacaaagcgcttgtggtgtcagtgaacgtgagctccaaagagtttcttcagactgaatcgcctgagtctaccgagctacagagtcgcctgaggcagctgagcctgctctgggaagccgctcagggagctgtcgactcttggcgcggaggactgcgtcagagcctgatgcaatgccaggatttccaccagctgagccagaacctcctgctgtggttagcctccgcaaagaaccggagacaaaaggcgcacgtaacagatccaaaggctgatccgagggcccttctggaatgtagacgcgagctcatgcagttggagaaggagttggtcgagagacagccccaggtcgatatgctccaggaaattagcaattccctcctgattaaggggcacggagaagactgtatcgaagctgaggagaaagttcacgtcattgagaagaaactgaaacagctgagggagcaagtcagtcaggatctgatggctctgcagggtactcagaatcctgcctcccctttgccctctttcgacgaagtggactccggcgatcagcctcccgcaaccagcgttcccgctccacgggctaaattcctgtaccccgctgtgcagtctagcgagaattataggcggcgaggcggagaccgcgagcagggtccacgtcaacatacagcaaccgctctccttcctctgaaaggcggacctggatcgcccaccccagcagccgcacctcctgcggcagccgcacccggattacctgctgcactgctgcgcagaaggctccagcttcattcggggcaacagttgtgccctgtgctgttgccccacgctgaggtgcatcagtgggccactccacacatcgaaggaattgccggacatagtgcaacccccccagctta

SEQ ID NO: 293300 - DNA, 20475 bp, Artificial Sequence
  derived and/or modified sequence
atggcatctagtcctgagcttcccaccgaagatgaacagggttcctggggcatcgacgatctccatatttcattgcaagctgaacaggaagacacccagaagaaagccttcacgtgctggataaactcacagttggccaggcacacttctccctcagttatatccgacctattcacagacattaaaaaggggcatgtcctcctggatctgctagaagtactttctgggcaacagttgcctcgggataaaggatctaataccttccagtgtagaatcaatatagaacatgccttgacattcctaagaaaccgatcaattaagctaataaatattcatgttactgatatcattgatggaaacccatccattatccttggcctaatttggacaattatcctgcactttcatattgagaagcttgcccagactctttcttgcaattacaatcagccttccctggatgatgtgagtgtggttgactcatctcctgcctcaagtcctccagctaagaaatgctctaaagtgcaagcaagatggcaaatgtctgcaagaaaggcccttcttttgtgggctcaggaacaatgcgccacctatgagtctgtcaatgtgaccgattttaagtcaagttggagaaatgggatggcttttttggccatcattcatgccttgcgaccagacctaattgacatgaagagtgtgaagcatagatccaacaaagacaatctgagagaggccttcagaattgcagaacaagaattaaaaatccccagattgctggaaccagaagatgtggatgttgttgatcctgatgaaaagtccatcatgacctatgtggcacagtttctgcagtattccaaagatgcccctgggactggagaggaggctcagggaaaggtgaaagatgctatgggctggttaactctgcaaaaggaaaaactacagaagttgctaaaggattcagagaatgatacctactttaaaaagtataatagcctgctgtcctttatggagtcattcaatgaagaaaaaaagtcctttttggatgtcctgtcaataaaacgggatctggatgagctggacaaggatcatttacagttgagagaagcctgggatggcctcgatcaccagattaatgcatggaaaataaagctaaattatgccttgcccccacccctccatcaaactgaagcttggctccaggaggtagaagagcttatggatgaagatttgtcagcctcccaggatcactctcaagccgtgactctgatacaagagaaaatgactttattcaagagcctgatggatagatttgagcatcattcgaacattctccttacctttgaaaataaggatgaaaatcacttgccattggtaccacctaacaaattggaggaaatgaaaagacgaatcaacaacattttggagaaaaaatttattctacttctagaatttcattactacaagtgcttagttcttggtttggtagatgaagtgaaatcaaaattggatatttggaacattaaatatgggagcagagaatctgtggaattattgctggaagactggcataaatttattgaagaaaaagaattcctagctcgacttgatacttcttttcaaaaatgtggagaaatttataagaatttggctggagaatgtcagaatattaataaacagtatatgatggtgaaatctgatgtttgtatgtatagaaaaaatatatataatgtgaagtccactctacaaaaagtgctggcatgttgggctacttatgtggaaaaccttcgcttactaagggcttgctttgaggagacaaagaaggaagaaattaaagaggtaccctttgagacactagcccagtggaatctagaacacgctactttaaatgaagcaggaaatttcttagtcgaagtcagcaatgatgtggttggatcatctatttctaaagaactgagaaggctgaataaaagatggagaaagttggtttcaaaaactcaacttgaaatgaacctgccactgatgataaaaaaacaggatcagcccacttttgacaattctggaaatattctatctaaagaagagaaagcaactgttgagttttcaacagatatgtcagtagaacttcctgaaaattataatcaaaatataaaggctggagagaaacatgaaaaagaaaatgaagaattcacagggcaactaaaagtggctaaagatgttgaaaaactcattggacaagtggaaatctgggaggcagaagccaaatctgttttggatcaagatgatgtggacacctcaatggaagaatctttgaagcatcttattgccaaaggctctatgtttgatgagcttatggcaagaagtgaagatatgttacaaatggatatacaaaatatttcaagccaggagtcctttcaacatgttctcacaactgggcttcaggcaaagattcaagaagctaaagagaaagtccagatcaatgtggtaaaactcattgcagcgttgaagaacttaactgacgtttcaccagatttggacatcaggctgaagatggaagaatcccagaaggaacttgaatcatatatgatgagggctcagcagttactggggcaaagagagagccccggtgaactcatttcaaaacacaaggaagcactaataatttctaatacaaaaagtctggccaagtatttgaaagctgttgaagaactaaaaaataatgtaactgaggacataaagatgtctttagaagaaaagagtagagatgtctgtgccaaatgggagtctcttcatcatgaactgtctttatatgttcaacaactaaaaatagatattgaaaaaggaaagcttagtgacaatattttaaaacttgaaaagcaaataaataaagaaaagaaacttatccgtagaggaaggaccaagggtctcatcaaagaacatgaggcctgcttttctgaggaaggctgcctgtaccagcttaatcaccacatggaagtcctgagggagctgtgtgaagagctgccttcacagaagagtcaacaagaagtgaagagactactcaaagattatgaacaaaagatagaaagacttctgaaatgtgcttccgagattcatatgacactgcagcccacagcgggaggcacgtcgaaaaacgaggggaccatcaccacatctgagaatagaggaggggatccccacagtgaggcaccatttgcaaaatcagataatcagccatcaactgaaaaggcaatggaacccactatgaagtttagcctggcatcagtgttaaggcctctgcaagaagaaagcattatggaaaaggattacagtgcatctataaatagtttactagagaggtatgatacatacagagatattcttgaacaccacctgcaaaacaacaaattcaggattacttctgatttctctagtgaagaggacaggagtagttcttgtctgcaggctaaactgacagatctacaggtcataaaaaatgaaactgatgctcgctggaaagagtttgaaattatttcattgaagttagaaaatcatgtgaatgacataaaaaagccttttgtaattaaggaaagagacacactaaaggaaagagaaagagagcttcagatgactcttaataccagaatggaatctttagagacagcactgcggcttgtgttacctgtagagaaggcatcacttcttctctgtggctcggacctgcctctccataaaatggccatccagggatttcatctcattgatgctgatcgcatctatcaacacctaaggaatatccaagattccatagcaaaacagattgaaatatgtaaccgcttagaagagccaggcaactttgtattaaaggagttacacccatttgatctacacgcaatgcagaatattatactgaaatacaaaacacaatttgaaggaatgaaccacagggtgcagaggagtgaagatactctcaaagctctggaagactttttggcgtctctcagaacagctaaactctctgctgagcccgttacagacctttcagcctcagatacacaggtggcacaagaaaatacgttgacagtaaaaaataaagagggagaaattcatctgatgaaagacaaggccaaacatttggataaatgtttgaagatgctcgatatgagctttaaagatgctgaacggggtgatgacacctcctgtgaaaacctgcttgatgctttttcaataaagttatctgagacacatggctatggggtacaggaggaattcactgaggaaaacaaattactagaggcttgtattttcaaaaataatgaactccttaaaaatattcaagatgtgcagagtcaaatcagtaaaattggtcttaaggatcctactgttccagctgtgaaacatcggaaaaaatcattaatcagactggataaggttctagatgaatatgaagaagagaagagacatttacaagaaatggctaattctcttccacacttcaaagatggcagagaaaaaaccgtgaatcaacagtgccaaaatacagtagtcttgtgggagaataccaaagccttggtcaccgaatgtcttgaacaatgtgggagagttttggagctcttaaaacaatatcagaattttaaaagcatcttgacaactttgattcaaaaagaagagagtgtcatctccctgcaggcttcgtacatgggaaaggagaacctgaagaaaaggatagcagagattgaaattgtcaaagaagaatttaatgagcatttagaagttgtagacaagataaaccaggtctgcaaaaatctacaattttatctaaataaaatgaaaacttttgaagagcccccttttgaaaaagaggctaatattattgtggatagatggcttgatataaatgagaagacagaagattactatgaaaatcttggtcgagctctagctttgtgggacaaactttttaacttaaaaaatgtcattgatgagtggacagaaaaggcccttcaaaaaatggaattacatcaattgactgaagaggacagagaaaggctgaaggaagaattacaagtccatgaacaaaaaacttcagaattttctagaagagtggctgaaatacagtttttgctccaaagcagtgaaatacctcttgaattgcaggtcatggagtcctctattttgaacaagatggaacatgtacagaagtgcttaacaggagaatccaactgccatgcactcagtggcagcactgctgagctaagggaggatctcgaccaagccaagacccagatcgggatgactgaatccctcttaaaagccctgtctccttctgacagcttggagatcttcactaaactagaggagatacaacagcagattctacagcaaaaacacagtatgatattacttgagaatcaaataggttgtctgactcctgaactctctgaattgaaaaagcaatatgaaagtgtcagtgatttatttaataccaaaaaaagtgttttgcaagatcacttttctaagttattgaatgatcaatgcaagaactttaatgactggttcagcaacattaaagtgaaccttaaggagtgttttgaatcatcagaaacaaaaaagagtgtggaacaaaagctacaaaaactttctgatttcttgactcttgaaggaagaaacagtaaaataaagcaggtggacagcgtactgaagcatgtgaagaagcatctgcccaaagcacatgtgaaggagcttatcagttggctcgtgggtcaggaattcgaattagaaaaaatggagtccatatgccaggctcgagcaaaggagcttgaagactccttgcagcagctactgagactccaggatgaccatagaaacctgaggaagtggttgactaatcaagaagagaaatggaaaggaatggaagaaccaggggagaaaactgagctgttctgccaagctttagctagaaagagggaacagtttgaatctgtggcccaattgaacaactctttgaaggaatatgggtttactgaagaagaagaaataataatggaagcaacatgtttgatggatagataccagacattactgagacaactaagtgaaatcgaggaagaggataagttactacccacagaggaccagagctttaatgatcttgcacatgatgtaattcattggataaaagagattaaagagtcccttatggttttgaattcatccgaaggcaaaatgccacttgaggaaagaatccaaaaaatcaaggaaatcattttgctgaagcctgaaggggatgccagaatagagaccatcatgaagcaggctgagagcagcgaggccccgctggttcagaagaccctcactgacatcagcaaccagtgggacaacacactccatttagctagcacctacctaagccatcaagaaaagcttctactagaaggagagaaatatttacaaagtaaggaggatctgagattaatgctcatagaactaaagaagaaacaggaagcaggctttgctctacaacatggtctgcaggagaagaaagctcagttaaagatttataagaaattcctcaagaaagcccaagatttgacatccttgctaaaggagttaaaatctcagggaaactacctcttggagtgcactaaaaatcccagcttcagtgaagagccttggctggaaataaagcatctacacgaaagtcttcttcaacaactgcaggattctgtgcaaaacttggacggtcacgttcgagaacatgattcataccaggtttgcgtcacagacctgaatactacattggacaatttctccaaggaatttgtcagtttttctgataagcctgtggatcaaatagcggttgaggaaaaattgcagaaactgcaggaactagagaatagactcagtttacaagatggcacattaaagaagattttagctttagcaaaatccgtcaagcaaaatacatcttcagtggggcagaagattattaaagatgatataaaatcacttcagtgtaaacaaaaagatttggaaaacaggcttgcatctgctaagcaggagatggaatgttgtctcaacagcattctcaaatcaaaacgctcaacagaaaagaaaggaaagtttactctgccaggcagagagaagcaggccacttctgatgtgcaggagtctactcaggaatcagctgcagtggaaaagttggaggaagactgggaaataaacaagaattttgttgaaaatgtgatggcagtttccaaaaattgccatcatagcatgtatatatttgaatccattgtcaagaatttcatttcagatgaaatgcaggattcagctgtggaaatggctatgtcaaaacaactttctcttaatgctcaagaaagcatgaaaaacactgaagatgagcggaaagtcaatgagctgcaaaatcaacctttagaattagatactatgttaagaaatgaacaattagaagagatagagaaattatatacccagttggaagcaaagaaagcagccattaagccactggaacaaacagaatgtcttaacaaaacagaaactggggccttggttctccacaatataggatattcggcacagcatttggacaatttgcttcaggcacttattactttgaagaaaaacaaagaaagccaatattgtgtcctcagagattttcaggaataccttgctgcagttgaatcttcaatgaaagccttgttgacagacaaggaaagtcttaaagtaggaccactggacagtgtaacgtatctggacaaaattaaaaaattcatagcatccatagaaaaagagaaagattctttaggcaacttgaaaatcaaatgggagaatttatcaaaccacgtgactgacatggataagaaattgttggaaagccagattaagcaacttgaacatggttgggaacaagtggaacagcagattcaaaagaagtattctcagcaggtagtggaatatgatgaatttacaaccctcatgaataaggtacaggacactgagatttctctgcaacagcagcagcaacatctacagttaaggctgaagtctccagaagaacgggcagggaaccaaagcatgattgccttgaccactgacctccaggctaccaagcatggattttctgttttaaaggggcaagctgaacttcagatgaagaggatttggggagaaaaagaaaagaagaatttggaggatggaataaataacttgaagaaacaatgggaaacattggagccattacacttagaagcagaaaatcagattaagaagtgtgacataaggaacaagatgaaagagactatcttatgggccaagaatttgttgggtgaacttaatccctccattccccttctcccagatgacattctttcacagatcagaaagtgcaaagtgacacatgatggcattctagctaggcagcagtctgtggaatcgttggctgaagaggtcaaagataaggttcctagccttacaacctatgagggcagtgatttaaataataccctagaggacttacggaatcaataccaaatgctggttttaaaatcaactcaaagatcacagcaattagaatttaagttggaagaaagaagcaatttttttgctataataaggaagtttcaacttatggttcaagaaagtgaaacactgataattcccagggtggagacagctgccacggaagctgaactaaaacatcaccatgttactttggaggcatctcagaaggaattgcaagaaattgacagtggaatctcaacacatcttcaggagctaacaaacatctatgaggagctgaatgtgtttgaaagattatttctggaagatcagttgaaaaatcttaagattaggaccaacagaatacaaagattcattcagaatacatgtaatgaagtggaacacaagataaagttttgcagacaattccatgaaaaaacatcagcgcttcaggaggaggctgacagtatacagcgcaatgaactattacttaatcaagaagtaaataaaggtgttaaagaggagatctataatcttaaagacagactcaccgctattaagtgttgcatcttacaggtattgaaacttaaaaaagtgtttgactatattggactaaactgggatttttcacaacttgaccaattacaaacccaagtatttgaaaaagaaaaggaacttgaagaaaaaattaagcagttggacacatttgaggaagaacatggcaaatatcaggcattattaagtaaaatgagagctattgatttgcaaattaagaaaatgactgaagtagtactaaaagctcctgatagctctccggaaagcagacggctcaatgcccaaattttaagtcagagaattgagaaagccaagtgtttatgtgatgagataataaagaaattaaatgaaaataagacctttgatgactcattcaaggagaaagaaatactacaaataaagctgaatgcagaagaaaatgataagttatacaaagttctccaaaacatggtattagaactctcaccaaaagaattggatgaaaagaattgtcaggacaaactagaaacttccttacatgttttaaatcagataaaatctcaattacagcagccattacttataaatttggaaattaaacatattcaaaatgaaaaggacaattgtgaagcatttcaggagcaagtttgggcagaaatgtgtagtattaaagctgtgactgctattgagaaacaaagagaagaaaactcttctgaagcgagtgatgtggagacaaaactacgtgagtttgaagatcttcagatgcagcttaacacaagcattgatttgcgcacaaatgtcttgaatgatgcttatgaaaatctaacacgctataaagaagcagtcaccagggcagtggagagcatcacttccctcgaagccatcattataccctacagagtagatgttggtaatccagaagaatctttagagatgcctcttcgaaaacaagaggaattggaatccacagtagcacacatccaggacctcactgagaaactgggaatgatatccagccccgaagccaaactacaacttcagtatactttacaggaactagtttctaagaactcagcaatgaaggaagctttcaaagcacaggaaactgaggcagaaaggtatcttgagaattacaaatgctatagaaaaatggaagaggatatttacactaacctcagcaaaatggagacagttcttggacagtccatgtcctcgttgccactgtcttacagagaagctttagagcgcttggaacagagcaaggccttggtgtcaaatcttatatcaaccaaagaagagttaatgaaactacgacagatccttagactcttgagactcaggtgcacagaaaatgatggcatatgtttgctcaagattgtgtcggctctgtgggagaaatggctgagtttgctggaagctgctaaagagtgggagatgtggtgcgaagaactgaagcaggaatggaaatttgtcagtgaagaaattgaacgagaggcaattattttagataatcttcaggaagaactccctgaaatttccaaaacaaaagaggcagccaccacagaggaactctctgagctgctagactgtttatgccaatatggagagaacgtggagaagcaacagctgttactgactctacttcttcagcgcatcagaagtatccagaatgttcctgaaagctcaggggctgtggaaactgttccagcatttcaagaaattacttctatgaaagaacgatgcaacaagcttcttcagaaagttcagaaaaataaagaattggtgcagactgaaatccaagaaagacattccttcacaaaagagataattgctttgaagaatttctttcaacagaccacaacttcattccaaaatatggcattccaggatcacccagaaaagtcagaacaatttgaggagcttcaaagcatccttaagaaagggaaactaacttttgagaatattatggaaaaactgcgaatcaagtattccgaaatgtacaccatagtccctgcagagattgaatcccaggtggaagaatgcagaaaagctttagaagacatagatgagaagattagcaatgaagtcttaaaaagctcaccatcatatgcaatgaggagaaaaatagaagaaattaacaatgggcttcataatgttgaaaagatgttgcagcagaaaagcaaaaatattgagaaagctcaagaaattcaaaagaaaatgtgggacgagttagatctatggcattccaaactaaatgagctggattctgaagttcaggacattgttgaacaggacccaggacaggctcaagaatggatggataacttgatgattcctttccagcagtatcagcaagtatcacagagagcagagtgtagaacctcacagttgaataaggccacagttaagatggaggaatatagtgaccttctgaagagcactgaggcttggatagaaaataccagtcatttgctggccaatcctgctgactatgactctttgaggacactgagtcaccatgctagcactgtgcagatggctttggaagattcagaacagaagcacaatcttttacattcaatctttatggatctagaagacctgtcaataatttttgaaacagatgaattaacccaatccatacaagagttaagtaatcaagtaacagctttacaacaaaaaataatggaaagccttccacagattcagcgaatggctgatgatgtggttgctattgaatctgaagtaaaatcaatggaaaaaagagtttcaaaaatcaaaactatcctattatcaaaagaaatatttgatttttcacctgaagaacatctcaaacatggggaggtcatacttgaaaatatacgtcccatgaagaaaaccattgctgagatagtgtcttaccaagtggaactgaggttgccccaaacaggaatgaaacctctgcctgtgtttcagcggacaaatcagcttttacaagatataaaactattggaaaatgtgactcaagaacaaaatgagttattaaaggtagtcataaaacagaccaatgaatgggatgaagaaatagaaaatttgaaacagatcttaaataattattcagctcagttctcccttgaacatatgtcaccagaccaagctgacaagctgccacaactacagggagaaatcgaacgtatggagaaacagattctgagtttgaaccagagaaaagaagacctgttggtggacttgaaggccaccgtactaaaccttcaccagcatttgaagcaagaacaagaaggagtagaaagagataggctgccagctgtaacatcagaggaaggtggagtggcagagagggatgcttctgagcggaagttgaacagaagaggctccatgtcttacctggcagcagtcgaggaagaggtggaagaaagttccgtgaagagcgatcatgacaaggacatggaagaagacagagcttcctcatcctctggaacaattgttcaggaagcatatgggaaaataagcacctctgataattccatggcacaaatcctcacaccagactcactaaacactgagcaaggcccagaatgttccctaaggcccaaccaaacagaagagggcaccacacctcctattgaggctgacactctggactcttctgacgcgcaaggaggtttggagcccagggtggagaaaactaggccggagcccacagaagtcctgcatgcctgcaagacccaggtggccgagctggagctgtggctgcaacaagccaacgtggcagttgagccggaaacattaaacgcagacatgcagcaggtgctggaacagcagctggtagggtgccaggctatgctaacagagattgagcacaaggttgcctttctgttagagacttgcaaagatcagggcctgggagataatggagccactcaacatgaggctgaagcgctttccctgaaactgaaaacagtgaagtgcaatttagaaaaagtccagatgatgcttcaggagaagcacagtgaagatcagcatcctaccattctaaagaaatcctcagagccagagcatcaagaagctctccaaccagttaacctttctgaattggaatccattgtaactgaaaggccacaattcagcagacaaaaagatttccagcagcaacaggttctggagttaaaaccaatggaacagaaagatttcatcaaattcatagaatttaatgctaagaaaatgtggccccagtattgccaacatgataacgatacaactcaggaatcatctgcaagatacccaacaactgaagaactgaaaacctataccacccaacttgaagacctgcgccaagaagcaagtaaccttcagacacaggaaaatatgacagaagaagcatatatcaatttggataaaaaattgtttgaactattcctgaccctcagtcagtgcctcagcagtgtggaggagatgctggagatgcccagactttacagggaggatggttctggccagcaggtgcactacgagacgctggctcttgagttgaagaaactttatttagcgctaagtgacaagaagggtgatcttttgaaagccatgacttggcctggcgagaacaccaacttgctccttgaatgttttgacaaccttcaagtctgcctggagcacactcaggctgcagctgtctgtagaagcaagtccctgaaagctggcctcgattacaaccgcagttaccagaaagcagatgcatatacagtggagctggagaacgccgagagccgagtggccaaactaagagatgaaggggagaggcttcatttaccttatgctttactccaggaggtttacaaattagaggatgtacttgacagtatgtggggaatgctaagagccaggtacacagaactcagcagccctttcgtcactgagagccagcaagatgctttgttgcaaggcatggtggaactggtgaagattgggaaggaaaagcttgctcatggccacttaaaacaaaccaaaagtaaagtggcgttacaggctcaaatagaaaatcacaaggtttttttccagaagcttgttgctgacatgttgttgatccaagcatactctgccaaaatacttccttctttattgcaaaacagagagacattttgggcagaacaagtaacagaagttaaaatactagaagaaaagtcacgccaatgtggtatgaagctgcagagtttgttgcagaaatgggaagaatttgatgaaaactatgcatctcttgaaaaggacctggaaattcttatatctacattgccctctgtgagtttggtggaagaaacagaggaaagattagtggaaaggatttcattttaccagcaaataaaaagaaacattggtggaaaacacgcccggctttaccaaactctgaacgaaggcaaacagttggtggcgtctgtgagctgtcctgaattagagggccagatcgcaaaactggaagagcagtggttgtccctgaacaagaaaattgaccatgagctccacaggctgcaagctcttctcaagcatctgctcaggtcagcctttttgggggtttataacagagattcggatcagttaaccaagtggttggaatcttcccagcatactctgaattactggaaagaacagtccctcaatgtgtctcaggacttggatacaatcagaagcaacatcaacaatttttttgagttttcaaaagaagttgatgaaaaatcctccttgaagactgccgttatcagtatcgggaaccagcttcttcacctgaaagaaactgatacagctacactgagagcttctttagcacagtttgaacaaaaatggacaatgctcataactcaacttccagatattcaagaaaaacttcaccagcttcaaatggagaaattgccgtctcgtaaagcaatcacagaaatgattagctggatgaacaatgtggagcatcaaacttcagatgaagactccgtgcattcaccaagttctgcatctcaagttaaacatcttcttcagaagcacaaggagtttagaatggaaatggactataaacagtggatagttgacttcgttaaccagtcattacttcagctaagcacctgtgatgtagaaagcaagcgctatgaaagaacggagtttgcagagcacctgggggagatgaaccgccagtggcaccgtgtacatggaatgctgaatagaaagatacaacatttagaacaacttctagaaagtatcactgagagtgaaaataaaatacagatcttgaacaactggctggaagcacaagaagagagactgaaaactttacaaaaacctgaaagtgtgatctcagtgcagaagctgctcctggactgtcaggatatagaaaatcaacttgcaattaaatccaaagcactagatgagttgaaacaaagttatctgactttggagagtggggcagtgccattgttagaagatacagcatcccgaattgatgagttatttcaaaagagaagcagtgttctcactcaggtcaatcagctcaaaacctccatgcagtcagttttacaggagtggaagatttatgatcaactctatgatgaagtgaatatgatgacaatccgattctggtactgcatggaacacagcaagcctgtggtgttatcattggagaccttgagatgccaggtggagaaccttcagtctctgcaagatgaagctgagagcagtgaagggagttgggagaaactccaggaggttatcggcaaactcaaaggtctctgcccctctgttgctgaaataatcgaagagaaatgccaaaatactcataaaaggtggactcaggtgaaccaagccattgcagaccagttgcagaaggcccagagtctgctccagctctggaaggcctatagcaatgctcatggtgaagctgccgcaaggctgaagcagcaggaagcaaagtttcaacagctcgcaaacatcagcatgtctggaaacaacctggcagagatcctgcccccagccctgcaggacataaaggagctgcagcatgatgtgcagaaaacaaaagaagcctttctccaaaattccagtgtcctggatcgactcccacaacccgcagagtccagcacccacatgctcctcccgggccccctgcactctctccagagggctgcttatttggaaaagatgctgcttgtgaaagcaaatgaatttgagaatcatgtgctggcactgacagcccaatcacctgatattgaacatttgaatgaagtgagcctcaagctcccacttagtgacgtagctgtgaagacgttacaaaatatgaaccggcaatggattcgggccacggccacggcactggagcgctgcagtgagcttcagggaattggattgaatgaaaagtttctttattgctgtgaaaagtggatccaacttttggagaagatagaagaagcactcaaagtggatgtggctaacagccttcctgagctcctggagcagcagaaaacctataagatgttagaagctgaagtttctataaaccagacaattgctgattcctatgtcacccagtccttacaactcctggacacaacagaaatagagaacagaccagaatttattacagaattctcaaagctgacggatcggtggcagaatgctgtccagggtgttcggcagaggaagggtgacgttgatgggctgaacgcccatgtagccaggtgtggtggcgcatctcttaaaaaacaggaccttcgctactctctgcacactgcctgcggagcggccctgctctgcaggagcagtcacggagctaataaagaaattcattttcaaaggaggcgaactacctgtgccctaaccttggaagctggagaaaagttactgctcacaactgacctgaaaactaaagagtctgtgggtaggagaatcagtcaacttcaggacagctggaaagacatggagccccagctggcagagatgattaagcagttccagagcactgtagagacctgggaccagtgtgaaaagaaaatcaaggagttgaaaagcaggctgcaagttttaaaggcacaaagtgaagatcctcttccagagcttcacgaggacctccataacgaaaaagagctgattaaggtggccatacgtaaacaggagattgaagacagactcaatacatgggttgtattcaatgaaaaaaataaagagttgtgtgcctggctggtgcagatggaaaacaaagttctacagacagcggacattagtattgaagaaatgattgaaaagttacagaagagaacagttggaagagaggaggttccagagagatgggagtgtgagaccattgtcagtgggcatggtaccgaggagagttgctttctctccattagaaagtttcaccagggaaggggcttacatatccttacatgtcagctgataccccaagactgcatggaagaaataaacttgtttagtgaaaacaagttacagttaaagcagatgggtgaccagttgatcaaggccagcaacaaatcaagagcagctgagatcgatgacaagctcaacaaaattaacgatcgttggcaacatctttttgatgtcatcggatcaagtatggcagatcagacaaactccaggtggatgttttttcagtggccacgtggcatacagcgaaccgtcacttggccttgggaccacttgtgcagctgtgcttccactggccacacgggtcctttccatagcagtgtgctcagatgttttgaacaacacatagaatttggaatatacaggagaacctataaggtgaataaagaattgggaggtgataaaaacggacagagatgccccataatctacccgcatgggctggttcaatgtatacggctgggtgaacccctcatactgaagcgggtgaagaagctgaaggagacctttgcttttattcagcagttggacaaaaacatgagcaaccttcgcacctggttggctcgaattgagtctgagctttccaagcctgttgtttatgatgtctgcgatgatcaagagatccagaagaggctcgctgagcagcaggatctacagcgagatattgaacaacacagcgcaggggtggagtccgtgtttaacatctgtgacgtcctactgcacgactccgatgcctgtgcaaatgagaccgagtgtgactcgatccagcagaccaccaggagcctggacagacgctggaggaacatttgtgccatgtccatggagcggcgcatgaaaatcgaggagacgtggcgcctgtggcagaagtttttagacgactattctcgctttgaggactggctcaagtcagctgagaggacggcagcctgcccaaattcctcagaggtgttgtacacgagtgccaaagaggaactgaagaggtttgagcggcagattcatgagcggctcactcagctggagctcatcaacaagcagtaccggcggctggcccgggagaaccgcacagacacggccagcaggctgaagcagatggtccacgagggcaaccagcgctgggacaaccttcagaggcgggtcacagccgtcctgcggagactcaggcatttcaccaaccagagggaagaatttgagggcaccagggagagcattctggtgtggctcacagagatggacctgcagctgaccaacgtggagcacttctcagagagtgacgccgatgacaagatgcgccaactgaatggcttccaacaggaaattacattaaataccaacaagattgatcagctcattgtgtttggggagcagctgattcagaagagcgagcccctggatgctgtgctgattgaggatgagctggaggaactccaccgctactgccaggagggcttggaagatgaaaaggaggcctctgagaatgaaacagacatggaagaccccagagaaatccagactgattcttggcgtaaacggggagagagcgaggaaccgtcatctcctcagtccctgtgtcatctagtggccccagggcacgagcggtctggctgcgagacccctgtcagcgtggactccatccccctggagtgggaccacacaggcgacgtggggggctcctcctctcacgaagaggacgaggagggcccatactacagcgcactgtcaggtaaatccatttcggatggccactcgtggcatgttcccgacagcccttcctgtcccgagcatcactacaagcaaatggaaggtgacaggaatgttccacctgttccccctgcgtccagcaccccttataaaccaccctatgtaagtcttaacttcactgggagtacagcctatgtctgtgccttcgacagatgggagatgattcaagcacaggagcttcacaataagctcaaaataaaacaaaatttgcaacagctgaactctgatatcagcgccatcactacttggctgaaaaaaactgaagcagagctggaaatgttaaagatggcaaagcctccctctgatatccaggaaatagaactgagagtgaagagactgcaggagatactgaaagcctttgacacttacaaggcattagtggtctctgtcaacgtgagcagcaaggaatttctgcaaaccgagagccccgaatccacagagctccaaagtagactccgccagctgagcctgctctgggaagcagcacagggcgcagtggacagctggagagggggcttacgacagtcgctcatgcagtgccaggacttccaccagttgagtcaaaatctgctgctgtggttagcgagtgccaagaaccggaggcagaaggctcatgtcaccgatccaaaggcagacccccgggctctcctagagtgtcggagggaactaatgcaactggaaaaggagctggtagaacgtcaacctcaagtggacatgttacaggagatttcaaacagccttctcattaagggacatggagaagactgtattgaagctgaagaaaaggtgcatgttattgagaagaaactcaaacagttacgggagcaagtgtcccaagatttaatggccttgcagggaacccagaacccagcctcacccctgcccagcttcgacgaggtagactcgggggaccagcctcctgcaacatccgtgccagctccccgagcaaagtttctttacccagcagttcagagcagtgagaactacagaaggcgaggaggagacagagagcagggtccccggcagcacacggccacagcgctccttcctctcaagggtggtccgggcagccctacccctgcagctgctcctcctgctgctgctgctcctggcctgcctgctgccctcctccgaagaagactacagctgcactcaggccaacaactttgcccggtccttttaccccatgctgaggtacaccaatgggccaccccccacatagagggcatagctggccacagtgctacaccacctgcctga

SEQ ID NO: 293301 - protein, 893 aa, Artificial Sequence
  derived and/or modified sequence
MAERGRLGLPGAPGALNTPVPMNLFATWEVDGSSPSCVPRLCSLTLKKLVVFKELEKELISVVIAVKMQGSKRILRSHEIVLPPSGQVETDLALTFSLQYPHFLKREGNKLQIMLQRRKRYKNRTILGYKTLAAGSISMAEVMQHPSEGGQVLSLCSSIKEAPVKAAEIWIASLSSQPIDHEDSTMQAGPKAKSTDNYSEEEYESFSSEQEASDDAVQGQDLDEDDFDVGKPKKQRRSIVRTTSMTRQQNFKQKVVALLRRFKVSDEVLDSEQDPAEHIPEAEEDLDLLYDTLDMEHPSDSGPDMEDDDSVLSTPKPKLRPYFEGLSHSSSQTEIGSIHSARSHKEPPSPADVPEKTRSLGGRQPSDSVSDTVALGVPGPREHPGQPEDSPEAEASTLDVFTERLPPSGRITKTESLVIPSTRSEGKQAGRRGRSTSLKERQAARPQNERANSLDNERCPDARSQLQVQLQIPRKTVYDQLNHILISDDQLPENIILVNTSDWQGQFLSDVLQRHTLPVVCTCSPADVQAAFSTIVSRIQRYCNCNSQPPTPVKIAVAGAQHYLSAILRLFVEQLSHKTPDWLGYMRFLVIPLGSHPVARYLGSVDYRYNNFFQDLAWRDLFNKLEAQSAVQDTPDIVSRITQYIAGANCAHQLPIAEAMLTYKQKSPDEESSQKFIPFVGVVKVGIVEPSSATSGDSDDAAPSGSGTLSSTPPSASPAAKEASPTPPSSPSVSGGLSSPSQGVGAELMGLQVDYWTAAQPADRKRDAEKKDLPVTKNTLKCTFRSLQVSRLPSSGEAAATPTMSMTVVTKEKNKKVMFLPKKAKDKDVESKSQCIEGISRLICTARQQQNMLRVLIDGVECSDVKFFQLAAQWSSHVKHFPICIFGHSKATF

SEQ ID NO: 293302 - DNA, 2682 bp, Artificial Sequence
  derived and/or modified sequence
atggccgagagaggcagactgggcctgcccggcgcccccggcgccctgaacacccccgtgcccatgaacctgttcgccacctgggaggtggacggcagcagccccagctgcgtgcccagactgtgcagcctgaccctgaagaagctggtggtgttcaaggagctggagaaggagctgatcagcgtggtgatcgccgtgaagatgcagggcagcaagagaatcctgagaagccacgagatcgtgctgccccccagcggccaggtggagaccgacctggccctgaccttcagcctgcagtacccccacttcctgaagagagagggcaacaagctgcagatcatgctgcagagaagaaagagatacaagaacagaaccatcctgggctacaagaccctggccgccggcagcatcagcatggccgaggtgatgcagcaccccagcgagggcggccaggtgctgagcctgtgcagcagcatcaaggaggcccccgtgaaggccgccgagatctggatcgccagcctgagcagccagcccatcgaccacgaggacagcaccatgcaggccggccccaaggccaagagcaccgacaactacagcgaggaggagtacgagagcttcagcagcgagcaggaggccagcgacgacgccgtgcagggccaggacctggacgaggacgacttcgacgtgggcaagcccaagaagcagagaagaagcatcgtgagaaccaccagcatgaccagacagcagaacttcaagcagaaggtggtggccctgctgagaagattcaaggtgagcgacgaggtgctggacagcgagcaggaccccgccgagcacatccccgaggccgaggaggacctggacctgctgtacgacaccctggacatggagcaccccagcgacagcggccccgacatggaggacgacgacagcgtgctgagcacccccaagcccaagctgagaccctacttcgagggcctgagccacagcagcagccagaccgagatcggcagcatccacagcgccagaagccacaaggagccccccagccccgccgacgtgcccgagaagaccagaagcctgggcggcagacagcccagcgacagcgtgagcgacaccgtggccctgggcgtgcccggccccagagagcaccccggccagcccgaggacagccccgaggccgaggccagcaccctggacgtgttcaccgagagactgccccccagcggcagaatcaccaagaccgagagcctggtgatccccagcaccagaagcgagggcaagcaggccggcagaagaggcagaagcaccagcctgaaggagagacaggccgccagaccccagaacgagagagccaacagcctggacaacgagagatgccccgacgccagaagccagctgcaggtgcagctgcagatccccagaaagaccgtgtacgaccagctgaaccacatcctgatcagcgacgaccagctgcccgagaacatcatcctggtgaacaccagcgactggcagggccagttcctgagcgacgtgctgcagagacacaccctgcccgtggtgtgcacctgcagccccgccgacgtgcaggccgccttcagcaccatcgtgagcagaatccagagatactgcaactgcaacagccagccccccacccccgtgaagatcgccgtggccggcgcccagcactacctgagcgccatcctgagactgttcgtggagcagctgagccacaagacccccgactggctgggctacatgagattcctggtgatccccctgggcagccaccccgtggccagatacctgggcagcgtggactacagatacaacaacttcttccaggacctggcctggagagacctgttcaacaagctggaggcccagagcgccgtgcaggacacccccgacatcgtgagcagaatcacccagtacatcgccggcgccaactgcgcccaccagctgcccatcgccgaggccatgctgacctacaagcagaagagccccgacgaggagagcagccagaagttcatccccttcgtgggcgtggtgaaggtgggcatcgtggagcccagcagcgccaccagcggcgacagcgacgacgccgcccccagcggcagcggcaccctgagcagcaccccccccagcgccagccccgccgccaaggaggccagccccaccccccccagcagccccagcgtgagcggcggcctgagcagccccagccagggcgtgggcgccgagctgatgggcctgcaggtggactactggaccgccgcccagcccgccgacagaaagagagacgccgagaagaaggacctgcccgtgaccaagaacaccctgaagtgcaccttcagaagcctgcaggtgagcagactgcccagcagcggcgaggccgccgccacccccaccatgagcatgaccgtggtgaccaaggagaagaacaagaaggtgatgttcctgcccaagaaggccaaggacaaggacgtggagagcaagagccagtgcatcgagggcatcagcagactgatctgcaccgccagacagcagcagaacatgctgagagtgctgatcgacggcgtggagtgcagcgacgtgaagttcttccagctggccgcccagtggagcagccacgtgaagcacttccccatctgcatcttcggccacagcaaggccaccttctag

SEQ ID NO: 293303 - DNA, 2682 bp, Artificial Sequence
  derived and/or modified sequence
atggcagagaggggtcggttaggtttgcccggtgcacctggagcactgaacactcccgttcccatgaatctttttgctacttgggaggtggatggatcctcccctagttgcgttcctaggctttgttcattgaccttgaagaagcttgtggtgttcaaggaactggaaaaggagctcatctcggtggtgatagccgtcaagatgcagggcagcaagaggatcctgcggagtcatgaaatagtgttgccccctagtgggcaggtggagacagatctcgctctgactttttccctccagtacccccatttcctgaagcgggaaggcaacaagctacaaattatgctccagcgcagaaagcgttataagaacaggacgatactgggttataaaacgcttgccgctggaagcattagtatggcggaggtgatgcaacatcctagtgagggggggcaggttctctcactgtgcagttcaatcaaggaagctcccgtcaaggcagctgaaatttggatcgcctctctttcaagccagcctatcgatcatgaagactccactatgcaggcagggcccaaagcaaagtccaccgacaactattctgaagaagaatacgaatcattctcgtctgagcaagaggcctccgatgacgccgtacaggggcaagatctggacgaggacgactttgacgtcgggaaacccaagaagcagcgcaggagcatcgtgagaactaccagcatgactcggcagcagaattttaagcagaaggtggtggcactcctcagacgattcaaagtatcggatgaagtcctggacagtgagcaagacccagccgaacacattcctgaggcagaggaagatttggacctgctctacgacaccctcgacatggagcacccctcagactcaggacccgatatggaggacgatgacagtgtgttgtctacccccaaacccaagctgcggccctactttgaggggcttagccactctagctcccagaccgaaatcgggtccattcatagtgccagatcccataaggaaccaccttcccctgccgatgtccccgagaaaacaagatccctgggcgggcgccagccttcggattctgtgtcagatactgtcgccctgggcgtccccggacccagggaacaccccggccagccggaggatagtccagaagccgaagcgagcaccctggacgtcttcaccgagcgtctgcccccctcgggacgcatcaccaagactgaaagtttggtgattccgtcaactagaagcgaggggaaacaagcaggtagacggggtaggtcaacttccctgaaagagaggcaagcggcgcgtccccagaacgagcgcgccaactcactggataatgaacggtgtccagatgcgcggagtcagctacaggtgcagctgcagattccaagaaagacggtttacgaccagctcaatcacattctgatctctgacgaccagttacctgaaaacatcattttagtaaacacttctgactggcaggggcagttcctgtcagacgtgctccagaggcatacccttccagtcgtttgtacatgctccccagctgacgtccaggcagccttctcaaccatcgttagcagaatccagaggtactgcaactgcaacagccaaccccccacacccgtcaagattgccgtggctggggcacagcactacctgtctgctattctgaggctttttgtcgagcagctgagccacaaaacacccgattggttggggtacatgagattcctagttattccgctaggctcccatcccgtggctagatacctgggaagtgttgattaccgctacaataatttctttcaggatctggcctggcgggatctctttaataagttggaggctcagtctgctgtgcaggataccccagacatcgtgtcccgcatcacccagtatatagccggcgctaattgtgcccaccagctgcccattgccgaggctatgcttacatataagcagaaatctcctgacgaggagtcttcccagaaattcattccctttgtaggagtggtaaaggtcggcattgtagagcctagtagcgcgacctctggagattcggatgacgctgcccccagcggcagtggaactttgtctagcaccccacccagcgctagccctgccgccaaagaggcgtcgcctaccccaccctctagtccctcagttagcggaggacttagcagcccgtctcaaggggtgggggcagaattgatgggcctgcaggttgactactggaccgccgcgcagccggcggaccgtaaaagagacgccgagaaaaaggatctccccgtcaccaagaacacactcaagtgcaccttccgcagcttacaggtgtccagactgccttcctccggggaggctgccgcaacacctaccatgagcatgactgttgtgacgaaagaaaaaaacaagaaggttatgtttctacccaagaaggctaaggacaaagacgttgaatccaagtctcagtgcatcgaggggatatcgagactaatttgcacagcccgacaacaacagaatatgctcagggtcctcatcgacggcgtagagtgctcagatgttaaattctttcaactcgctgcccaatggagtagccatgttaagcacttccccatttgcatatttggacactctaaagctactttctag

SEQ ID NO: 293304 - DNA, 2682 bp, Artificial Sequence
  derived and/or modified sequence
atggccgagcggggccgcctgggcctgcccggggcccctggggccctgaacacccctgtgcccatgaacctgtttgccacctgggaggtggatggcagcagccccagctgtgtgccccggctgtgcagcctgaccctgaagaagctggtggtgttcaaggagctggagaaggagctgatctctgtggtgattgctgtgaagatgcagggcagcaagaggatcctgcggagccatgagatcgtgctgcccccatctggccaggtggagacagacctggccctgaccttcagcctgcagtacccccacttcctgaagcgggagggcaacaagctgcagatcatgctgcagaggaggaagcgctacaagaacagaaccatcctgggctacaagaccctggccgccggcagcatctccatggccgaggtgatgcagcaccccagcgagggcggccaggtgctgagcctgtgcagcagcatcaaggaggcccctgtgaaggctgctgagatctggatcgccagcctgagcagccagcccatcgaccacgaggacagcaccatgcaggccggccccaaggccaagagcacagacaactacagcgaggaggagtatgagagcttcagcagcgagcaggaggccagtgatgatgctgtgcagggccaggacctggatgaagatgactttgatgtgggcaagcccaagaagcagaggaggagcatcgtgaggaccacctccatgacccggcagcagaacttcaagcagaaggtggtggccctgctgcggcgcttcaaggtgtctgatgaggtgctggacagcgagcaggaccctgctgagcacatccctgaggccgaggaggacctggacctgctgtatgacaccctggacatggagcaccccagcgacagcggccctgacatggaggatgatgacagcgtgctgagcacccccaagcccaagctgcggccctactttgagggcctgagccacagcagcagccagacagaaattggcagcatccacagcgcccggagccacaaggagccccccagccctgcagatgtgcctgagaagaccaggagcctgggcggccggcagcccagcgacagcgtgtctgacacagtggccctgggcgtgcccggcccccgggagcaccctggccagcctgaggacagccctgaggccgaggccagcaccctggatgtgttcacagagcggctgccccccagcggccgcatcaccaagacagagagcctggtgatccccagcaccaggtctgagggcaagcaggccggcagaagaggccgcagcaccagcctgaaggagcggcaggccgcccggccccagaatgaaagagccaacagcctggacaatgaacgctgcccagatgcccggagccagctgcaggtgcagctgcagatccccaggaagacagtgtatgaccagctgaaccacatcctgatcagtgatgaccagctgcctgagaacatcatcctggtgaacaccagtgactggcagggccagttcctgagtgatgtgctgcagaggcacaccctgcctgtggtgtgcacctgcagccctgcagatgtgcaggccgccttcagcaccatcgtgagccgcatccagcgctactgcaactgcaacagccagccccccacccctgtgaagattgctgtggccggggcccagcactacctgagcgccatcctgcggctgtttgtggagcagctgagccacaagaccccagactggctgggctacatgaggttcctggtgatccccctgggcagccaccctgtggcccgctacctgggctctgtggactaccgctacaacaacttcttccaggacctggcctggagggacctcttcaacaagctggaggcccagagcgctgtgcaggacaccccagacatcgtgagccgcatcacccagtacatcgccggggccaactgtgcccaccagctgcccatcgccgaggccatgctgacctacaagcagaagagcccagatgaggagagcagccagaagttcatcccctttgtgggcgtggtgaaggtgggcatcgtggagcccagcagcgccaccagcggggacagtgatgatgctgcccccagcggcagcggcaccctgagcagcaccccaccttctgccagccctgctgccaaggaggccagccccaccccacccagcagccccagcgtgtctgggggcctgagcagccccagccagggcgtgggcgctgagctgatgggcctgcaggtggactactggacagctgcccagcctgctgacaggaagagagatgctgagaagaaggacctgcctgtgaccaagaacaccctgaagtgcaccttccgcagcctgcaggtgtcccggctgcccagcagtggagaggccgccgccacccccaccatgtccatgacagtggtgaccaaggagaagaacaagaaggtgatgttcctgcccaagaaggccaaggacaaggatgtggagagcaagagccagtgcatcgagggcatcagccgcctcatctgcacagcccggcagcagcagaacatgctgcgggtgctgattgatggagtggagtgcagtgatgtgaagttcttccagctggccgcccagtggagcagccacgtgaagcacttccccatctgcatcttcggccacagcaaggccaccttctag

SEQ ID NO: 293305 - DNA, 2682 bp, Artificial Sequence
  derived and/or modified sequence
atggccgagcggggccggctgggcctgcccggcgcccccggcgccctcaacacccctgtgcctatgaacttgtttgccacctgggaagtggatggcagcagcccttcctgcgtgccccgcctgtgttccctcaccctgaagaagttggtcgtctttaaagagctcgaaaaggaactgatctcagtggtcatagcagtaaaaatgcagggatcaaagcggattctgaggagtcacgaaatcgttctgcctccctccggccaggtcgagactgatcttgcactaacattttctttgcaataccctcattttctcaagagagaggggaacaaactccagattatgctgcagaggagaaagcggtataagaaccggactattctcggttataagaccttggcggctggcagtatcagcatggcggaggtgatgcagcacccctccgagggcggccaagtgctaagcctgtgctcctccatcaaggaggcccccgtgaaagccgccgaaatatggattgcttctttgtccagccaaccaatagatcatgaagacagtaccatgcaggctggccccaaggcgaagtctaccgacaattactccgaggaagagtatgagtccttttccagtgaacaggaggccagcgatgatgctgttcagggtcaagacctcgacgaggatgactttgatgtcggaaaacccaaaaagcagcggcggtcaattgttagaaccacaagcatgactcggcagcagaatttcaagcagaaagtggtcgctcttctccgacgcttcaaggtgagtgacgaggtgttggatagcgagcaggaccctgccgagcacatacccgaggcagaggaggatttagacctgttatacgacactttggacatggaacatcccagtgactccggtcctgacatggaagacgatgatagtgtgctctccaccccgaagccgaaattgcggccctactttgagggtctgagccacagttcatcacagaccgaaatcgggtccatccatagtgcaaggtcccacaaagagccccctagtcctgcagacgttcccgaaaagacccgatctcttggggggagacaacccagtgatagcgtatctgacaccgtcgcactgggggtacccggaccccgtgagcatccaggacagccggaggactccccagaagcggaagcatcaaccttggacgtatttaccgaaagactccctcctagtggccggattactaagacagagtctctggtgatccccagcacacgttccgagggcaagcaagctggacgccggggtcgctcgacttccttaaaggaacgccaggccgcgagacctcaaaatgagcgtgccaattcccttgacaacgaacggtgtcccgatgccaggagtcagctgcaagttcaactccagatcccacgcaagacggtatacgaccagttgaaccacatcctaatctccgacgatcaacttccagagaacatcatcctggtgaatacaagtgactggcagggacagttcctttctgacgtactgcagcggcacacccttcccgtggtttgcacctgcagtccagccgacgtccaggctgccttctctaccatcgtcagccggatacagcgatattgtaattgtaatagccagccccccacgccagtgaagattgctgtggctggcgcacagcactacctgagcgccattctgcggcttttcgtggagcagctttcacacaaaactcctgactggcttggctatatgaggttcctcgtaattccgcttgggagccaccccgtggcccggtacctggggtcagttgattaccgctacaataacttcttccaggacctggcctggagggatttattcaacaaactcgaagcgcaaagcgctgttcaggacacccctgatatcgtcagccgcatcacacagtatatcgcaggggcaaactgcgcccaccagctgcccatcgctgaagccatgcttacctataaacagaagtcacctgatgaggagagctcccaaaaatttatacctttcgttggtgtcgtaaaagtagggattgtggaacccagtagcgctacaagtggcgactccgatgacgccgccccttctggctctggcacactgagctctaccccaccctcggccagtccagctgctaaagaggcttctcccacacctccttccagcccgtcagtgagtggtggcctgtcctccccatctcaaggagtgggagcggagctgatgggactccaggtggattactggaccgctgcacagccggcggatagaaaacgcgatgctgagaagaaggatctgcccgtgaccaaaaacaccctcaaatgtacattccggtccttgcaggtgtcccggctcccctctagcggtgaggccgctgctaccccaaccatgtccatgacggtggtaaccaaggagaaaaataagaaggtgatgttcctccccaagaaagcaaaagacaaagatgtggagtctaaaagccagtgcatcgagggcatcagccgcttgatctgtactgccagacaacagcagaacatgctgcgcgtactgattgacggcgtggagtgttctgacgtgaagtttttccaacttgctgcacagtggagctcccatgttaagcattttccgatttgcatattcggtcattcaaaggccactttttag

SEQ ID NO: 293306 - DNA, 6332 bp, Artificial Sequence
  derived and/or modified sequence
ggccgcagctcgtcgccgcccgcgggcctgtccgacgccggggcccggcccgtcccctccgccgcccggcagccatgtgaccgcgccgccgccctccgcgcgcccggcccgcccgccgcgcgtccgcggcccggccgcagccccaggccgccgagggagcggcggggccggcgccatggccgagcgaggccgcctcggcctccccggcgcgcccggcgcgctcaacacgcccgtgcccatgaacctgttcgccacctgggaggtggacggctccagccccagctgcgtgcccaggttgtgcagcctgactctgaagaagctggtggtcttcaaggagctggagaaggagctgatctccgtggtgatcgctgtcaagatgcagggctccaaacgaatcctgcggtcccatgagattgtgctgccccccagtggacaagtggagacagacctggccctgaccttctccttgcagtatcctcacttcttgaagagggaaggcaacaagcttcagatcatgctgcagcgcagaaagcgctacaagaacagaaccatcctgggctacaagacgctggccgcgggctccatcagcatggctgaggtgatgcaacacccgtctgaaggtggccaggtgctgagcctctgcagcagcatcaaggaggcccccgtcaaggcggccgagatctggatcgcctccctgtccagccagcccattgaccacgaagacagcaccatgcaggccggccccaaggccaagtccacggataactactccgaggaggagtatgagagcttctcctccgagcaggaggccagtgacgacgccgtgcaggggcaggacttggacgaggacgactttgacgtggggaagccgaagaagcagcggagatcgattgtaagaacgacgtccatgaccaggcaacagaacttcaagcagaaagtggtagcgctgctgcggaggttcaaagtgtccgacgaggtcctggactcggagcaggaccctgcggagcacatccccgaggcagaggaggacctggacctcctgtatgacaccctggacatggagcaccccagcgacagcggccccgacatggaggatgacgacagcgtcctcagcacccccaagccgaagctgcggccatactttgaaggcctgtcgcactcgagctcgcagacggagattgggagcatccacagcgcccgcagccacaaggagcccccaagcccggctgacgtgcccgagaagacgcggtccctgggaggcaggcagccgagcgacagtgtctctgacacggtggccctcggtgtgccaggcccgagggagcaccctggacagcctgaggacagccccgaggctgaggcctccaccctggatgtgttcacggagaggctgccgcccagcgggaggatcaccaagacagagtcccttgtcatcccctccaccaggtccgaggggaagcaggctggccgacggggccggagcacatccttgaaggagcggcaggcagcacggccccagaatgagcgggccaacagcctggacaacgagcgctgcccggacgcccggagccagctacaggtgcagctgcagatccccaggaagactgtgtatgaccagctcaaccacatcctcatctccgatgaccagcttcccgaaaacatcatccttgtcaacacctcggactggcaggggcagttcctctccgacgtcctgcagaggcacacgctccccgtggtgtgcacgtgctctcctgcggacgtccaggcggccttcagcaccatcgtctcacggatacagagatactgcaactgcaattcccagcccccgacccccgtgaagatcgccgtggcgggagcgcagcattacctcagtgccatcctgcggctctttgtggagcagctgtcccacaagacacccgactggctcggctacatgcgcttcctggtcatcccactgggctcccaccccgtggccaggtacctaggctccgtggactaccgctacaacaacttcttccaggacctggcctggagagacctgttcaacaagctggaggcccagagtgcggtacaggacacgccagacattgtgtcacgcatcacgcagtacatcgcaggggccaactgtgcccaccagctccccatcgcagaggccatgctgacctacaagcagaagagccctgacgaagagtcctcccaaaagttcattccctttgtcggggttgtgaaggttggaattgtggagccatcctcggccacatcaggcgactcggacgacgcggccccctcgggctctggcacgctctcctccaccccgccgtccgcatctcctgcggccaaggaggcctcacccaccccgccctcctccccgtcggtgagcggaggcctgtcctcccccagccagggtgtcggcgccgagctgatggggctgcaggtggactactggacggcagcacagcctgcggacaggaagagggacgccgagaagaaggacctgcctgtcaccaaaaacacgctcaagtgcactttccggtccctccaggtcagcaggctgcccagcagcggcgaggctgcagccacgcccaccatgtccatgaccgtggtcaccaaggagaagaacaagaaggtgatgtttctgcccaagaaagcgaaggacaaggacgtggagtctaagagccagtgcattgagggcatcagccggctcatctgcactgccaggcagcagcagaacatgctgcgggtcctcatcgacggcgtggagtgcagcgacgtcaagttcttccagctggccgcgcagtggtcctcgcacgtgaagcacttccccatctgcatcttcggacactccaaggccaccttctagccccacccaccagggggcccacctcctgccccatgctgtgaggggcccagctgcatttctgttaacatttcagtttactacagagacagacgcttaaaacacaaagagaaacagtcttaagtatgaatgtgctcacaacgtggaaactaacgggggagctcctgccaggagccgaataactgctctgcttattaacccgaacgttcggcccggggctgggaagccagaaggacgatgctgagccatggatcgcggaaggcgtcctctggcctcaggagccacccagagcctcacaggctgagttcttgcctctgtgtcctgtccttcctggaagtcaggactctgcttcctcagggagcccggggaaggcggagctcagtggccacaggccgagggccatggggccgctcagtcccgttggggttgtcctgagttgagcctgggggggccgtcctgcccgcctaagagatgcccccagcaccgcacactcgtggttcccaataaactcctgcctgcggcggaggttttatagcagcagatatttttaatgcttttcaatacatgttctaatgtagctgccaaacatgttgctcttctgaagtccccctggggctgggcagagccagcagagcctgcccccacttccccagcccctgccccaccccgcctcacaccttccccactctcaggctgttcttgaaacaccatgaggcttctgcgtgtagtccctgccccaaacttagcaagcacaggggcctccacagcccaggtggccccagaaaatgttccagagcccagcttggtacatagtgagatgctgctggggttggcctgaggtgggggccacttcctccaccccagtgggtatgtctgaggtcagccatggggatatctgggttgagattcaggttttggtgaatatggggcaggcgtccagatgtgtttgtgtcacctgctgcaacgctgtagccaatgaagattccagcgggatggcctgaccagcggggccggcactttggagccgtgggtgcagccaggtaccccgtgcagggcctgggaggctctccaggccacagtcctcagagcgtgttgggtcccatgttgtgtgtgggttccatgccctccacacagcaggagagggcttccctgaccacacctgccccctcagtcctgcttctccccagtaagcctgcactgtggggtctccataggaggagctggggaagctggggccctcccaggggtcctgatcgaccctgggggctcttggcctggtttcgtaagatggagcactgcaaaaggccatgctcagaaagcaaacgcagggcagggtgggcctcgagccggggctggaggggtctccacccttgctggcctgagagatggcccacatttcttacttgtgaccgccctgctcttcctggccgccccccccaggtggctgaacagggtgattttgttgtggtgaggggccaggatgtggcctggtgtgcagcctcagctccctgggttcaggcctcagaggtagcctgtgtgcaggaggcagagccccagcccctcccagccagagcccctccacaccagggactcctccttcacctgggaccaggagcctggggcacaccccagggtgggggagagggtaggaaggtctcccattgaatcctggcttcaggctctgccccgagaagtgtctgcggtgagggtgtgagccccgggctgatggcctctgaccccggcaacaggtgggaccctgactgactcgttcagctgcccccaagctgggctgcagagcatctgtttttctgctctccagtttcttttctttttttttttttttttttttgagatggagtcttgctctgttgcccaggctggagtgcagtggcatgatctcagctcactgcagcctccgtctcccaggttcaagcagttctcctgcctcagcctcccgagtagctgggattacaggcgtgtgccaccacacctggctattttttttgtatttttagtagagatggggttttgccatgttggccaggctggtcttgaactcctgacctcaagtgatccacccgcctcggcctcccaaagtgctgggattacaggcgtgagtcaccgcgtcctgcctgctcttcctgtttctttcccaagggtcacactcagtagggagatgaaggtggaaacatccttgctgtggctttctggcctcagagcaggttttagaggaaggggccacaggctgcctagtgcatcctggctgtgggcagcccctttcctggagccctcctgcctaccccgtacctcccatctggctgcacagctccatccttagccacgcaaggggagaacatgggcagagtctccatccagcagctgggggttctggtggcactccctgtgcccctgctgctgctgggctgtgggtctgccctgcacccaggagccccacggtccatcccccacaccatgcccagcaccagggaggttgggcagacaagacctgggccatgccagccctctgtgcctcggttttcccactggttacacaggatggtcgcattttccctgcctacctcacagagctgttctgagggtgcatggaggagcactctgtcccaccaaggacaactagaaaccaaagccatctgacagccagtgcggtaagggcgggggatgtgtgtgtgaggtgtgcacaccccccgagaacctggccctggactggcctcacaggacaggaggcagccccttgtagagctagggctcagccccatcagtctcaaaggttaagccaccagtcaccaccgaggcacccctcaggcctggtggccactgtccactattacgtagacagaccccaccctcacccaggccagctgtgggccagtcccgccctgcaatctggtctgctgccttcctcttccatgttggtccccttggccactgtctctgggcatgcaagccagtgtcctggttcagtgcctcggccagagctggggcaggagaggggcctctgggtgagagctgggggtgtctctgcagggtactggcagccttgccacactgtcctcattcccagatggaaagacctgagtgcctctcgccttcctccgggaatgaattcctcatgaaaatgaccaggccacttcttccgagggccaggccgccccctccccgagacctgtcctgccgtccgcgggtgtgtggcctgtaggggactgagagctgggcttgctgggcacctctggaatctgaccctgtgggccaaagaagcaccactgtagtttctgcagacccccatgcggttcattgtgcattgtttggtttctaggatgtatgtgttgctagttttttttaatgaaaccctggattaatgtaaatagctttttggggaacggattctaatgtcacgtatgtgaccgtgtggactatttcaaggtgctgatgcaacactaataaacctggaggggccggc

SEQ ID NO: 293307 - DNA, 2682 bp, Artificial Sequence
  derived and/or modified sequence
atggccgaacggggaagactcggcctcccaggcgcacctggcgctctaaacacccctgttccaatgaacttattcgccacatgggaggtggacggttcatcaccatcctgtgttccccgtctgtgttccctgacattaaaaaagctagtcgtgtttaaagaactagaaaaggagttgatctcagtcgtaatcgcagtcaagatgcaggggagcaaacggattctgcgctctcacgagatcgttctgccaccttcagggcaggtggaaacagacttggcactgactttttccctgcagtacccacacttcctgaagcgggaggggaacaagctccagatcatgcttcagcgcagaaaacgctacaaaaatcggaccatcttgggctacaagaccctggcagccggatccatatccatggcagaggtgatgcagcatccttcggaaggtggccaggtcttatcactgtgttcatctattaaggaggcccctgtgaaggcagcggaaatttggattgcaagcctgagctcacagccaatcgaccacgaggactcaactatgcaggcaggcccaaaggctaagagcactgataattacagcgaggaggagtatgagagcttttctagtgagcaggaggcttctgacgacgccgtgcaaggccaggacctcgatgaagacgatttcgacgtggggaagcctaagaaacagcgcaggtcaattgttaggaccacgtccatgacaaggcaacagaacttcaaacagaaggtagtagcgctcctgcgtagatttaaagtcagtgatgaagtgctggatagtgagcaagacccagccgaacacattccggaagcagaagaggatctcgatctcttatacgacaccctggacatggaacatccctccgattcaggccctgacatggaagacgatgacagtgtcctgtccactccaaaacctaaactgagaccatacttcgaagggcttagtcactcttcgagccagaccgagatcggcagcatacacagtgccaggagtcacaaagagcccccatcccctgccgatgtcccagagaaaactcgatcacttgggggacgacaaccatccgacagtgtgtccgataccgtggccctgggagtgcctggccctcgagagcatcctggccagcctgaggactctccagaggccgaggcatcgacgttggacgtctttaccgaacggcttccgccatctggcaggattaccaagaccgaatcacttgtcatacccagcaccagatcggagggcaagcaagccggaaggagaggaagatctaccagcctgaaggaacgtcaagccgcaaggcctcagaacgaaagggccaattcactcgacaacgagcgctgtccagacgcgagatcccagttacaggtgcagcttcagattccgaggaaaaccgtgtacgaccaactgaaccatattttgattagcgacgatcagctgcccgagaatattattcttgtcaacacgagcgactggcagggtcagtttttgtcagacgtgctgcagcgacacaccctgcccgtggtgtgcacttgtagtcccgcagatgtgcaggccgcattctctactattgtgagcagaattcaaagatactgtaattgtaacagtcagccccctacgcccgttaaaattgctgtggcaggagcccagcattacctgagcgccattttacgcctatttgtggagcagctgagccataagacccctgattggctaggttatatgcgcttcctggtcattccactgggcagtcacccagtggccaggtatcttgggtcagtggactatagatacaacaatttctttcaggaccttgcttggcgggatctgtttaacaaactggaagctcagtcagccgtgcaggacactcctgatattgtgtctcgtatcacacagtatattgcaggtgctaattgtgctcaccagttacctatcgctgaagcaatgcttacatataagcaaaagtctccagacgaggagagttcccagaagttcataccattcgtgggcgttgtgaaagtcgggattgtggagcccagcagtgctacctccggtgattctgatgatgccgctccatcaggtagcggcacactgtcatcaacccctccgtccgcaagccctgctgctaaagaggcgagccctactccccctagctcaccaagcgttagtggtggcctctcatcgccaagccagggcgtaggtgctgagctgatggggctgcaagtggactactggactgctgctcagcctgcagatcggaagcgagacgcggaaaaaaaagacctccctgttaccaaaaacaccctcaaatgtacctttaggtccttgcaagtcagccgactgcctagtagtggggaagcagctgcaacccccaccatgagcatgacagttgtgaccaaggagaagaataagaaagtcatgttccttcccaagaaggctaaggataaagatgtggaatctaagtctcagtgtatcgaaggaatctctaggctcatctgcacagctcgtcagcagcagaatatgctgcgggtgctgattgacggcgtggagtgttcggacgttaagttttttcagctcgctgcacagtggtcctcacacgtgaaacactttccaatctgcatcttcggacactctaaggctactttttag

SEQ ID NO: 293308 - protein, 722 aa, Artificial Sequence
  derived and/or modified sequence
QILIATITHLLPSTEASSYEMDKRLVVSLLLCLLDWIMALPLKTLLQPFHATGAESDKTEKSVLNCIYKVLHGCVYGAQCFSNPRYFPMSLSDLASVDYDPFMHLESLKEPEPLHSPDSERSSKLQPVTEVKTQMQHGLISIAARTVITHLVNHLGHYPMSGGPAMLTSQVCENHDNHYSESTELSPELFESPNIQFFVLNNTTLVSCIQIRSEENMPGGGLSAGLASANSNVRIIVRDLSGKYSWDSAILYGPPPVSGLSEPTSFMLSLSHQEKPEEPPTSNECLEDITVKDGLSLQFKRFRETVPTWDTIRDEEDVLDELLQYLGVTSPECLQRTGISLNIPAPQPVCISEKQENDVINAILKQHTEEKEFVEKHFNDLNMKAVEQDEPIPQKPQSAFYYCRLLLSILGMNSWDKRRSFHLLKKNEKLLRELRNLDSRQCRETHKIAVFYVAEGQEDKHSILTNTGGSQAYEDFVAGLGWEVNLTNHCGFMGGLQKNKSTGLTTPYFATSTVEVIFHVSTRMPSDSDDSLTKKLRHLGNDEVHIVWSEHTRDYRRGIIPTEFGDVLIVIYPMKNHMFSIQIMKKPEVPFFGPLFDGAIVNGKVLPIMVRATAINASRALKSLIPLYQNFYEERARYLQTIVQHHLEPTTFEDFAAQVFSPAPYHHLPSDAVGSYPEILPSETPTATQVDGADLASPMSPRTSKSRMSMKLRRSSGSANKS

SEQ ID NO: 293309 - DNA, 2858 bp, Artificial Sequence
  derived and/or modified sequence
gtagaacatggcatagaagacggagctgccgacagccaagacgtactgggaggagaaagcgccgccgtgagcctggctctcccgcaggctgcgtgtcagccacacggcggacggggcggacggggcacgcgttccgagaggggccgccgctacccaccttgtgggcgggcaccgtcctggtcgcccccgggggccccacgacgaagtgcacgtcggccatgagctcgttgttgaacatgagcgcgttcctgcaaagcgctcctggttgcagccagaatgcatgacttcaggaggactgtgaaggaggtcatcagtgtggtcaaagtgtgtgagtccacgctgcggaagaggctcacggaatttgaagacacccccaccagtcagttgaccattgatgagttcatgaagatcgacctggaggaggagtgcgaccccccctcgtacacagctgggcagaggaagctgcggatgaagcagcttgaacaagtcctgtcaaaaaaactggaggaggttgaaggtgaaatatccagttaccaggatgcaattgagattgaactagaaaacagccggccaaaggccaaggggggcctggccagcctggcaaaagatggctccaccgaggacaccgcgtccagcttgtgtggcgaggaggacacagaggacgaggagctggaagccgcggccagccacctgaacaaagacttataccgggagctccttggtggtgcccccggcagctcggaagcagcaggaagccccgagtggggcggcagacctccggccctggggtccctgctggaccccctccccactgcagccagcctgggcatctcagactccatccgcgaatgcatctcctctcagagcagcgaccccaaagatgcttcaggagacggtgagctggacctcagtggcattgatgacctggagattgacaggtacatcctgaatgagtcggaagcccgcgtgaaggccgagctgtggatgagggagaacgccgagtacctgcgggaacagagggaaaaagaagcaagaatagcgaaagagaaggagctcggcatctacaaggaacacaagcccaagaagtcttgcaagcgacgggagccaattcaggccagtaccgccagggaggccatcgagaagatgctggagcagaagaagatctccagcaagatcaattatagcgtgctccggggcctcagcagcgccggcgggggcagtccgcacagggaggatgcacagcccgagcatagcgccagtgccaggaagctgtcacgaaggaggacgccggccagcagaagtggggctgaccctgtgaccagtgtggggaaaaggttgaggcctctggtgtctacgcagccagcaaagaaggtggccacgggagaggctttgctcccaagctctcccaccctcggagctgagcctgccaggccccaggcggtgctggtggagagcgggcccgtgtcataccacgccgacgaggaggctgacgaggaggagcctgacgaggaggacggggagccctgcgtcagtgccctgcagatgatgggcagcaacgactatggctgtgatggcgatgaggacgacggctactgaagtgtggcctccaggcaggtgatgtcctggcagggggcctcgcgggtctcctcagcatcagacgggcttccaggaccgcagcaggcaggccccagcgccgagactcctggtgacaggtggcacctgtcccacagccctcgtcccatgtggaacttaccattgggattgtgtttctattcagcaagggaaaccggaccaagcgtctgcatgtgtgtgatcagatgtgggccgggtgtgtgcagggctgggtcccgctgcctgccgtcgactcatccaaggaccctccaaggctggcagtgtggtgttgctactattaaggaaacaggcttggggcagccccactgctggtccaagtgtgtggagggctgagtgtgctggccctgtgactcaggaccagctctggagtctccagcccaccctccgcaccgtcccctcctgagcagcactcggcgccagcagcctctgccagagtggaagccagagccctgcaggtgtccggcgcagccgtgggagctgaggatctggcacttgagaggcagcagctccttgaaggtcctctgcctccagctgtggccctgcatccagatacctgcctcgtccgaggcagacacccccacccctgcctcctccagacccccctccccgctgcctgcaccgcctggagcagcatgggggtcagacccctgctccagggccacttgagttgtgggcccaggagccctgcggctgccggcaggtgaactgagtgcccgacagctgagaccggcgcccacccgtcctgagcatagctctgtaggcagtgcgggcatagcctgcatagtgtcctggcgctgggagttccccgtggacagagccagagggcagtggcgctccctgtcagagctggatcaggccccccatcgaggagggagggcagacggaggcccgagagcctccccaggcctcttcgtgggaaggccccagtaccactcgtaggaggtctcagctctggcatggctgccccggatgtggccgagggggcttcaccctgtgtccttaggagggggtggccttgaggcagagccgtgcctcactgacccccaggggcctcatcctccccatggaatgggctgtatgtcctgccccaacttggcccgcagcaggccagacccccctacccccgcccagagctcagtagccagcctgggtcctgccagggcttctcgagggcttgggggaagaatagatttagtaaagcaggaagatctgttgttacttaacag

SEQ ID NO: 293310 - DNA, 228 bp, Artificial Sequence
  derived and/or modified sequence
atggagttctatgaaagtgcttactttattgttctaattccatccattgtgataaccgtcatctttctgtttttctggctgttcatgaaagaaacgctttacgatgaggtgctggccaagcagaagagggagcaaaaacttattccaaccaagaccgacaagaaaaaggccgagaaaaaaaagaacaaaaagaaggaaattcagaatggtaacctgcacgagtcttag

SEQ ID NO: 293311 - DNA, 183 bp, Artificial Sequence
  derived and/or modified sequence
atggagttttacgaatcggcatattttatagttctgataccttctatcgtgattactgttattttcctgttcttctggctgttcatgaaggagacgttatacgatgaggtactggccaagcagaaacgggagcagaaactaattcctacaaaaaccgacaagaaaaaggctgagaagaaatag

SEQ ID NO: 293312 - DNA, 595 bp, Artificial Sequence
  derived and/or modified sequence
gcggcggcggcggcggcggcggcggcgcctcggagcgggcggcccgggctgtagtgccggcgccgccgcgtcttcccggtctcctttcccggccgcacagggtagattttcgttccgtcacccaggctggagtgcagtggtgtgaccttggcttgctgcaaccctttgcctcctgggttcaagtgattctcattgcctcagcctcctaagtagctgggattacagttcttttaagatagggcaggaatgaaaactctcaatatagagcaggattttaaacctggggcccgtgcatattcttcagggaatccagaaacctggagattatatgtaaaacttagttttataggatcacattgacaaaagtaccatggagttttatgagtcagcatattttattgttcttattccttcaatagttattacagtaattttcctcttcttctggcttttcatgaaagaaacattatatgatgaagttcttgcaaaacagaaaagagaacaaaagcttattcctaccaaaacagataaaaagaaagcagaaaagaaaaagaataaaaagaaagaaatccagaatggaaacctccatgaatcc

SEQ ID NO: 293313 - DNA, 291 bp, Artificial Sequence
  derived and/or modified sequence
agggactctgcctctaaggatgatgtctgccttggcctgccatgcctggaattccaattcatctttactggttctaaaggttttataggatcacattgacaaaagtaccatggagttttatgagtcagcatattttattgttcttattccttcaatagttattacagtaattttcctcttcttctggcttttcatgaaagaaacattatatgatgaagttcttgcaaaacagaaaagagaacaaaagcttattcctaccaaaacagataaaaagaaagcagaaaagaaaaa

SEQ ID NO: 293314 - DNA, 228 bp, Artificial Sequence
  derived and/or modified sequence
atggagttctatgagagcgcctacttcatcgtgctgatccccagcatcgtcatcaccgtcatcttcctgttcttctggctgttcatgaaggagaccctgtatgatgaggtgctggccaagcagaagcgggagcagaagctgatccccaccaagacagacaagaagaaggccgagaagaagaagaacaagaagaaggagatccagaatggaaacctgcacgagagctag

SEQ ID NO: 293315 - DNA, 183 bp, Artificial Sequence
  derived and/or modified sequence
atggagttctatgagagcgcctacttcatcgtgctgatccccagcatcgtcatcaccgtcatcttcctgttcttctggctgttcatgaaggagaccctgtatgatgaggtgctggccaagcagaagcgggagcagaagctgatccccaccaagacagacaagaagaaggccgagaagaagtag

SEQ ID NO: 293316 - DNA, 228 bp, Artificial Sequence
  derived and/or modified sequence
atggagttctacgagagcgcctacttcatcgtgctgatccccagcattgtgattaccgtcatctttctgttcttctggcttttcatgaaggagaccctatacgatgaggtgctggctaaacagaaacgagaacagaagctgatccccacgaagacagacaaaaagaaggctgaaaaaaaaaaaaataagaagaaagagattcagaacggaaatttacacgaaagctag

SEQ ID NO: 293317 - DNA, 183 bp, Artificial Sequence
  derived and/or modified sequence
atggagttctacgagagcgcctacttcatcgtgctgatccccagcattgtcattaccgttattttcctgttcttttggctgttcatgaaggaaactctatacgatgaggttctcgctaaacagaagcgggagcagaaactgataccaactaagaccgacaaaaaaaaagccgaaaaaaaatag

SEQ ID NO: 293318 - DNA, 228 bp, Artificial Sequence
  derived and/or modified sequence
atggaattttacgagtctgcttactttattgtgctgattccatcaatcgtgatcacagttatctttctgtttttttggttgttcatgaaagagaccctgtacgacgaggttctggccaagcagaaacgagagcagaaactaattcccacaaaaaccgacaagaaaaaggccgagaagaagaagaataaaaagaaagagatccagaacgggaacctgcacgagtcctag

SEQ ID NO: 293319 - DNA, 183 bp, Artificial Sequence
  derived and/or modified sequence
atggagttctacgaaagcgcctactttatcgtcctgattccatcaattgtgatcaccgtgatatttcttttcttctggttgtttatgaaggagaccctgtatgatgaggtgcttgccaaacaaaaacgagaacagaagcttatcccaaccaagacagataaaaaaaaggcagagaagaagtag

SEQ ID NO: 293320 - DNA, 228 bp, Artificial Sequence
  derived and/or modified sequence
atggagttctacgagagcgcctacttcatcgtgctgatccccagcatcgtgatcaccgtgatcttcctgttcttctggctgttcatgaaggagaccctgtacgacgaggtgctggccaagcagaagagagagcagaagctgatccccaccaagaccgacaagaagaaggccgagaagaagaagaacaagaagaaggagatccagaacggcaacctgcacgagagctag

SEQ ID NO: 293321 - DNA, 183 bp, Artificial Sequence
  derived and/or modified sequence
atggagttctacgagagcgcctacttcatcgtgctgatccccagcatcgtgatcaccgtgatcttcctgttcttctggctgttcatgaaggagaccctgtacgacgaggtgctggccaagcagaagagagagcagaagctgatccccaccaagaccgacaagaagaaggccgagaagaagtag

SEQ ID NO: 293322 - protein, 1989 aa, Artificial Sequence
  derived and/or modified sequence
MDEVEQDQHEARLKELFDSFDTTGTGSLGQEELTDLCHMLSLEEVAPVLQQTLLQDNLLGRVHFDQFKEALILILSRTLSNEEHFQEPDCSLEAQPKYVRGGKRYGRRSLPEFQESVEEFPEVTVIEPLDEEARPSHIPAGDCSEHWKTQRSEEYEAEGQLRFWNPDDLNASQSGSSPPQDWIEEKLQEVCEDLGITRDGHLNRKKLVSICEQYGLQNVDGEMLEEVFHNLDPDGTMSVEDFFYGLFKNGKSLTPSASTPYRQLKRHLSMQSFDESGRRTTTSSAMTSTIGFRVFSCLDDGMGHASVERILDTWQEEGIENSQEILKALDFSLDGNINLTELTLALENELLVTKNSIHQAALASFKAEIRHLLERVDQVVREKEKLRSDLDKAEKLKSLMASEVDDHHAAIERRNEYNLRKLDEEYKERIAALKNELRKEREQILQQAGKQRLELEQEIEKAKTEENYIRDRLALSLKENSRLENELLENAEKLAEYENLTNKLQRNLENVLAEKFGDLDPSSAEFFLQEERLTQMRNEYERQCRVLQDQVDELQSELEEYRAQGRVLRLPLKNSPSEEVEANSGGIEPEHGLGSEECNPLNMSIEAELVIEQMKEQHHRDICCLRLELEDKVRHYEKQLDETVVSCKKAQENMKQRHENETHTLEKQISDLKNEIAELQGQAAVLKEAHHEATCRHEEEKKQLQVKLEEEKTHLQEKLRLQHEMELKARLTQAQASFEREREGLQSSAWTEEKVRGLTQELEQFHQEQLTSLVEKHTLEKEELRKELLEKHQRELQEGREKMETECNRRTSQIEAQFQSDCQKVTERCESALQSLEGRYRQELKDLQEQQREEKSQWEFEKDELTQECAEAQELLKETLKREKTTSLVLTQEREMLEKTYKEHLNSMVVERQQLLQDLEDLRNVSETQQSLLSDQILELKSSHKRELREREEVLCQAGASEQLASQRLERLEMEHDQERQEMMSKLLAMENIHKATCETADRERAEMSTEISRLQSKIKEMQQATSPLSMLQSGCQVIGEEEVEGDGALSLLQQGEQLLEENGDVLLSLQRAHEQAVKENVKMATEISRLQQRLQKLEPGLVMSSCLDEPATEFFGNTAEQTEQFLQQNRTKQVEGVTRRHVLSDLEDDEVRDLGSTGTSSVQRQEVKIEESEASVEGFSELENSEETRTESWELKNQISQLQEQLMMLCADCDRASEKKQDLLFDVSVLKKKLKMLERIPEASPKYKLLYEDVSRENDCLQEELRMMETRYDEALENNKELTAEVFRLQDELKKMEEVTETFLSLEKSYDEVKIENEGLNVLVLRLQGKIEKLQESVVQRCDCCLWEASLENLEIEPDGNILQLNQTLEECVPRVRSVHHVIEECKQENQYLEGNTQLLEKVKAHEIAWLHGTIQTHQERPRVQNQVILEENTTLLGFQDKHFQHQATIAELELEKTKLQELTRKLKERVTILVKQKDVLSHGEKEEELKAMMHDLQITCSEMQQKVELLRYESEKLQQENSILRNEITTLNEEDSISNLKLGTLNGSQEEMWQKTETVKQENAAVQKMVENLKKQISELKIKNQQLDLENTELSQKNSQNQEKLQELNQRLTEMLCQKEKEPGNSALEEREQEKFNLKEELERCKVQSSTLVSSLEAELSEVKIQTHIVQQENHLLKDELEKMKQLHRCPDLSDFQQKISSVLSYNEKLLKEKEALSEELNSCVDKLAKSSLLEHRIATMKQEQKSWEHQSASLKSQLVASQEKVQNLEDTVQNVNLQMSRMKSDLRVTQQEKEALKQEVMSLHKQLQNAGGKSWAPEIATHPSGLHNQQKRLSWDKLDHLMNEEQQLLWQENERLQTMVQNTKAELTHSREKVRQLESNLLPKHQKHLNPSGTMNPTEQEKLSLKRECDQFQKEQSPANRKVSQMNSLEQELETIHLENEGLKKKQVKLDEQLMENSVVGSSREGCSSLPEIVCEDAAPEVHCDA

SEQ ID NO: 293323 - DNA, 5970 bp, Artificial Sequence
  derived and/or modified sequence
atggacgaggtggagcaggatcaacacgaagccaggttgaaggagctcttcgatagctttgacaccaccggcactgggtctctcggacaggaggagttaaccgacctttgtcacatgctgtccctcgaggaagttgctcctgttttgcaacagacacttcttcaggataacctgcttgggcgtgtacactttgaccaattcaaggaggccctcatactgatcctttcccggactttgtccaatgaggagcattttcaagagccagattgcagtctggaagcacagcctaaatacgtgcgggggggtaaacgctacggccgcagatcccttcccgagttccaggagagcgtggaggagttcccagaagttaccgtcatcgaaccactggacgaagaggctaggccctctcatatccccgcaggtgactgtagcgagcactggaaaacacaaaggagtgaggagtacgaggctgaagggcagctacgtttttggaaccccgacgacttaaacgcatctcaatctggaagctccccacctcaggattggatcgaagaaaagctgcaagaagtttgtgaggacctgggcattacccgggatggacacctcaatcgcaagaagcttgtaagtatttgcgaacagtacggcttgcaaaacgtcgatggcgagatgctcgaagaagtgttccacaaccttgacccagatggaactatgagtgtagaggattttttttacggactatttaaaaacggcaaaagcctgacaccaagcgcttccacgccatatagacagctgaaaagacatctgagcatgcagagtttcgatgaaagcggcaggagaaccactacttcaagcgcgatgacctccacgattggatttagggtcttttcctgtttggacgatggcatggggcatgctagcgttgaacgtatcctggacacctggcaggaggaaggcattgagaactcccaggagatcctgaaagcgctggatttcagcctggatggcaacatcaatctaactgagctaactctggctctggaaaacgagctgcttgtaaccaagaacagcattcaccaggctgcactcgcaagttttaaggcggagataaggcatcttttggagcgcgtggatcaggtggtccgtgagaaagaaaaattgcgctcagatctggacaaggctgaaaagttgaagagtttaatggcctctgaagtggatgaccatcatgccgccatcgaaaggcggaatgaatataaccttagaaaattggacgaagaatacaaagaaagaattgccgctcttaaaaatgagttgaggaaagaacgggaacagattctgcaacaggccggaaaacagcggctagagctggagcaggaaattgaaaaggccaaaacggaagagaactatatacgcgaccgcctggctctttcattaaaagagaactctcggctggagaatgaactgctcgaaaatgcagagaagctcgctgagtacgagaatctgacaaacaaattgcaacggaacctcgagaatgtcctcgctgaaaaattcggggatctcgacccatcttcagctgaatttttcttgcaagaggagcgacttacacagatgcgcaacgaatacgaacgacagtgccgggtgcttcaggaccaagtggatgaactgcagtccgagctggaagagtatagagcacagggaagggttctgagactgcccctgaaaaactctcctagcgaggaggtcgaagcaaattcaggcggaatcgaacctgaacatggcctgggcagtgaggagtgcaatcccttgaacatgagtatagaagccgaactggtgattgagcagatgaaagaacagcatcaccgcgatatatgctgtctgcgcctggagctcgaggacaaagtgcgacattacgagaagcagcttgacgagacggtggtgtcgtgcaagaaagcccaggagaatatgaaacagaggcatgagaacgagacacacaccctcgagaaacagatttctgacctgaaaaatgagatagccgaacttcagggtcaggccgcggtgctaaaagaggctcatcacgaggcgacatgccgccacgaggaggagaaaaagcagttacaagtgaaactcgaagaagagaaaacacacctgcaggagaaactgcggctgcagcacgagatggaactcaaggcccggctaactcaggctcaggcctctttcgagagagaacgcgaggggctgcaatcctcggcgtggacagaggaaaaagtacgggggctcactcaggaattagagcagttccaccaggagcagctcacttctttggttgaaaaacacacccttgagaaggaggaactgcggaaagagctactggaaaaacatcagcgtgaactgcaggaaggccgcgaaaaaatggaaaccgagtgcaatagaaggacctcacagattgaagcccaatttcaaagcgactgccagaaggtgaccgaaagatgtgaatctgccctgcaaagcctggagggaagataccgccaggagcttaaagacttgcaagagcagcagcgggaggagaaaagccagtgggagttcgaaaaagatgagttgacacaagaatgcgcagaagcgcaggaattgcttaaggagactttgaagagagaaaaaaccacctcgttggtgttaacccaagaaagagagatgttagagaagacttataaggagcacctgaatagcatggtggtggaacggcagcagctgttgcaggatctggaggacctgcggaatgtgtctgagacgcagcagtctctccttagtgaccagatactggagctaaagtcttctcacaagcgagaactccgggaacgggaagaggtgttgtgccaggctggtgcttccgagcaactggcctcacaacgactggagcggcttgaaatggaacacgaccaggagagacaggaaatgatgtctaagctgttggctatggagaatattcacaaggctacatgcgagacagcagatagggaaagagcggagatgtccaccgagatctctagacttcagagcaagattaaagagatgcaacaagccacttctcccctgtcaatgctgcagagtggatgtcaggttatcggagaagaggaggtagagggggatggcgccctgtcattgttgcaacagggagagcagctgctcgaggagaacggtgatgtgctgctgtcgcttcagcgtgctcacgagcaggcagtgaaggagaacgtgaaaatggccacggagatctctcgtctccagcagagattgcagaagttagagcctgggcttgtgatgtctagctgcctcgacgaacctgctactgagttttttggtaataccgctgagcaaaccgaacagttcctgcagcagaataggacaaaacaagttgagggtgtaactaggcggcacgtactgtctgaccttgaagacgatgaagtaagagatcttgggagcaccggcacatctagtgtacagagacaggaagtaaagatagaagagtcagaggccagcgtggaggggttttccgaactcgagaattctgaggaaactcgaactgagagctgggagctaaagaaccagatctctcaactgcaggagcagctgatgatgctgtgcgctgactgtgatcgcgcttctgaaaagaaacaggacctgctatttgacgtgagcgtgctgaagaaaaagctgaaaatgttggagaggattcccgaggcttctcctaaatataagttactgtatgaggacgtgagcagggaaaatgattgcctccaggaagagctgcggatgatggagacccgctacgatgaggcgctcgagaataataaggaattgaccgcggaggtctttcgtctgcaggacgaactgaagaagatggaagaggtgactgagacgttcctgtcactagaaaaaagttatgacgaagttaagatagaaaatgaggggctaaatgtccttgtgcttagacttcaggggaagattgagaaactgcaggagagcgtggtgcaaagatgtgattgctgcctctgggaggcatccttagagaatctggaaatcgagcccgacggcaacattctgcagctgaatcaaacattggaggagtgcgtgcccagggtacggagcgtccaccacgtgattgaggagtgtaaacaagaaaatcagtacttagaagggaacactcagctgctggaaaaagtcaaagctcacgagattgcttggctccacggtacaatccagacacaccaggaaagaccaagggtgcaaaaccaggtcattctcgaagaaaacaccactctactggggtttcaggataaacacttccagcaccaagcgactatagcggagctggaactcgaaaaaaccaaactgcaagaattgaccagaaagcttaaggagcgggtgaccatcctggtcaaacagaaggacgtcctgagccacggcgaaaaggaggaagagctcaaggctatgatgcacgacttgcaaattacatgtagtgaaatgcagcagaaagtcgagctcctcaggtacgagtccgaaaaactgcagcaggaaaattcgattttacgtaatgagattacaaccctgaatgaagaggatagtatttcaaatctgaagctaggcacactgaacggctctcaggaggaaatgtggcagaagaccgaaacagtgaaacaggagaacgccgcagtgcaaaagatggtggagaatctgaaaaaacagatttctgagcttaaaataaagaatcagcagcttgaccttgagaacaccgagttgagccaaaagaattcacagaaccaggaaaaactgcaggagttgaatcagcggctaacagagatgctctgccagaaagagaaagagcccgggaacagcgccttagaggagcgtgagcaggaaaaatttaaccttaaggaggagcttgaacgctgcaaagtgcagtcttcaacactggtgtcgagtttagaagccgaactgtcagaagtaaagattcaaacccatatcgtccagcaggaaaatcatctgctcaaagatgagctggagaaaatgaaacagctgcacagatgccccgacctgtccgactttcagcagaagattagtagcgtgcttagctataatgagaagctgcttaaggaaaaggaggctctctctgaagaactgaactcatgcgttgataagctcgctaaaagtagcttgctcgagcatcggattgccactatgaagcaggaacagaaaagttgggaacaccagtcagcgtcactgaagagccaacttgtggcctcccaggaaaaagtgcaaaatttggaggatacagtacaaaatgtgaacttacagatgtccaggatgaaatccgatttgcgcgtcactcaacaggaaaaagaagctctcaagcaggaggtgatgtccctgcataaacagctccagaatgccggcggcaagtcttgggctcctgaaatcgccacacacccgagcgggctccacaatcagcagaaacgactgtcatgggacaagctcgaccacctcatgaacgaagagcagcagctgttgtggcaggaaaatgagcgccttcaaaccatggttcagaataccaaggcagaattgacacacagtcgggaaaaagtccgccaacttgagtctaatctcctcccaaaacatcagaagcacttgaatcctagcggtactatgaaccctaccgagcaagaaaaactgagtctgaaaagggagtgtgaccagtttcagaaggagcaatcacccgctaataggaaagtctcccagatgaattccttggagcaagagctggagactatccacctggagaacgagggcctgaagaagaaacaagtgaagctcgacgagcagctaatggagaactctgtcgtcggaagttctcgagagggctgctcctccctccctgaaattgtctgcgaagacgcagcacctgaggtccactgtgacgcctag

SEQ ID NO: 293324 - DNA, 5970 bp, Artificial Sequence
  derived and/or modified sequence
atggatgaggtggagcaggaccagcacgaggcccggctgaaggagctgtttgacagctttgacaccactggaacaggcagcctgggccaggaggagctgacagacctgtgccacatgctgagcctggaggaggtggcccctgtgctgcagcagaccctgctgcaggacaacctgctgggccgggtgcactttgaccagttcaaggaggccctgatcctgatcctgagcaggaccctgagcaatgaggagcacttccaggagccagactgcagcctggaggcccagcccaagtatgtgcggggcggcaagagatatggaagaagaagcctgcctgagttccaggagagcgtggaggagttccctgaggtgaccgtcatcgagcccctggatgaggaggcccggcccagccacatcccagctggggactgcagcgagcactggaagacccagaggtctgaggagtatgaagctgagggccagctgcgcttctggaacccagatgacctgaatgccagccagagcggcagcagccccccccaggactggattgaggagaagctgcaggaggtgtgtgaggacctgggcatcaccagagatggccacctgaacaggaagaagctggtgtccatctgtgagcagtatggcctgcagaatgtggatggagagatgctggaggaggtgttccacaacctggaccctgatggcaccatgtctgtggaggacttcttctacggcctcttcaagaatggcaagagcctgacccccagcgccagcaccccctaccggcagctgaagaggcacctgtccatgcagagctttgatgagagcggccgccgcaccaccaccagcagcgccatgaccagcaccatcggcttccgggtcttcagctgcctggatgatggcatgggccacgcctctgtggagcgcatcctggacacctggcaggaggagggcatcgagaacagccaggagatcctgaaggccctggacttcagcctggatggcaacatcaacctgacagagctgaccctggccctggagaatgagctgctggtgaccaagaacagcatccaccaggccgccctggccagcttcaaggccgagatccgccacctgctggagcgggtggaccaggtggtgcgggagaaggagaagctgcggagtgacctggacaaggccgagaagctgaagagcctgatggccagcgaggtggatgaccaccacgccgccattgaaagaagaaatgagtacaacctgaggaagctggatgaggagtacaaggagagaattgctgccctgaagaatgagctgaggaaggagcgggagcagatcctgcagcaggccggcaagcagaggctggagctggagcaggagattgagaaggccaagacagaggagaactacatccgggaccggctggccctgagcctgaaggagaacagccggctggagaatgagctgctggagaatgctgagaagctggccgagtatgagaacctgaccaacaagctgcagaggaacctggagaatgtgctggccgagaagtttggagacctggaccccagcagcgctgagttcttcctgcaggaggagcggctgacccagatgagaaatgaatatgaaaggcagtgccgggtgctgcaggaccaggtggatgagctgcagagcgagctggaggagtaccgggcccagggccgggtgctgcggctgcccctgaagaacagccccagcgaggaggtggaggccaacagcggcggcatcgagcctgagcacggcctgggcagcgaggagtgcaaccccctgaacatgagcattgaagctgagctggtgattgagcagatgaaggagcagcaccaccgggacatctgctgcctgcggctggagctggaggacaaggtgcgccactatgagaagcagctggatgaaacagtggtgtcctgcaagaaggcccaggagaacatgaagcagagacatgaaaatgagacccacaccctggagaagcagatcagtgacctgaagaatgaaattgctgagctgcagggccaggccgctgtgctgaaggaggcccaccacgaggccacctgcagacatgaggaggagaagaagcagctgcaggtgaagctggaggaggagaagacccacctgcaggagaagctgcggctgcagcacgagatggagctgaaggcccggctgacccaggcccaggccagctttgagcgggagcgggagggcctgcagagcagcgcctggacagaggagaaggtgcggggcctgacccaggagctggagcagttccaccaggagcagctgaccagcctggtggagaagcacaccctggagaaggaggagctgaggaaggagctgctggagaagcaccagcgggagctgcaggagggccgggagaagatggagacagagtgcaacagaaggaccagccagatcgaggcccagttccagagcgactgccagaaggtgacagagcgctgtgagagcgccctgcagagcctggagggccgctaccggcaggagctgaaggacctgcaggagcagcagcgggaggagaagagccagtgggagtttgagaaggatgagctgacccaggagtgtgccgaggcccaggagctgctgaaggagaccctgaagcgggagaagaccaccagcctggtgctgacccaggagcgggagatgctggagaagacctacaaggagcacctgaacagcatggtggtggagcggcagcagctgctgcaggacctggaggacctgagaaatgtgtctgagacccagcagagcctgctgagtgaccagatcctggagctgaagagcagccacaagcgggagctgcgggagcgggaggaggtgctgtgccaggccggggccagcgagcagctggccagccagaggctggagcggctggagatggagcatgaccaggagcggcaggagatgatgagcaagctgctggccatggagaacatccacaaggccacctgtgaaacagctgaccgggagcgggcagagatgagcacagagatcagccggctgcagagcaagatcaaggagatgcagcaggccaccagccccctgtccatgctgcagagcggctgccaggtgattggagaggaggaggtggagggagatggagccctgagcctgctgcagcagggcgagcagctgctggaggagaatggagatgtgctgctgagcctgcagagggcccacgagcaggccgtgaaggaaaatgtgaagatggccacagagatcagccggctgcagcagaggctgcagaagctggagcccggcctggtgatgagcagctgcctggatgagcccgccacagagttcttcggcaacacagctgagcagacagagcagttcctgcagcagaacagaaccaagcaggtggagggcgtgacccggcggcacgtgctgagtgacctggaggatgatgaggtgcgggacctgggcagcacaggcaccagctctgtgcagaggcaggaggtgaagattgaggagagcgaggcctctgtggagggcttcagcgagctggagaacagcgaggagaccaggacagagagctgggagctgaagaaccagatcagccagctgcaggagcagctgatgatgctgtgtgccgactgtgaccgggccagcgagaagaagcaggacctgctgtttgatgtgtctgtgctgaagaagaagctgaagatgctggagcgcatccctgaggccagccccaagtacaagctgctgtatgaagatgtgtcccgggagaatgactgcctgcaggaggagctgaggatgatggagaccaggtatgatgaggccctggagaacaacaaggagctgacagctgaggtgttccggctgcaggatgagctgaagaagatggaggaggtgacagagaccttcctgagcctggagaagagctatgatgaggtgaagattgaaaatgaaggcctgaatgtgctggtgctgcggctgcagggcaagattgagaagctgcaggagagcgtggtgcagagatgtgactgctgcctgtgggaggccagcctggagaacctggagattgaaccagatggcaacatcctgcagctgaaccagaccctggaggagtgtgtgccccgggtgcgctctgtgcaccacgtgattgaggagtgcaagcaggagaaccagtacctggagggcaacacccagctgctggagaaggtgaaggcccatgaaattgcctggctgcacggcaccatccagacccaccaggagcggccccgggtgcagaaccaggtgatcctggaggagaacaccaccctgctgggcttccaggacaagcacttccagcaccaggccaccatcgccgagctggagctggagaagaccaagctgcaggagctgaccaggaagctgaaggagcgggtgaccatcctggtgaagcagaaggatgtgctgagccacggggagaaggaggaggagctgaaggccatgatgcatgacctgcagatcacctgcagcgagatgcagcagaaggtggagctgctgcgctatgagagcgagaagctgcagcaggagaacagcatcctgagaaatgagatcaccaccctgaatgaggaggacagcatcagcaacctgaagctgggcaccctgaatggcagccaggaggagatgtggcagaagacagagaccgtgaagcaggagaatgctgctgtgcagaagatggtggagaacctgaagaagcagatcagcgagctgaagatcaagaaccagcagctggacctggagaacacagagctgagccagaagaacagccagaaccaggagaagctgcaggagctgaaccagaggctgacagagatgctgtgccagaaggagaaggagcccggcaacagcgccctggaggagcgggagcaggagaagttcaacctgaaggaggagctggagcgctgcaaggtgcagagcagcaccctggtgagcagcctggaggccgagctgtctgaggtgaagatccagacccacatcgtgcagcaggagaaccacctgctgaaggatgagctggagaagatgaagcagctgcaccgctgcccagacctgagtgacttccagcagaagatcagctctgtgctgagctacaatgagaagctgctgaaggagaaggaggccctgtctgaggagctgaacagctgtgtggacaagctggccaagagcagcctgctggagcaccgcatcgccaccatgaagcaggagcagaagtcctgggagcaccagagcgccagcctgaagagccagctggtggccagccaggagaaggtgcagaacctggaggacacagtgcagaatgtgaacctgcagatgagcaggatgaagagtgacctgcgggtgacccagcaggagaaggaggccctgaagcaggaggtgatgagcctgcacaagcagctgcagaatgccggcggcaagtcctgggcccctgagatcgccacccaccccagcggcctgcacaaccagcagaagaggctgtcctgggacaagctggaccacctgatgaatgaggagcagcagctgctgtggcaggagaatgaaaggctgcagaccatggtgcagaacaccaaggccgagctgacccacagccgggagaaggtgcggcagctggagagcaacctgctgcccaagcaccagaagcacctgaaccccagcggcaccatgaaccccacagagcaggagaagctgagcctgaagagagaatgtgaccagttccagaaggagcagagccctgccaacaggaaggtgtcccagatgaacagcctggagcaggagctggagaccatccacctggagaatgaaggcctgaagaagaagcaggtgaagctggatgagcagctgatggagaacagcgtggtgggcagcagccgggagggctgcagcagcctgcctgagatcgtgtgtgaagatgctgcccctgaggtgcactgtgatgcctag

SEQ ID NO: 293325 - DNA, 5970 bp, Artificial Sequence
  derived and/or modified sequence
atggacgaggtggagcaggaccagcacgaggcccggctgaaggagctgtttgacagctttgataccaccggaacaggctcactggggcaagaggagctgacggacttgtgccatatgctgtcactcgaagaagtcgcccccgtgctccagcagaccctgttgcaagataacctacttggacgcgttcactttgaccagtttaaagaggccctcattctaatcttatcacgtacattgagcaatgaggagcatttccaggaaccagactgcagtttagaggctcagccaaaatatgttagggggggcaagcgttacggacgacgcagcctgcccgaatttcaagagagcgttgaagaatttcctgaggtgacagtcattgagcctctcgacgaggaagcgaggccatctcacattcccgcgggagactgttcggaacattggaagacacagagatctgaagagtatgaagccgaaggccaactacgattttggaaccccgatgatttaaatgccagtcaaagcggcagctctccacctcaggactggattgaggagaagctgcaggaggtatgtgaggacctgggaattactagggacggccacctcaaccggaagaagctggtgtctatttgtgaacagtatggcttacaaaacgtagatggggagatgctggaggaagtcttccacaatctggatcctgacggaactatgtctgttgaggactttttttacgggctcttcaagaacggcaagtccctgacaccttctgcctccactccctaccgccagttgaaacggcatctgtctatgcagagctttgacgagtccggacggaggaccacaactagctcagctatgacatctaccatcgggttccgcgtgttttcttgcctcgatgatgggatgggccacgcttccgtcgagcgaattttggatacttggcaggaggaaggaatcgagaacagccaggaaatactcaaagccctggacttttcactagacgggaacattaacttgacggagcttacactggcactggaaaacgaacttctggtcacaaaaaactccatccaccaagcagccctagcttcctttaaggcagaaattagacatctgctggagagagttgatcaggtggttagggagaaagagaagcttagaagcgatctggataaagcagagaagctgaaatcactgatggcttcagaggtagatgaccatcatgcagccatcgaacgccggaacgagtacaacctacgcaaactcgatgaggaatacaaggagaggatcgctgcactgaaaaacgagctcaggaaggagcgcgagcagatacttcagcaggccggcaagcaaaggctggaactggaacaggagatcgagaaggctaagactgaagaaaattatatccgggatagattggctctgtcactgaaagagaactcccggttagagaatgaattgttggagaacgccgagaaactggctgaatacgagaacttgactaataagctgcagagaaatctggagaatgtactggctgagaaattcggcgacttggatccatctagtgcggaattcttcttacaagaagaacgcctgacccagatgcgtaacgagtacgagaggcaatgcagagtgcttcaggatcaggttgacgagctgcagtccgaactggaagagtatagggcgcaggggcgggtcctccgtctccccttaaagaatagcccaagcgaggaggtggaagccaactccggtggtatagagccagagcacggcctggggtccgaagagtgtaatcctttgaacatgagtattgaggcggaactcgttatcgagcagatgaaagaacagcaccaccgtgacatttgctgtctgcggctggagctggaagacaaggtccggcactacgaaaaacagctggatgaaacagtagtatcctgtaagaaagcgcaggagaacatgaagcagagacatgaaaacgaaacacacaccctggaaaagcagatctcagatcttaagaacgaaattgccgaactgcaggggcaagccgctgtgctcaaggaagcccatcacgaggcaacctgccggcatgaggaggaaaagaagcagctgcaggtgaagttggaagaggaaaaaacgcatctacaggagaagttaagattacagcacgaaatggaattgaaagctagattaacccaggcccaggcctcctttgaaagagagagagaaggccttcagtcctcagcatggaccgaagaaaaggtgcgcggcttaactcaggagcttgaacagttccatcaggagcagctcacatccctggttgaaaaacatacactggagaaagaggaattacggaaggaactgcttgaaaaacaccaacgggaactgcaggagggtagagagaagatggaaaccgagtgtaacagaagaaccagccaaatcgaagcccagtttcagtcggactgccaaaaagtgacggagagatgcgagagcgctttgcagagtctggagggtcgatatcgtcaagagcttaaagatctgcaggagcagcagcgcgaagaaaagtcccagtgggagttcgaaaaagatgaacttacccaggaatgcgctgaagcccaggagcttctgaaggagacccttaagagagagaaaacgacttcacttgtgttaacccaggaaagagagatgttggagaagacatacaaggagcacctgaactccatggtcgtggagcgacagcaacttctgcaggacctagaagacctgcgcaatgtcagcgagacccagcagtctctgttatctgatcagattctagaactgaagtctagtcacaaaagagaattgcgtgaacgggaagaggtcctatgccaagccggggccagcgagcagctggcctcccagaggctcgaaaggctggagatggagcacgatcaagagcgccaagagatgatgagcaagctgttagctatggaaaacatccataaggctacatgtgagacggctgatcgagagcgggccgaaatgagtaccgagatctcccgtctgcagagtaaaatcaaggaaatgcagcaagccactagcccgttaagtatgttacagtccggctgccaggtcattggtgaagaggaagtagagggtgacggtgctctgagtttacttcagcagggcgaacagttactcgaggagaatggcgatgtgttgctgtctctgcagagggcccacgagcaggcagtcaaggagaacgtgaagatggctacagagatcagcagattacagcaaaggctgcaaaaactggagccagggctggtaatgtcatcgtgtttggatgagcccgcaaccgagttttttggaaacaccgctgaacagacggaacagtttttacagcagaacagaacaaagcaagtggagggcgtgacgcggaggcacgtactctcggacttggaggatgacgaggtccgcgacctgggctctactggcacatcctctgttcaacggcaggaggttaaaatcgaggagtcagaagcgagtgtggagggattttccgaactggaaaacagcgaggaaacccggactgagagttgggaactgaagaatcagataagccagctgcaggagcagttaatgatgctgtgcgctgactgcgatcgtgcatctgaaaaaaagcaggatttactttttgatgtgtcagtcctcaagaaaaagctgaaaatgcttgagcgaataccggaggcctctccgaagtacaagcttctgtacgaagatgtgtccagagaaaatgattgtttgcaggaagagctccggatgatggaaaccagatatgacgaggctttagaaaataacaaggaactcactgccgaggtgtttagactgcaggatgaactgaaaaaaatggaggaggtgaccgaaacctttttgagcctggagaagtcttatgacgaggtcaaaattgagaacgagggactaaacgtgctggtactgaggctccaaggtaagatcgagaaacttcaggagtccgtggtccagcgatgcgactgctgtctgtgggaggcaagtctggagaatctcgaaattgagcccgatggtaacatcctgcaacttaatcaaactctcgaagaatgcgtgcctcgagtgcgtagcgtccaccatgtcatagaagaatgcaagcaagagaaccagtatttggagggcaatactcagcttctggaaaaggtgaaggctcatgaaatcgcctggctgcatggaactatccagactcaccaagagcgccctagagtgcaaaatcaggtgattttggaggagaacacgacccttcttgggtttcaagacaagcatttccagcaccaggctaccattgccgaactggagctcgaaaagacgaagctgcaagagttaactcgcaaactgaaagaaagagtgaccattttggtgaagcaaaaggatgtgttgtcccatggagagaaggaagaagagttgaaggctatgatgcacgatctgcagataacttgcagcgaaatgcaacagaaggttgaacttctccgatatgagagcgaaaaacttcagcaggagaactccatcctaaggaatgagatcaccactttaaatgaagaggactccatcagcaacttgaagttgggaacactcaacggcagtcaggaagaaatgtggcagaagacggaaactgtcaaacaggagaatgcggcggtgcagaagatggtggagaatttgaagaaacaaatttccgagctgaaaatcaagaaccagcagctggatctggaaaatactgagttgtctcagaagaattcccagaatcaggagaaattacaggagctcaaccagcggctgaccgaaatgctgtgccagaaggagaaagagcctggaaacagcgccctggaggagagagaacaagagaagttcaacctgaaagaggagttggagaggtgcaaggtgcaaagctcgactctagtgtcatcactggaggccgaacttagtgaagtgaagatacagacccacattgtccaacaggaaaatcatctcctcaaagacgagctggagaagatgaagcagctccatcgttgccccgacttatctgatttccaacaaaagatatcctccgtactttcttacaatgagaagctgctgaaagagaaggaagccctatctgaggagttgaactcttgcgtcgataagcttgctaagtcttccctgctcgagcatcgaatcgccacaatgaagcaagaacagaagagctgggagcaccagtcagcgtcactcaagtctcagctagttgcaagccaagaaaaggtccagaacctggaggacacagtgcagaacgtgaatctgcagatgagccgcatgaaatcggacttacgtgtgacccaacaggagaaagaagcactgaagcaggaggtgatgtccctgcacaaacaactgcagaatgctgggggcaaaagttgggctccagagatcgcgacccatccatcaggactccacaaccagcagaagcgcctttcatgggacaaactggaccatctcatgaacgaagaacagcaactgctctggcaggaaaacgaacgtctgcagaccatggttcagaatacaaaggcagagctcactcactcccgcgagaaagtgaggcagctagagtccaacctgcttcctaagcaccaaaagcatttgaacccctcgggaaccatgaaccccaccgaacaagaaaagttatccctaaaacgtgagtgtgatcaatttcagaaggagcaatcccccgctaaccgtaaggtctcacagatgaatagcctcgagcaagagttagaaacaattcacttggaaaatgaaggactgaaaaagaagcaagttaagctggacgagcagctaatggagaactccgtggttgggtcctctcgggagggctgcagttctttacccgagatcgtgtgtgaagatgcggcacctgaggtgcattgcgacgcttag

SEQ ID NO: 293326 - DNA, 5969 bp, Artificial Sequence
  derived and/or modified sequence
atggatgaagtcgagcaagaccagcacgaggccaggctgaaagaactgttcgactcctttgacacgaccgggaccggtagcctaggtcaggaggaactgactgatctgtgccacatgctcagccttgaagaagtagcaccagtgctgcagcagactctcctgcaggacaatttgctgggcagggtgcactttgaccagtttaaggaggccctgatcctcatcctgagcaggactttaagcaacgaagagcattttcaagaaccagactgttctctcgaagcgcagccaaagtacgtgcgcggtggaaaacgatatggcaggcggagcctgcctgagtttcaagaatcagtggaggagttccctgaggtaacagttatcgaaccactggacgaagaggcccgtccctcccatattccagccggagattgctccgagcactggaagacacagcgatcagaggagtatgaggcagaaggccagttgcggttctggaaccccgacgacctgaacgcatcccaaagtgggtcttcgccgccacaagactggattgaagaaaaactgcaggaggtctgcgaggatctgggcattacacgggacgggcacctaaacaggaaaaagctggtctccatatgcgagcagtacggcctgcagaacgttgatggggagatgctggaggaggtgttccacaatctggaccccgacggcactatgtcagtagaggattttttctatggactgtttaagaatggaaagtcacttactcctagcgcttctaccccctaccgacagctgaaaaggcatctgtcgatgcagtcttttgatgagagtgggaggagaactacaacttccagtgcaatgacctctacaatcgggtttcgggtgtttagttgcctcgacgacggcatgggccacgcctctgtggaaaggattctcgatacctggcaagaggaggggatcgagaactctcaggagatactcaaggccctggacttctccctcgacggcaacattaaccttacggagctcaccctcgctctggagaacgaattgctagtgacaaaaaactcgatccatcaagccgcactagcttcattcaaggccgaaattaggcatctgctggagagggtcgatcaggttgtgagagagaaagagaagcttcgctccgacttagataaggcagaaaaactaaaatcgctgatggcttccgaagttgatgaccatcatgcggcaatagaacgtcgaaacgagtacaatctgagaaaactcgatgaggagtacaaagaacggatcgctgcgctcaagaatgaactgcgcaaagaacgagagcagattctccaacaagcaggcaagcaaaggttggaactcgagcaggagatcgagaaggccaagactgaagaaaattacatccgcgatcggttggccctgagtctcaaggagaatagccgcctggaaaacgagctgctggaaaacgctgaaaaactggccgaatatgagaacctaaccaataaactgcagcggaacctggagaatgtgctcgcagagaaattcggtgatctagatcctagttctgctgaattctttttgcaggaagagcgattgacacagatgcgaaacgagtatgaaaggcaatgcagggtcttgcaggatcaagttgacgaactacagtctgaattagaggaatatcgtgcccagggcagggtgctccgcttaccgttaaagaattcacctagtgaagaagtagaggcaaactccgggggtatcgagcctgagcacggcctggggtccgaggagtgtaacccattgaacatgagcatagaggcggagctggtgatagagcagatgaaagagcagcatcaccgcgatatttgctgtctgcgtcttgagctagaggataaggtgagacattatgaaaaacagcttgacgaaaccgttgtgtcatgtaagaaagcgcaggaaaatatgaaacaacggcacgagaacgagacccatactttggaaaagcaaataagcgaccttaaaaatgaaatcgccgagctccaggggcaggccgcagtgttgaaggaagcgcaccacgaggctacttgccgccatgaggaagaaaagaagcaattacaggtcaagcttgaagaagagaagacacatctgcaggaaaaactgagattgcagcacgagatggaattaaaggccagactaactcaggcccaggcatcttttgaacgcgaacgggaaggtttacagtccagtgcgtggaccgaggagaaagttaggggactaacgcaggagctcgagcagttccaccaggagcagttgacatccctggtggaaaaacacacactggagaaggaggaactgcggaaggaactgctcgagaagcaccagcgggaattgcaggagggaagagaaaaaatggagactgaatgtaaccgcagaacctcacagatcgaggcacagttccagagcgactgccagaaagtcactgaacgatgtgagagcgcgttacagtccttggaagggagatatcggcaggaactgaaagacctgcaggaacagcagcgagaagagaagagtcagtgggaatttgagaaggatgagctgactcaggagtgtgccgaagctcaagaactacttaaagaaaccctcaagagagaaaaaacgacctcgttagtgctaacccaagaacgggaaatgttggaaaaaacctacaaagaacatctcaactcaatggtagttgagaggcagcaactcctgcaggatctcgaggatctcaggaacgtcagcgagacccaacagtctttgctctcagaccagatcctggagctgaagagttcacacaaacgagagctcagagagagagaagaggttctgtgtcaggccggtgcatcagaacagcttgcgtcccagcggttggaaaggttagaaatggagcatgaccaggagcggcaggagatgatgtctaaactccttgccatggagaatatacacaaagcaacgtgtgagaccgcagacagggagcgggctgagatgtcaacggagatttctagactgcagagcaaaattaaagagatgcagcaggctacctcgcccctgtccatgctgcaatctgggtgccaagttataggtgaggaggaggttgaaggtgacggagctctgagtctgctacagcagggagaacagttgcttgaagagaacggggatgtgcttctttcactgcaacgggcacacgaacaggcagttaaggaaaatgtcaagatggcaacagagattagcaggttgcaacaaaggttgcagaaactggagcctggcctggtgatgtctagctgtctagatgagccagctacagagttcttcggtaacactgctgaacagacagagcagttcctgcagcagaatcgaacaaaacaggtggagggcgtgacaaggcgccacgtgttgtcggatttagaagatgacgaagtccgggacttgggcagcactggaaccagctcggtgcagcgacaggaagtgaaaatagaggaatctgaagctagtgtggaaggcttctcagaactggagaattctgaagagactcgtaccgagagttgggaactcaaaaatcaaatctctcagctgcaagaacagctcatgatgctttgtgctgactgcgacagagcctcagagaagaagcaggatttactgtttgatgtctccgtgctgaaaaagaagctcaagatgctggagcgcatccccgaggctagccctaaatataaactgctctatgaggacgtgtcccgagagaatgattgcctccaggaagagctcagaatgatggagactagatatgacgaagccttagagaataacaaggagctgacagccgaggtgttcagactgcaggatgaactcaaaaaaatggaagaggtcactgagacctttctcagccttgagaagtcatacgatgaggtcaaaattgaaaatgaggggctgaatgtcctggtgctccgtctgcagggtaaaatagaaaagctgcaagaatcagtggtgcaacgctgcgactgctgcctatgggaagcaagccttgagaatctggagattgaacctgatggcaatatcctccagctgaaccagacactggaggaatgtgtaccaagagtgcgctctgtacatcacgtgattgaggagtgtaaacaggagaatcagtatctggagggcaacacacagctcctggaaaaggtaaaggcccacgagattgcatggctgcatggcaccatccagacccatcaggagcggcctcgggtccagaaccaggtgatcctggaagagaacacaacactgctgggattccaggataaacactttcagcatcaggccacaatcgctgagctggaactcgagaaaaccaagctgcaggaattgactaggaagctcaaagaaagggtgacgattctcgtcaagcagaaagatgtcctctcacacggggagaaggaggaggagctgaaagccatgatgcacgacctgcagatcacgtgttctgaaatgcagcaaaaggtggagttgctcaggtacgagtccgaaaaactgcaacaggagaattccattctgcggaacgaaatcaccacccttaacgaggaagactcaatctcgaatctaaagctgggtacactgaatggaagccaggaggagatgtggcaaaagaccgaaactgtgaagcaggagaacgccgctgtccagaagatggtggagaacttgaagaaacagatttcagagctgaaaatcaaaaatcaacaactcgatctggaaaataccgagctgtcccagaaaaacagtcagaatcaagagaaactgcaagaactgaatcagaggctgacggaaatgttgtgtcagaaggagaaggaacctggaaacagcgctcttgaggaacgcgagcaggagaaattcaatctgaaagaggagctggaaaggtgtaaagtacagtcgtccacactagtttcaagcttagaggccgagttgtctgaggtgaaaatccaaactcacattgttcagcaggagaatcacctgctgaaagatgaacttgaaaagatgaagcagctccaccgctgcccagacctctctgactttcaacagaaaatttcaagcgttctgtcgtacaacgaaaaattgctaaaggagaaagaagccctgagtgaggagctgaattcatgcgtggataagttggctaaatcttcgctgctggaacatcggatcgccacgatgaaacaggaacagaaatcttgggagcaccagtccgcctccctgaagagccagctcgtagcctcacaagagaaagtgcaaaatctggaggacacagtacagaacgtgaacctgcagatgagcaggatgaagtccgacctcagagttacccagcaggaaaaggaagctctcaagcaggaggtgatgtcactgcacaagcaactgcaaaatgccggaggcaagtcttgggcacccgaaatagcaacccaccccagcggcctgcataatcaacagaaacggctgtcctgggataagcttgatcacctgatgaatgaggagcagcagctattgtggcaggagaatgaaaggctccaaaccatggtgcagaatactaaggctgaactgacacattcaagagaaaaggttcgccagctggaatctaacttgctgcccaaacatcagaagcacttgaacccatctggaactatgaatcccacagagcaggagaagttgagccttaagagggagtgtgaccaatttcagaaggagcagagtccagccaacagaaaggtcagtcagatgaattcactggaacaggaattggaaaccatacatctggagaatgaggggctgaagaagaagcaggtgaagctcgatgaacagctgatggaaaattctgttgtgggatcgagcagggaagggtgcagctctttgccagagattgtatgcgaggacgccgcaccagaagtgcattgtgatgccta

SEQ ID NO: 293327 - DNA, 6525 bp, Artificial Sequence
  derived and/or modified sequence
ccgagccgggagccgagcgcgctgggcgcggccgtcccgctgccgccgccaagcccggagtgcgccagcggccatggttcccgcggcggcgccgggcgcctgagccccgggacgcaagcgctggaggcgggctgccggctgtgcgggcgctccggagagaccgacagaaggtgagcactgtgggctatgggatggatgaggtggagcaggaccagcatgaggcccgactcaaggagctgtttgacagttttgacacgacgggcacagggtccctggggcaggaggaactcaccgacctttgccacatgttgagcttggaggaggtggccccagtgctgcagcagacattacttcaggacaacctcttgggcagggtacattttgaccaatttaaagaagcattaatactcatcttgtccagaactctgtcaaatgaagaacactttcaagaaccagactgctcactagaagctcagcccaaatatgttagaggtgggaagcgttacggacgaaggtccttgcccgagttccaagagtccgtggaggagtttcctgaagtgacggtgattgagccactggatgaagaagcgcggccttcacacatcccagccggtgactgcagtgagcactggaagacgcaacgcagtgaggagtatgaagcggaaggccagttaaggttttggaacccagatgacttgaatgcttcacagagtggatcttcccctccccaagactggatagaagagaaactgcaagaagtttgtgaagatttggggatcacccgtgatggtcacctgaaccggaagaagctggtctccatctgtgagcagtatggtttacagaatgtggatggagagatgctcgaggaagtattccataatcttgatcctgacggtacaatgagtgtagaagattttttctatggtttgtttaaaaatggaaaatctcttacaccatcagcatctactccatatagacaactaaaaaggcacctttccatgcagtctttcgatgagagtggacgacgtaccacaacctcatcagcaatgacaagtaccattggctttcgggtcttctcctgcctggatgatgggatgggccatgcatctgtggagagaatactggacacctggcaggaagagggcattgagaacagccaggagatcctgaaggccttggatttcagcctcgatggaaacatcaatttgacagaattaacactggcccttgaaaatgaacttttggttaccaagaacagcattcaccaggcggctctggccagctttaaggctgaaatccggcatttgttggaacgagttgatcaggtggtcagagaaaaagagaagctacggtcagatctggacaaggccgagaagctcaagtctttaatggcctcggaggtggatgatcaccatgcggccatagagcggcggaatgagtacaacctcaggaaactggatgaagagtacaaggagcgaatagcagccttaaaaaatgaactccgaaaagagagagagcagatcctgcagcaggcaggcaagcagcgtttagaacttgaacaggaaattgaaaaggcaaaaacagaagagaactatatccgggaccgccttgccctctctttaaaggaaaacagtcgtctggaaaatgagcttctagaaaatgcagagaagttggcagaatatgagaatctgacaaacaaacttcagagaaatttggaaaatgtgttagcagaaaagtttggtgacctcgatcctagcagtgctgagttcttcctgcaagaagagagactgacacagatgagaaatgaatatgagcggcagtgcagggtactacaagaccaagtagatgaactccagtctgagctggaagaatatcgtgcacaaggcagagtgctcaggcttccgttgaagaactcaccgtcagaagaagttgaggctaacagcggtggcattgagcccgaacacgggctcggttctgaagaatgcaatccattgaatatgagcattgaggcagagctggtcattgaacagatgaaagaacaacatcacagggacatatgttgcctcagactggagctcgaagataaagtgcgccattatgaaaagcagctggacgaaaccgtggtcagctgcaagaaggcacaggagaacatgaagcaaaggcatgagaacgaaacgcacaccttagaaaaacaaataagtgaccttaaaaatgaaattgctgaacttcaggggcaagcagcagtgctcaaggaggcacatcatgaggccacttgcaggcatgaggaggagaaaaaacaactgcaagtgaagcttgaggaggaaaagactcacctgcaggagaagctgaggctgcaacatgagatggagctcaaggctagactgacacaggctcaagcaagctttgagcgggagagggaaggccttcagagtagcgcctggacagaagagaaggtgagaggcttgactcaggaactagagcagtttcaccaggagcagctgacaagcctggtggagaaacacactcttgagaaagaggagttaagaaaagagctcttggaaaagcaccaaagggagcttcaggagggaagggaaaaaatggaaacagagtgtaatagaagaacctctcaaatagaagcccagtttcagtctgattgtcagaaagtcactgagaggtgtgaaagcgctctgcaaagcctggaggggcgctaccgccaagagctgaaggacctccaggaacagcagcgtgaggagaaatcccagtgggaatttgagaaggacgagctcacccaggagtgtgcggaagcccaggagctgctgaaagagactcttaagagagagaaaacaacttctctggtcctgacccaggagagagagatgctggagaaaacatacaaagaacatttgaacagcatggtcgtcgagagacagcagctactccaagacctggaagacctaagaaatgtatctgaaacccagcaaagcctgctgtctgaccagatacttgagctgaagagcagtcacaaaagggaactgagggagcgtgaggaggtcctgtgccaggcaggggcttcggagcagctggccagccagcggctggaaagactagaaatggaacatgaccaggaaaggcaggaaatgatgtccaagcttctagccatggagaacattcacaaagcgacctgtgagacagcagatcgagaaagagccgagatgagcacagaaatctccagacttcagagtaaaataaaggaaatgcagcaggcaacatctcctctctcaatgcttcagagtggttgccaggtgataggagaggaggaggtggaaggagatggagccctgtccctgcttcagcaaggggagcagctgttggaagaaaatggggacgtcctcttaagcctgcagagagctcatgaacaggcagtgaaggaaaatgtgaaaatggctactgaaatttctagattgcaacagaggctacaaaagttagagccagggttagtaatgtcttcttgtttggatgagccagctactgagttttttggaaatactgcggaacaaacagagcagtttttacagcaaaaccgaacgaagcaagtagaaggtgtgaccaggcggcatgtcctaagtgacctggaagatgatgaggtccgggacctgggaagtacagggacgagctctgttcagagacaggaagtcaaaatagaggagtctgaagcttcagtagagggtttttctgagcttgaaaacagtgaagagaccaggactgaatcctgggagctgaagaatcagattagtcagcttcaggaacagctaatgatgttatgtgcggactgtgatcgagcttctgaaaagaaacaggacctactttttgatgtttctgtgctaaaaaagaaactgaagatgcttgagagaatccctgaggcttctcccaaatataagctgttgtatgaagatgtgagccgagaaaatgactgccttcaggaagagctgagaatgatggagacacgctacgatgaggcactagaaaataacaaagaactcactgcagaggttttcaggttgcaggatgagctgaagaaaatggaggaagtcactgaaacattcctcagcctggaaaagagttacgatgaggtcaaaatagaaaatgaggggctgaatgttctggttttgagacttcaaggcaagattgagaagcttcaggaaagcgtggtccagcggtgtgactgctgcttatgggaagccagtttagagaacctggaaatcgaacctgatggaaatatactccagctcaatcagacactggaagagtgtgtgcccagggttaggagtgtacatcatgtcatagaggaatgtaagcaagaaaaccagtaccttgaggggaacacacagctcttggaaaaagtaaaagcacatgaaattgcctggttacatggaacaattcagacacatcaagaaaggccaagagtacagaatcaagttatactggaggaaaacactactctcctaggctttcaagacaaacattttcagcatcaggccaccatagcagagttagaactggagaaaacaaagttacaggagctgactaggaagttgaaggagagagtcactattttagttaagcaaaaagatgtactttctcacggagaaaaggaggaagagctgaaggcaatgatgcatgacttgcagatcacgtgcagtgagatgcagcaaaaagttgaacttctgagatatgaatctgaaaagcttcaacaggaaaattctattttgagaaatgaaattactactttaaatgaagaagatagcatttctaacctgaaattagggacattaaatggatctcaggaagaaatgtggcaaaaaacggaaactgtaaaacaagaaaatgctgcagttcagaagatggttgaaaatttaaagaaacagatttcagaattaaaaatcaaaaaccaacaattggatttggaaaatacagaacttagccaaaagaactctcaaaaccaggaaaaactgcaagaacttaatcaacgtctaacagaaatgctatgccagaaggaaaaagagccaggaaacagtgcattggaggaacgggaacaagagaagtttaatctgaaagaagaactggaacgttgtaaagtgcagtcctccactttagtgtcttctctggaggcggagctctctgaagttaaaatacagacccatattgtgcaacaggaaaaccaccttctcaaagatgaactggagaaaatgaaacagctgcacagatgtcccgatctctctgacttccagcaaaaaatctctagtgttctaagctacaacgaaaaactgctgaaagaaaaggaagctctgagtgaggaattaaatagctgtgtcgataagttggcaaaatcaagtcttttagagcatagaattgcgacgatgaagcaggaacagaaatcctgggaacatcagagtgcgagcttaaagtcacagctggtggcttctcaggaaaaggttcagaatttagaagacaccgtgcagaatgtaaacctgcaaatgtcccggatgaaatctgacctacgagtgactcagcaggaaaaggaggctttaaaacaagaagtgatgtctttacataagcaacttcagaatgctggtggcaagagctgggccccagagatagctactcatccatcagggctccataaccagcagaaaaggctgtcctgggacaagttggatcatctgatgaatgaggaacagcagctgctttggcaagagaatgagaggctccagaccatggtacagaacaccaaagccgaactcacgcactcccgggagaaggtccgtcagttggaatccaatcttcttcccaagcaccaaaaacatctaaacccatcaggtaccatgaatcccacagagcaagaaaaattgagcttaaagagagagtgtgatcagtttcagaaagaacaatctcctgctaacaggaaggtcagtcagatgaattcccttgaacaagaattagaaacaattcatttggaaaatgaaggcctgaaaaagaaacaagtaaaactggatgagcagctcatggagaactcagtggttggaagtagcagagaagggtgcagttctctgcctgagatagtgtgtgaagatgcagcacctgaggtccactgcgacgcctagcccgtcccctcatgcttgggatttgcagctgctccagcagcaagcctgtccgatggtgcccagggagcagtttctgcagcttcaacgccagctgctgcaggcagaaaggataaaccagcacctgcaggaggaacttgaaaacaggacctccgaaaccaacacaccacagggaaaccaggaacaactggtaactgtcatggaggaacgaatgatagaagttgaacagaaactgaaactagtgaaaaggcttcttcaagagaaagtgaatcagctcaaagaacaagtgagcctacccggtcatctctgttcacccacctcacattccagctttaactccagttttacatccctttattgccattaa

SEQ ID NO: 293328 - DNA, 5970 bp, Artificial Sequence
  derived and/or modified sequence
atggacgaggtggagcaggaccagcacgaggccagactgaaggagctgttcgacagcttcgacaccaccggcaccggcagcctgggccaggaggagctgaccgacctgtgccacatgctgagcctggaggaggtggcccccgtgctgcagcagaccctgctgcaggacaacctgctgggcagagtgcacttcgaccagttcaaggaggccctgatcctgatcctgagcagaaccctgagcaacgaggagcacttccaggagcccgactgcagcctggaggcccagcccaagtacgtgagaggcggcaagagatacggcagaagaagcctgcccgagttccaggagagcgtggaggagttccccgaggtgaccgtgatcgagcccctggacgaggaggccagacccagccacatccccgccggcgactgcagcgagcactggaagacccagagaagcgaggagtacgaggccgagggccagctgagattctggaaccccgacgacctgaacgccagccagagcggcagcagccccccccaggactggatcgaggagaagctgcaggaggtgtgcgaggacctgggcatcaccagagacggccacctgaacagaaagaagctggtgagcatctgcgagcagtacggcctgcagaacgtggacggcgagatgctggaggaggtgttccacaacctggaccccgacggcaccatgagcgtggaggacttcttctacggcctgttcaagaacggcaagagcctgacccccagcgccagcaccccctacagacagctgaagagacacctgagcatgcagagcttcgacgagagcggcagaagaaccaccaccagcagcgccatgaccagcaccatcggcttcagagtgttcagctgcctggacgacggcatgggccacgccagcgtggagagaatcctggacacctggcaggaggagggcatcgagaacagccaggagatcctgaaggccctggacttcagcctggacggcaacatcaacctgaccgagctgaccctggccctggagaacgagctgctggtgaccaagaacagcatccaccaggccgccctggccagcttcaaggccgagatcagacacctgctggagagagtggaccaggtggtgagagagaaggagaagctgagaagcgacctggacaaggccgagaagctgaagagcctgatggccagcgaggtggacgaccaccacgccgccatcgagagaagaaacgagtacaacctgagaaagctggacgaggagtacaaggagagaatcgccgccctgaagaacgagctgagaaaggagagagagcagatcctgcagcaggccggcaagcagagactggagctggagcaggagatcgagaaggccaagaccgaggagaactacatcagagacagactggccctgagcctgaaggagaacagcagactggagaacgagctgctggagaacgccgagaagctggccgagtacgagaacctgaccaacaagctgcagagaaacctggagaacgtgctggccgagaagttcggcgacctggaccccagcagcgccgagttcttcctgcaggaggagagactgacccagatgagaaacgagtacgagagacagtgcagagtgctgcaggaccaggtggacgagctgcagagcgagctggaggagtacagagcccagggcagagtgctgagactgcccctgaagaacagccccagcgaggaggtggaggccaacagcggcggcatcgagcccgagcacggcctgggcagcgaggagtgcaaccccctgaacatgagcatcgaggccgagctggtgatcgagcagatgaaggagcagcaccacagagacatctgctgcctgagactggagctggaggacaaggtgagacactacgagaagcagctggacgagaccgtggtgagctgcaagaaggcccaggagaacatgaagcagagacacgagaacgagacccacaccctggagaagcagatcagcgacctgaagaacgagatcgccgagctgcagggccaggccgccgtgctgaaggaggcccaccacgaggccacctgcagacacgaggaggagaagaagcagctgcaggtgaagctggaggaggagaagacccacctgcaggagaagctgagactgcagcacgagatggagctgaaggccagactgacccaggcccaggccagcttcgagagagagagagagggcctgcagagcagcgcctggaccgaggagaaggtgagaggcctgacccaggagctggagcagttccaccaggagcagctgaccagcctggtggagaagcacaccctggagaaggaggagctgagaaaggagctgctggagaagcaccagagagagctgcaggagggcagagagaagatggagaccgagtgcaacagaagaaccagccagatcgaggcccagttccagagcgactgccagaaggtgaccgagagatgcgagagcgccctgcagagcctggagggcagatacagacaggagctgaaggacctgcaggagcagcagagagaggagaagagccagtgggagttcgagaaggacgagctgacccaggagtgcgccgaggcccaggagctgctgaaggagaccctgaagagagagaagaccaccagcctggtgctgacccaggagagagagatgctggagaagacctacaaggagcacctgaacagcatggtggtggagagacagcagctgctgcaggacctggaggacctgagaaacgtgagcgagacccagcagagcctgctgagcgaccagatcctggagctgaagagcagccacaagagagagctgagagagagagaggaggtgctgtgccaggccggcgccagcgagcagctggccagccagagactggagagactggagatggagcacgaccaggagagacaggagatgatgagcaagctgctggccatggagaacatccacaaggccacctgcgagaccgccgacagagagagagccgagatgagcaccgagatcagcagactgcagagcaagatcaaggagatgcagcaggccaccagccccctgagcatgctgcagagcggctgccaggtgatcggcgaggaggaggtggagggcgacggcgccctgagcctgctgcagcagggcgagcagctgctggaggagaacggcgacgtgctgctgagcctgcagagagcccacgagcaggccgtgaaggagaacgtgaagatggccaccgagatcagcagactgcagcagagactgcagaagctggagcccggcctggtgatgagcagctgcctggacgagcccgccaccgagttcttcggcaacaccgccgagcagaccgagcagttcctgcagcagaacagaaccaagcaggtggagggcgtgaccagaagacacgtgctgagcgacctggaggacgacgaggtgagagacctgggcagcaccggcaccagcagcgtgcagagacaggaggtgaagatcgaggagagcgaggccagcgtggagggcttcagcgagctggagaacagcgaggagaccagaaccgagagctgggagctgaagaaccagatcagccagctgcaggagcagctgatgatgctgtgcgccgactgcgacagagccagcgagaagaagcaggacctgctgttcgacgtgagcgtgctgaagaagaagctgaagatgctggagagaatccccgaggccagccccaagtacaagctgctgtacgaggacgtgagcagagagaacgactgcctgcaggaggagctgagaatgatggagaccagatacgacgaggccctggagaacaacaaggagctgaccgccgaggtgttcagactgcaggacgagctgaagaagatggaggaggtgaccgagaccttcctgagcctggagaagagctacgacgaggtgaagatcgagaacgagggcctgaacgtgctggtgctgagactgcagggcaagatcgagaagctgcaggagagcgtggtgcagagatgcgactgctgcctgtgggaggccagcctggagaacctggagatcgagcccgacggcaacatcctgcagctgaaccagaccctggaggagtgcgtgcccagagtgagaagcgtgcaccacgtgatcgaggagtgcaagcaggagaaccagtacctggagggcaacacccagctgctggagaaggtgaaggcccacgagatcgcctggctgcacggcaccatccagacccaccaggagagacccagagtgcagaaccaggtgatcctggaggagaacaccaccctgctgggcttccaggacaagcacttccagcaccaggccaccatcgccgagctggagctggagaagaccaagctgcaggagctgaccagaaagctgaaggagagagtgaccatcctggtgaagcagaaggacgtgctgagccacggcgagaaggaggaggagctgaaggccatgatgcacgacctgcagatcacctgcagcgagatgcagcagaaggtggagctgctgagatacgagagcgagaagctgcagcaggagaacagcatcctgagaaacgagatcaccaccctgaacgaggaggacagcatcagcaacctgaagctgggcaccctgaacggcagccaggaggagatgtggcagaagaccgagaccgtgaagcaggagaacgccgccgtgcagaagatggtggagaacctgaagaagcagatcagcgagctgaagatcaagaaccagcagctggacctggagaacaccgagctgagccagaagaacagccagaaccaggagaagctgcaggagctgaaccagagactgaccgagatgctgtgccagaaggagaaggagcccggcaacagcgccctggaggagagagagcaggagaagttcaacctgaaggaggagctggagagatgcaaggtgcagagcagcaccctggtgagcagcctggaggccgagctgagcgaggtgaagatccagacccacatcgtgcagcaggagaaccacctgctgaaggacgagctggagaagatgaagcagctgcacagatgccccgacctgagcgacttccagcagaagatcagcagcgtgctgagctacaacgagaagctgctgaaggagaaggaggccctgagcgaggagctgaacagctgcgtggacaagctggccaagagcagcctgctggagcacagaatcgccaccatgaagcaggagcagaagagctgggagcaccagagcgccagcctgaagagccagctggtggccagccaggagaaggtgcagaacctggaggacaccgtgcagaacgtgaacctgcagatgagcagaatgaagagcgacctgagagtgacccagcaggagaaggaggccctgaagcaggaggtgatgagcctgcacaagcagctgcagaacgccggcggcaagagctgggcccccgagatcgccacccaccccagcggcctgcacaaccagcagaagagactgagctgggacaagctggaccacctgatgaacgaggagcagcagctgctgtggcaggagaacgagagactgcagaccatggtgcagaacaccaaggccgagctgacccacagcagagagaaggtgagacagctggagagcaacctgctgcccaagcaccagaagcacctgaaccccagcggcaccatgaaccccaccgagcaggagaagctgagcctgaagagagagtgcgaccagttccagaaggagcagagccccgccaacagaaaggtgagccagatgaacagcctggagcaggagctggagaccatccacctggagaacgagggcctgaagaagaagcaggtgaagctggacgagcagctgatggagaacagcgtggtgggcagcagcagagagggctgcagcagcctgcccgagatcgtgtgcgaggacgccgcccccgaggtgcactgcgacgcctag

SEQ ID NO: 293329 - DNA, 1110 bp, Artificial Sequence
  derived and/or modified sequence
atggtgatcagcgagagactgagactgaccagcatgcccagacccagcctgaccagaaccagcctgagcgccagaaagatgatgctgctgctgtacgaggagggcctgagagtggtgatccacaccagcaacctgatccacgccgactggcaccagaagacccagggcatctggctgagccccctgtaccccagaatcgccgacggcacccacaagagcggcgagagccccacccacttcaaggccgacctgatcagctacctgatggcctacaacgcccccagcctgaaggagtggatcgacgtgatccacaagcacgacctgagcgagaccaacgtgtacctgatcggcagcacccccggcagattccagggcagccagaaggacaactggggccacttcagactgaagaagctgctgaaggaccacgccagcagcatgcccaacgccgagagctggcccgtggtgggccagttcagcagcgtgggcagcctgggcgccgacgagagcaagtggctgtgcagcgagttcaaggagagcatgctgaccctgggcaaggagagcaagacccccggcaagagcagcgtgcccctgtacctgatctaccccagcgtggagaacgtgagaaccagcctggagggctaccccgccggcggcagcctgccctacagcatccagaccgccgagaagcagaactggctgcacagctacttccacaagtggagcgccgagaccagcggcagaagcaacgccatgccccacatcaagacctacatgagacccagccccgacttcagcaagatcgcctggttcctggtgaccagcgccaacctgagcaaggccgcctggggcgccctggagaagaacggcacccagctgatgatcagaagctacgagctgggcgtgctgttcctgcccagcgccttcggcctggacagcttcaaggtgaagcagaagttcttcgccggcagccaggagcccatggccaccttccccgtgccctacgacctgccccccgagctgtacggcagcaaggacagaccctggatctggaacatcccctacgtgaaggcccccgacacccacggcaacatgtgggtgcccagctag

SEQ ID NO: 293330 - DNA, 1110 bp, Artificial Sequence
  derived and/or modified sequence
atggtgatcagcgagagactgcgcttgactagtatgccgcggccttctctgacaagaactagcctcagcgccagaaagatgatgctcctcctttacgaggaaggtctcagggtggtcattcacacttctaacctgattcacgccgactggcaccagaagacccagggcatctggttgagcccactctaccccagaatcgcagacgggacccacaagagtggtgaatcaccaacacacttcaaggcggatctgatttcctatctgatggcctacaacgccccttctctgaaagagtggattgacgtgatacataagcatgacctgtctgagacaaacgtgtacctgatcgggtccacacctgggcggtttcagggtagccagaaggataactggggtcacttccgcctgaaaaaactgctgaaggatcacgccagcagcatgcccaacgctgaatcttggcccgttgtcggtcagttcagctctgtcggcagtctaggggcagacgaaagcaagtggctgtgctctgagttcaaagaatcaatgttaaccctggggaaagagagtaaaacacccgggaaaagcagcgtcccattgtatctgatatatcccagcgtggaaaacgtccggacttctctggaggggtatccagctggggggagccttccatacagtattcagactgccgaaaagcagaattggctgcacagttatttccataagtggtcggccgaaaccagtggaaggtccaacgctatgcctcacatcaaaacctacatgcggcccagcccagacttctctaagatcgcctggtttttggttacttcagcgaacctttctaaggccgcctggggcgccctcgagaagaacgggacacagctgatgatcagaagctacgagctgggggtcctctttttacccagtgcattcggtctcgacagtttcaaggtcaaacagaaatttttcgcaggcagccaggagccgatggctacctttccagtgccttacgatctccctccagaattatatgggagtaaagaccggccgtggatctggaacatcccctatgtcaaagctcctgatacgcacggtaacatgtgggtgcccagctag

SEQ ID NO: 293331 - DNA, 1110 bp, Artificial Sequence
  derived and/or modified sequence
atggtgatcagcgagcggctgcggctgacctccatgccccggcccagcctgaccaggaccagcctgagcgccaggaagatgatgctgctgctgtatgaggagggcctgcgggtggtgatccacaccagcaacctgattcatgctgactggcaccagaagacccagggcatctggctgagccccctgtaccccagaattgctgatggcacccacaagtctggagagagccccacccacttcaaggctgacctgatctcctacctgatggcctacaatgcccccagcctgaaggagtggattgatgtgatccacaagcatgacctgtctgagaccaacgtgtacctgattggcagcaccccaggccgcttccagggcagccagaaggacaactggggccacttccggctgaagaagctgctgaaggaccacgccagctccatgcccaatgctgagagctggcctgtggtgggccagttcagctctgtgggcagcctgggcgcagatgagagcaagtggctgtgcagcgagttcaaggagagcatgctgaccctgggcaaggagagcaagaccccaggcaagagctctgtgcccctgtacctgatctaccccagcgtggagaatgtgaggaccagcctggagggctacccagctgggggcagcctgccctacagcatccagacagctgagaagcagaactggctgcacagctacttccacaagtggagcgctgagaccagcggccgcagcaatgccatgccccacatcaagacctacatgaggcccagcccagacttcagcaagatcgcctggttcctggtgaccagcgccaacctgagcaaggccgcctggggcgccctggagaagaatggcacccagctgatgatccgctcctatgagctgggcgtgctcttcctgcccagcgccttcggcctggacagcttcaaggtgaagcagaagttctttgctggcagccaggagcccatggccaccttccctgtgccctatgacctgcccccagagctgtatggcagcaaggaccggccctggatctggaacatcccctacgtgaaggccccagacacccacggcaacatgtgggtgcccagctag

SEQ ID NO: 293332 - DNA, 1110 bp, Artificial Sequence
  derived and/or modified sequence
atggtgatcagcgagcggctgcggctgaccagcatgccccggcccagtcttaccaggacaagtttatccgctcgcaaaatgatgctgttactctacgaagagggcctgcgcgtggttatacacaccagcaatttgattcatgctgactggcaccagaagacccagggtatctggctctctcccttatatcctagaattgccgacggtacccataagtcgggtgaatcccctacgcatttcaaggccgacctgatctcctaccttatggcatataacgcgccttccctgaaagagtggatcgatgtgattcataagcatgacctgtctgagactaacgtatacctcattggttcaacacccggaaggttccaggggagtcagaaagataattggggacatttccggttaaaaaaattactcaaggaccatgccagctctatgcctaatgctgaatcctggccggtggtcggccagttcagttctgttgggagcttaggggccgatgagagcaagtggctttgttccgaatttaaagaaagcatgcttacactcggaaaagagagcaagactcctgggaaatcctctgttcctttatacttgatttatccctccgtggaaaatgtgagaacttcattggaaggttaccctgctggaggatcattaccctattccatccagactgcagagaaacaaaactggctgcatagttactttcataagtggtctgcagagactagtggacgctcaaatgcgatgcctcacattaagacatacatgagaccgagtcccgatttcagcaaaattgcttggtttctggtgacctctgcaaacctgtcaaaagctgcatggggcgccctggaaaagaatggcacacagctgatgattcgcagctacgagctgggagtcctttttctgcctagcgcgttcggtcttgattcattcaaagtcaagcaaaagttcttcgctggcagccaagagcccatggcaaccttccccgtcccctacgacctgcctcccgagctttacgggagcaaggataggccctggatttggaatatcccctacgtgaaggctcctgacactcatggtaatatgtgggtgccatcctag

SEQ ID NO: 293333 - DNA, 1110 bp, Artificial Sequence
  derived and/or modified sequence
atggtgatctctgagcggcttcggctaactagtatgccacgcccatcattaactcgcacttctctctcagcgagaaaaatgatgcttctcctgtacgaagagggccttcgcgtggtgatccatacttcaaacctgatacacgccgactggcatcagaaaacgcaaggcatttggctgtcgcccttgtaccccaggattgcagatggcacccacaagtcaggggagtcccctacccattttaaagcagacttgattagttatctgatggcctacaacgcgccatcccttaaggagtggattgacgtgattcacaagcacgatctgtccgagacgaatgtgtatcttattgggtctacaccgggtaggttccagggaagccaaaaagataattgggggcacttccgcttgaagaagctcctgaaagaccacgcctcttccatgcctaatgctgaatcttggcccgtcgtcggacagtttagttccgtcggatcactcggtgcggacgagtccaaatggttatgctcagagtttaaagaatctatgctcacgctgggcaaggagtccaaaacccctggcaaatcgtctgtgcctctgtacttgatttatcccagcgtggagaacgtgagaacctccctggaagggtaccctgcgggtggtagcctcccctattccatccaaacagccgaaaaacagaactggctgcattcgtatttccataagtggagcgcagagaccagcgggaggtctaatgctatgccacatatcaagacctatatgaggccaagtcccgatttttccaagatcgcctggttcttagttacgtccgcaaatttatctaaagccgcttggggggctctggagaagaacggcactcagttgatgatccgaagctatgaacttggggttctgtttcttcccagcgcattcggactcgatagtttcaaagtgaagcagaagttcttcgccggttcgcaagaaccaatggccaccttcccagttccctacgacttgcctccagagctttatgggtccaaggaccggccatggatatggaacatcccatatgtaaaagccccagacactcatggtaatatgtgggtcccttcatag

SEQ ID NO: 293334 - DNA, 2488 bp, Artificial Sequence
  derived and/or modified sequence
ccattctccgcagagttggagcacacagctgtattaaaaaggcaaatcgaaggccgggcgcggtgactcacgcctgtcatcctagcactttgggaggccgaggcggctgaatcacttgaggttaggagtttgagatcagcccgggcaacatggtgaaaccccgtctctacaaaaatagaaaaattagccgagcgtgatggtggatgcctgtaatcctagctcctcgggaggctaaggagtataatgtctcaggaaggcgattatgggaggtggaccatatctagtagtgatgaaagtgaggaagaaaagccaaaaccagacaagccatctacctcttctcttctctgtgccaggcaaggagcagcaaatgagcccaggtacacctgttccgaggcccagaaagctgcacacaagaggaaaatatcacctgtgaaattcagcaatacagattcagttttacctcccaaaaggcagaaaagcggttcccaggaggacctcggctggtgtctgtccagcagtgatgatgagctgcaaccagaaatgccgcagaagcaggctgagaaagtggtgatcaaaaaggagaaagacatctctgctcccaatgacggcactgcccaaagaactgaaaatcatggcgctcccgcctgccacaggctcaaagaggaggaagacgagtatgagacatcaggggagggccaggacatttgggacatgctggataaagggaaccccttccagttttacctcactagagtctctggagttaagccaaagtataactctggagccctccacatcaaggatattttatctcctttatttgggacgcttgtttcttcagctcagtttaactactgctttgacgtggactggctcgtaaaacagtatccaccagagttcaggaagaagccaatcctgcttgtgcatggtgataagcgagaggctaaggctcacctccatgcccaggccaagccttacgagaacatctctctctgccaggcaaagttggatattgcgtttggaacacaccacacgaaaatgatgctgctgctctatgaagaaggcctccgggttgtcatacacacctccaacctcatccatgctgactggcaccagaaaactcaaggaactcacctgtgagtgaatctctgatccaggaggagcctcactcagcctgggaactttgaggtgctattgcaaggggaggtcctccacgtctgtccagcccaacctggtcattttacacacggaggcaaaggcccagagagatcacagagcttacccaaaatgaatatggttgagccccttatacccacgaattgctgatggaacccacaaatctggagagtcgccaacacattttaaagctgatctcatcagttacttgatggcttataatgccccttctctcaaggagtggatagatgtcattcacaagcacgatctctctgaaacaaatgtttatcttattggttcaaccccaggacgctttcaaggaagtcaaaaagataattggggacattttagacttaagaagctttgcataattatcaaagcaggaaatgcagatcagtcttctgcagtgttttagctgcttctgaaagaccatgcctcatccatgcctaacgcagagtcctggcctgtcgtaggtcagttttcaagcgttggctccttgggagccgatgaatcaaagtggttatgttctgagtttaaagagagcatgctgacactggggaaggaaagcaagactccaggaaaaagctctgttcctctttacttgatctatccttctgtggaaaatgtgcggaccagtttagaaggatatcctgctgggggctctcttccctatagcatccagacagctgaaaaacagaattggctgcattcctattttcacaaatggtcagctgagacttctggccgcagcaatgccatgccacatattaagacatatatgaggccttctccagacttcagtaaaattgcttggttccttgtcacaagcgcaaatctgtccaaggctgcctggggagcattggagaagaatggcacccagctgatgatccgctcctacgagctcggggtccttttcctcccttcagcatttggtctagacagtttcaaagtgaaacagaagttcttcgctggcagccaggagccaatggccacctttcctgtgccatatgatttgcctccagaactgtatggaagtaaagatcggccatggatatggaacattccttatgtcaaagcaccggatacgcatgggaacatgtgggtgccctcctgagaatcttgaggcactgtgaaatttaagtgtaagacattgagccacaaacatggaatctcttctttgtactggatgtccacttcccttaaagtcttatttgcacccttacaaaatctttccaaaggtcactcttatgaatggatgttggttatacttttaatggacattaacattcctaataaagtattagtttcttaa

SEQ ID NO: 293335 - DNA, 1377 bp, Artificial Sequence
  derived and/or modified sequence
atggacggcagcagaagagtgagagccaccagcgtgctgcccagatacggccccccctgcctgttcaagggccacctgagcaccaagagcaacgccttctgcaccgacagcagcagcctgagactgagcaccctgcagctggtgaagaaccacatggccgtgcactacaacaagatcctgagcgccaaggccgccgtggactgcagcgtgcccgtgagcgtgagcaccagcatcaagtacgccgaccagcagagaagagagaagctgaagaaggagctggcccagtgcgagaaggagttcaagctgaccaagaccgccatgagagccaactacaagaacaacagcaagagcctgttcaacaccctgcagaagcccagcggcgagccccagatcgaggacgacatgctgaaggaggagatgaacggcttcagcagcttcgccagaagcctggtgcccagcagcgagagactgcacctgagcctgcacaagagcagcaaggtgatcaccaacggccccgagaagaacagcagcagcagccccagcagcgtggactacgccgccagcggccccagaaagctgagcagcggcgccctgtacggcagaagacccagaagcaccttccccaacagccacagattccagctggtgatcagcaaggcccccagcggcgacctgctggacaagcacagcgagctgttcagcaacaagcagctgcccttcacccccagaaccctgaagaccgaggccaagagcttcctgagccagtacagatactacacccccgccaagagaaagaaggacttcaccgaccagagaatcgaggccgagacccagaccgagctgagcttcaagagcgagctgggcaccgccgagaccaagaacatgaccgacagcgagatgaacatcaagcaggccagcaactgcgtgacctacgacgccaaggagaagatcgcccccctgcccctggagggccacgacagcacctgggacgagatcaaggacgacgccctgcagcacagcagccccagagccatgtgccagtacagcctgaagccccccagcaccagaaagatctacagcgacgaggaggagctgctgtacctgagcttcatcgaggacgtgaccgacgagatcctgaagctgggcctgttcagcaacagattcctggagagactgttcgagagacacatcaagcagaacaagcacctggaggaggagaagatgagacacctgctgcacgtgctgaaggtggacctgggctgcaccagcgaggagaacagcttcagcagcgtgaagggcgacaacaaccacgacatggagctgagcaccctgaagatcatggagatgagcatcgaggactgccccctggacgtgtag

SEQ ID NO: 293336 - DNA, 1377 bp, Artificial Sequence
  derived and/or modified sequence
atggatggcagtagacgggtgcgggcaacctctgtcctcccacggtacggaccaccatgtctgttcaaggggcacttgtcgacgaaaagtaacgccttttgcacagatagttcttctctgcgattgtcaaccctgcagctagtgaagaatcatatggctgtgcactacaacaagatcctgagcgccaaagcagccgtggactgttcagtgcccgtttctgtgagcacgagcattaaatatgcagatcaacaacggcgcgagaaactgaaaaaggaactggcccagtgcgagaaggagttcaaattgaccaagactgccatgcgggccaattataaaaacaatagcaaatccctgtttaatacgttacagaaacctagcggcgaaccccagattgaagacgatatgctgaaagaagagatgaacggtttctccagttttgcacgaagcctcgtccctagcagcgagcgactgcaccttagcctccacaagtcatctaaggtcatcactaacggccctgagaagaacagctcgtcctctccgagttctgtcgactatgctgcgtcgggtcccaggaaactgagcagcggagccctctatggcaggcgtcccagatctaccttccccaactctcacagattccagttagtgattagtaaggccccatccggcgacctgttggataagcattctgaactgtttagcaataagcagctgccctttacaccacgaacattaaagactgaagccaaatctttcctgagtcagtacaggtactatacccccgccaagcgcaaaaaggacttcacagaccaaaggattgaggcagagacccagaccgaattgtcattcaagtctgagttgggcacagctgagaccaagaatatgaccgacagtgagatgaacattaagcaggcatctaattgcgtgacctatgacgccaaagaaaagatcgcccccttaccactggaggggcatgactctacctgggacgagatcaaagatgacgccctccagcactcttctccgcgagccatgtgccagtactctctaaagccgcccagcacccgcaagatctacagcgacgaggaggagctcttgtatctgtccttcatagaggacgtgacggacgagattttaaaattgggacttttttctaatcgtttcttagagcgcctttttgaaagacatataaagcagaacaagcacctcgaagaggagaaaatgcgccacctgctgcatgttctcaaggtggatttagggtgcaccagtgaagagaactcattttcttcagttaagggcgataacaatcatgacatggagctgtccacactgaagatcatggagatgagtatcgaggactgcccgctcgacgtctag

SEQ ID NO: 293337 - DNA, 1377 bp, Artificial Sequence
  derived and/or modified sequence
atggatggcagcagaagagtgcgggccacctctgtgctgcccaggtatggccccccctgcctcttcaagggccacctgagcaccaagagcaatgccttctgcacagacagcagcagcctgcggctgagcaccctgcagctggtgaagaaccacatggctgtgcactacaacaagatcctgagcgccaaggctgctgtggactgcagcgtgcctgtgtctgtgtccaccagcatcaagtatgctgaccagcagaggcgggagaagctgaagaaggagctggcccagtgtgagaaggagttcaagctgaccaagacagccatgagggccaactacaagaacaacagcaagagcctcttcaacaccctgcagaagcccagcggggagccccagattgaagatgacatgctgaaggaggagatgaatggcttcagcagctttgcccggagcctggtgcccagcagcgagcggctgcacctgagcctgcacaagagcagcaaggtgatcaccaacggccctgagaagaacagcagcagcagccccagctctgtggactatgctgccagcggccccaggaagctgagcagcggggccctgtatggaagaagacccaggagcaccttccccaacagccaccgcttccagctggtgatcagcaaggcccccagcggggacctgctggacaagcacagcgagctgttcagcaacaagcagctgcccttcacccccaggaccctgaagacagaggccaagagcttcctgagccagtaccgctactacaccccagccaagaggaagaaggacttcacagaccagagaattgaagctgagacccagacagagctgtccttcaagtctgagctgggcacagctgagaccaagaacatgacagacagcgagatgaacatcaagcaggccagcaactgtgtgacctatgatgccaaggagaagatcgcccccctgcccctggagggccatgacagcacctgggatgagatcaaggatgatgccctgcagcacagcagcccccgggccatgtgccagtacagcctgaagccacccagcaccaggaagatctacagtgatgaggaggagctgctgtacctgtccttcattgaagatgtgacagatgagatcctgaagctgggcctcttcagcaaccgcttcctggagcggctgtttgagcggcacatcaagcagaacaagcacctggaggaggagaagatgaggcacctgctgcacgtgctgaaggtggacctgggctgcaccagtgaagaaaattccttcagctctgtgaagggggacaacaaccacgacatggagctgagcaccctgaagatcatggagatgagcattgaggactgccccctggatgtgtag

SEQ ID NO: 293338 - DNA, 1377 bp, Artificial Sequence
  derived and/or modified sequence
atggacggcagccggcgggtgcgggccaccagcgtgctgccccggtatgggccaccttgtttgtttaaaggccacctgtcgacaaaatctaatgccttctgtacagactctagctctttgcgtctgagcaccctgcagctcgtgaagaatcatatggccgtccattacaacaagatcctgtcggccaaggctgccgtcgattgttccgtcccagtctccgtctctacatctatcaagtatgcagaccagcagcgtcgcgagaagcttaagaaagagcttgcccaatgtgaaaaggagttcaagcttacaaaaacagcaatgcgcgccaactacaagaataattctaaatccctctttaacacgctgcagaagcctagcggcgagccccagatcgaagatgacatgttgaaagaagaaatgaacggcttcagttcatttgcccgcagtctggtgccaagtagcgagcgactgcatctttcgttacacaagagctccaaagtgattacaaatggcccagagaagaatagctctagttccccatcttcagtcgattacgccgcgtcagggccccgcaaactgagctcaggggctctctatggacgaaggcctcgcagcacctttccaaacagccatcggttccagctggtgatatctaaggcgccatcaggagacctgctcgataaacattctgagctgttcagcaacaagcagcttccatttacacccaggaccctgaaaaccgaggcgaaatcatttttgagccagtataggtactacaccccagccaaacgaaagaaggacttcaccgatcagcgcattgaggccgaaacgcaaacggagctaagcttcaagagtgaattaggaacggcggagactaaaaacatgacagacagcgagatgaacattaagcaggcatcaaactgcgttacctatgacgcgaaggagaaaattgcgcccctccccttagaaggccacgatagcacctgggatgagatcaaggatgacgcgctccaacattcctccccccgagctatgtgccagtacagcctgaagccaccatccactcggaaaatttattccgacgaggaggagctcctttacttaagtttcattgaagacgtcacggatgagatcctgaagttaggcttattttcaaacagatttctggaaagactgtttgagaggcatataaaacagaataagcacttagaggaggagaaaatgcgccacttattgcatgtgctgaaagtcgacctcgggtgtacttccgaggagaattccttctcatcagtgaaaggtgataacaatcacgatatggaactgtctactctgaagattatggagatgtcaattgaagattgccctctggatgtgtag

SEQ ID NO: 293339 - DNA, 1377 bp, Artificial Sequence
  derived and/or modified sequence
atggatgggagcaggagagtgcgggcaacaagcgttctgcccaggtatggccctccttgtctctttaaaggccacctcagcacaaaaagtaacgctttctgtacagatagcagctccctgcggttgtccacgcttcagctggttaagaaccacatggccgtccattataacaagatcctttctgctaaggccgctgtggactgtagcgtgcccgttagtgtctccacttcaatcaagtatgcagatcagcagagacgggaaaaactaaagaaagagctcgcacaatgtgagaaagagttcaagctgaccaaaactgcaatgcgcgctaactataagaataatagcaaatccctcttcaacaccctccaaaagccatcaggtgaaccccagatcgaggatgatatgctgaaggaggagatgaatggattttccagtttcgcaagaagccttgtgccaagttccgagcgcctgcatctctctctgcacaagagcagcaaagtcatcacgaatgggcctgaaaagaatagttcatcctcgcccagctcagtcgattatgctgcctctggtccacgaaagttgtcgagcggggctctctatggaaggcggcctcgcagcacctttcctaactcccatagattccagttggtaattagcaaggccccaagcggagacctgcttgataagcacagtgagctgttttccaataagcagctcccattcacacccagaactttgaaaactgaagccaaaagtttcctctcccagtataggtactacactccagctaaacggaaaaaagactttaccgaccaacgaatcgaagctgagactcagactgaattgtcgttcaagtccgagctgggaactgccgaaaccaaaaacatgacggattctgagatgaacataaaacaggcctctaattgtgtcacatacgacgctaaggagaagatcgcaccattacccctcgagggacacgactctacctgggatgagataaaagacgacgccctccagcattcaagcccgagggccatgtgtcagtattctctaaaaccgccttctacccgaaaaatctatagcgatgaagaggagttactgtatctgtcttttatcgaggatgtgaccgacgagatcttgaagctcggtctgttcagcaatagattcctggaaaggttatttgaacggcatattaagcagaacaaacacctggaggaggaaaagatgaggcacctacttcacgtcctgaaagtggatctggggtgcacaagcgaggaaaacagcttctcgagcgtgaaaggagacaataaccacgacatggaacttagtacactcaaaattatggagatgtcaattgaggactgcccgcttgacgtttag

SEQ ID NO: 293340 - DNA, 1377 bp, Artificial Sequence
  derived and/or modified sequence
atggacgggtcccggcgagtgagagccacatctgtactccctagatatggccccccttgcctcttcaaggggcatttgtccaccaaaagtaacgccttttgtactgatagctctagccttcggctcagtactctccagttagtgaagaatcacatggccgttcactataacaagattctttctgccaaagcagcagtcgactgctccgtgcccgtaagcgtatcgacaagtattaaatacgctgatcagcaacgtcgtgaaaaactgaaaaaggaacttgcacaatgcgagaaggaatttaaacttaccaaaacagctatgagagcaaattataaaaacaattccaagtccctattcaataccctgcagaagccttccggagagccccagatagaagatgatatgctcaaggaggagatgaatggattctcaagcttcgcccgaagcctcgtccctagcagtgagcgactgcacttaagtctgcacaaatcttcaaaggtcatcactaacggcccagagaaaaacagcagttccagcccctcaagtgtagactacgctgcctccggtcccaggaaactatcaagcggggcactttacggcagaagacctagaagtactttcccaaacagccatcgcttccaactcgtgatttcaaaggccccctccggggacctcctcgataagcattccgagttgttctccaataagcagctcccctttacaccgagaactttaaaaaccgaagcgaaaagctttcttagccaatatagatactacacccccgctaagcggaagaaggacttcaccgaccaaagaatcgaagctgagacccagaccgaactgagtttcaagtccgaactgggcacggcggagactaaaaatatgacagactccgagatgaatattaagcaggccagtaattgtgtaacgtacgacgctaaggagaaaatcgctcccttgccattggaaggccacgactccacgtgggacgagatcaaggatgacgctttacagcacagctcgcctagggccatgtgccaatactccctgaaacccccctcaacccggaagatttattcggatgaagaggagctattgtacctgtcattcattgaagatgtaaccgacgaaattcttaagctcgggctgttttcgaatcggtttcttgaacgactgttcgaaagacacatcaaacagaacaaacaccttgaagaagagaagatgaggcacttactgcacgttttaaaggtcgacctgggttgcacctcagaagaaaactccttcagctccgtgaagggcgataataaccatgacatggagctaagtacacttaagatcatggagatgagcatagaggactgtcccctggacgtgtag

SEQ ID NO: 293341 - DNA, 1377 bp, Artificial Sequence
  derived and/or modified sequence
atggatggcagccgccgagttcgcgccacttccgtcctgccacgatatggacccccctgcctctttaaaggtcacctcagtactaaaagtaacgcgttctgtacagattcatcctcccttagactctcaaccttacagcttgtgaaaaatcacatggcagtacactataacaagattctatctgctaaagctgcagttgactgcagtgtcccagtatccgtgtcaaccagtataaagtacgctgaccagcagagacgtgaaaagctgaagaaagagctggcacagtgtgaaaaggaatttaagctcacaaagacagcgatgcgcgctaactacaagaataactccaaatccctgttcaacaccctccaaaagccaagtggggagcctcaaattgaagatgatatgttaaaggaggaaatgaacggcttttcctcattcgcccggtccctcgtccctagctctgaacgtctccacctctctctgcacaagtctagcaaggtgattacaaatggccccgagaaaaactctagctcttctccaagtagcgtcgactatgccgctagcgggcccaggaaattgagctccggtgccctctacggtcgcagacccagatcaacattcccaaacagccataggttccaactggtgattagcaaggctccctccggtgatctgctagacaaacacagcgagctcttctcaaacaagcaattaccctttaccccacgaacattgaaaaccgaggctaagagtttcctctctcagtaccgttattacacccccgcaaagagaaagaaggacttcaccgaccagagaattgaagcagagactcaaacggagctctctttcaaatccgaactggggaccgccgagactaaaaacatgacagatagtgagatgaatatcaagcaagcatccaactgcgtgacctacgatgccaaggaaaaaatcgcccccttacccttagagggacacgattcgacctgggatgaaattaaggacgacgctctgcagcactcctccccaagggctatgtgccagtactcgcttaagcctccatctaccagaaagatttactccgatgaagaagaactcctgtacttatccttcatcgaagacgtcactgacgagatactgaaactgggcctattcagtaatcggtttttagaacgccttttcgaacgccacattaagcagaataagcacctggaagaagaaaaaatgcgacatttgctacacgtgctcaaggtggatctgggatgcaccagtgaagaaaactcattctcatccgttaagggcgataacaaccacgacatggagctttcaaccctaaagattatggaaatgagtattgaagactgccccctggacgtctag

SEQ ID NO: 293342 - DNA, 1410 bp, Artificial Sequence
  derived and/or modified sequence
atggatggcagccggagagtcagagcaacctctgtccttcccagatatggtccaccgtgcctatttaaaggacacttgagcaccaaaagtaatgctttttgcactgactcctcttctctcagactaagcactctccagctggtcaagaatcacatggctgttcactataataaaatcctttcagccaaagctgcagtagactgctcggttccagtaagcgtgagtaccagcataaagtatgcagaccaacaacgaagagagaaactcaaaaaggaattagcacaatgtgaaaaagagttcaaattaactaaaactgcaatgcgagccaattataaaaataattccaagtcactttttaataccttacaaaagccctcaggcgaaccgcaaattgaggatgacatgttaaaagaagaaatgaatggattttcatcctttgcaaggtcactagtaccctcttcagagagactacacctaagtctacataaatccagtaaagtcatcacaaatggtcctgagaagaactccagttcctccccgtccagtgtggattatgcagcctccgggccccggaaactgagctctggagccctgtatggcagaaggcccagaagcacattcccaaattcccaccggtttcagttagtcatttcgaaagcacccagtggggatcttttggataaacattctgaactcttttctaacaaacaattgccattcactcctcgcactttaaaaacagaagcaaaatctttcctgtcacagtatcgctattatacacctgccaaaagaaaaaaggattttacagatcaacggatagaagctgaaacccagactgaattaagctttaaatctgagttggggacagctgagactaaaaacatgacagattcagaaatgaacataaagcaggcatctaattgtgtgacatatgatgccaaagaaaaaatagctcctttacctttagaagggcatgactcaacatgggatgagattaaggatgatgctcttcagcattcctcaccaagggcaatgtgtcagtattccctgaagcccccttcaactcgtaaaatctactctgatgaagaagaactgttgtatctgagtttcattgaagatgtaacagatgaaattttgaaacttggtttattttcaaacaggtttttagaacgactgttcgagcgacatataaaacaaaataaacatttggaggaggaaaaaatgcgccacctgctgcatgtcctgaaagtagacttaggctgcacatcggaggaaaactcgttctccagtgtcaaaggcgacaataatcatgacatggagttatcaactcttaaaatcatggaaatgagcattgaggactgccctttggatgtttaatcttcattaataaatacctcaaatggccagtaa

SEQ ID NO: 293343 - protein, 488 aa, Artificial Sequence
  derived and/or modified sequence
MLIVLNSTLKSFDQFTCNLLYVSWRKDLTEHLHRLYFRGRAYYTLNVLRDDIDNPDQRISQDVERFCRQLSSMASKLIISPFTLVYYTYQCFQSTGWLGPVSIFGYFILGTVVNKTLMGPIVMKLVHQEKLEGDFRAGHVEHMRTDRRLQRLLQTQRELMSKELWLYIGINTFDYLGSILSYVVIAIPIFSGVYGDLSPAELSTLVSKNAFVCIYLISCFTQLIDLSTTLSDVAGYTHRIGQLRETLLDMSLKSQDCEILGESEWGLDTPPGWPAAEPADTAFLLERVSISAPSSDKPLIKDLSLKISEGQSLLITGNTGTGKTSLLRVLGGLWTSTRGSVQMLTDFGPHGVLFLPQKPFFTDGTLREQVIYPLKEVYPDSGSADDERILRFLELAGLSNLVARTEGLDQQVDWNWYDVLSPGEMQRLSFARLFYLQPKYAVLDEATSALTEEVESELYRIGQQLGMTFISVGHRQSLEKVPVLTRMA

SEQ ID NO: 293344 - DNA, 1216 bp, Artificial Sequence
  derived and/or modified sequence
cgcatgcgcaggcgacagctcatggcgttcagggcctgacggttgctagggtgacagggacacaacatggcggcgggatctctaacgctctccttcgagggaccaccacggagatcctagtgcgggaccccgcctcagggaagtggaaagcagggggacaaccttcctgcttctttcttttccgtccagtgtcggcaaggggttgtcaccggcttccgcatccaagatgaagaactataaagcaattggcaaaataggagagggaacgttttctgaagttatgaagatgcaaagcctgagagatggaaactactatgcatgtaaacaaatgaagcagcgctttgaaagtattgagcaagtcaacaacctacgagagatccaagcactgaggcgcctgaatccgcacccaaacattcttatgttgcatgaagtggtttttgacagaaaatctggttctcttgcactaatatgtgaacttatggacatgaatatttatgagctaatacgagggagaagatacccattatcagaaaaaaaaattatgcactatatgtaccagttatgtaagtccctggatcatattcacagaaatggaatatttcacagagatgtaaaaccagaaaatatactaataaagcaggatgtcctgaaattaggggactttggctcctgccggagtgtctattccaagcagccgtacacggaatacatctccacccgctggtaccgggccccggagtgtctcctcactgatgggttctacacgtacaagatggacctgtggagcgccggctgtgtgttctacgagatcgccagtctgcagcccctctttcctggagtaaatgaactggaccaaatctcaaaaatccacgatgtcatcggcacacccgctcagaagatcctcaccaagttcaaacagtcgagagctatgaattttgattttccttttaaaaagggatcaggaatacctctactaacaaccaatttgtccccacaatgcctctccctcctgcacgcaatggtggcctatgatcccgatgagagaatcgccgcccaccaggccctgcagcacccctacttccaagaacagagaacccagaacggaagcgaggatgaggcctcagccgtcctcctccccattcaaacacgttcatccctcaaccctctgctgagcacctgcatgctgcccggccgcagtgtcacccttcttgtgtga

SEQ ID NO: 293345 - protein, 274 aa, Artificial Sequence
  derived and/or modified sequence
MRPADLLQLVLLLDLPRDLGGMGCSSPPCECHQEEDFRVTCKDIQRIPSLPPSTQTLKLIETHLRTIPSHAFSNLPNISRIYVSIDVTLQQLESHSFYNLSKVTHIEIRNTRNLTYIDPDALKELPLLKFLGIFNTGLKMFPDLTKVYSTDIFFILEITDNPYMTSIPVNAFQGLCNETLTLKLYNNGFTSVQGYAFNGTKLDAVYLNKNKYLTVIDKDAFGGVYSGPSLLVENVAVSGKGFCKSLFSWLYRLPLGRKSLSFETQKAPRSSMPS

SEQ ID NO: 293346 - DNA, 825 bp, Artificial Sequence
  derived and/or modified sequence
atgagacccgccgacctgctgcagctggtgctgctgctggacctgcccagagacctgggcggcatgggctgcagcagccccccctgcgagtgccaccaggaggaggacttcagagtgacctgcaaggacatccagagaatccccagcctgccccccagcacccagaccctgaagctgatcgagacccacctgagaaccatccccagccacgccttcagcaacctgcccaacatcagcagaatctacgtgagcatcgacgtgaccctgcagcagctggagagccacagcttctacaacctgagcaaggtgacccacatcgagatcagaaacaccagaaacctgacctacatcgaccccgacgccctgaaggagctgcccctgctgaagttcctgggcatcttcaacaccggcctgaagatgttccccgacctgaccaaggtgtacagcaccgacatcttcttcatcctggagatcaccgacaacccctacatgaccagcatccccgtgaacgccttccagggcctgtgcaacgagaccctgaccctgaagctgtacaacaacggcttcaccagcgtgcagggctacgccttcaacggcaccaagctggacgccgtgtacctgaacaagaacaagtacctgaccgtgatcgacaaggacgccttcggcggcgtgtacagcggccccagcctgctggtggagaacgtggccgtgagcggcaagggcttctgcaagagcctgttcagctggctgtacagactgcccctgggcagaaagagcctgagcttcgagacccagaaggcccccagaagcagcatgcccagctag

SEQ ID NO: 293347 - DNA, 825 bp, Artificial Sequence
  derived and/or modified sequence
atgagacctgctgacctgctgcagctcgtgctgttattggatctaccacgtgatctgggtgggatgggctgttctagccccccatgcgaatgccaccaagaggaagatttcagagtcacctgcaaggacatccaacgcatcccctctctaccccctagcacccagacactgaaactgattgagacccatctccggacgatcccgtcacacgccttcagcaatctgccaaatatttctaggatctacgtatcaatcgacgtgacactccaacagctggagagtcacagtttttataatctgagtaaggtgacccatattgagatcagaaacaccagaaatttaacctacatcgatccagatgctcttaaagagctgccactgcttaaattccttggcatttttaataccggcctgaaaatgtttccagatctaaccaaggtttattctacagacatattctttatcctcgagattaccgacaatccatacatgacaagcataccggttaacgcatttcagggcctttgcaatgagacactcacattgaaactctacaataatgggtttacgagcgtccagggttatgcgttcaatggcaccaagcttgacgccgtttatctgaacaagaataagtacctgacggtgattgacaaggacgccttcggcggggtatacagcgggccgtccttactggtggagaatgtggccgtaagtggcaaaggcttttgtaaatcattgttctcttggttgtatagactgcctttggggaggaaatctttgagctttgaaacccagaaagcgccgcgatcctctatgccgtcttag

SEQ ID NO: 293348 - DNA, 825 bp, Artificial Sequence
  derived and/or modified sequence
atgaggcctgctgacctgctgcagctggtgctgctgctggacctgccccgggacctgggcggcatgggctgcagcagccccccctgtgagtgccaccaggaggaggacttccgggtgacctgcaaggacatccagaggatccccagcctgccccccagcacccagaccctgaagctgattgagacccacctgcggaccatccccagccacgccttcagcaacctgcccaacatcagccgcatctacgtgtccattgatgtgaccctgcagcagctggagagccacagcttctacaacctgagcaaggtgacccacatcgagatccggaacaccaggaacctgacctacattgatcctgatgccctgaaggagctgcccctgctgaagttcctgggcatcttcaacacaggcctgaagatgtttcctgacctgaccaaggtgtacagcacagacatcttcttcatcctggagatcacagacaacccctacatgaccagcatccctgtgaatgccttccagggcctgtgcaatgagaccctgaccctgaagctgtacaacaacggcttcacctctgtgcagggctacgccttcaacggcaccaagctggatgctgtgtacctgaacaagaacaagtacctgaccgtcatcgacaaggatgcctttggaggagtgtacagcggccccagcctgctggtggagaatgtggccgtgtctgggaagggcttctgcaagagcctcttctcctggctgtaccgcctgcccctgggcaggaagagcctgagctttgagacccagaaggcccccaggagctccatgcccagctag

SEQ ID NO: 293349 - DNA, 825 bp, Artificial Sequence
  derived and/or modified sequence
atgcggcccgccgacctgctgcagctggtgctgctgctggacctgcctcgagacctggggggaatgggttgctcgagccccccttgtgaatgccatcaggaggaggacttccgggttacctgcaaggacatccaaaggatcccgtctctgccgccaagcacccaaactctgaagctgattgaaacgcacctgaggactattcccagtcacgcattctcaaatctgccaaacatctctcggatttatgtaagtattgacgtgacacttcagcaattggagtcgcacagtttttacaatctcagtaaagtcacacacatcgaaatccgcaacacccggaatttaacttacattgacccggacgcactgaaagagcttccactccttaagtttttgggtatctttaatactggattaaaaatgtttcctgacctgactaaggtgtactctactgacatcttctttatccttgagattaccgataacccttacatgacgtccatacccgtaaatgccttccagggtttatgtaatgaaactctgaccctgaagctctacaataatggatttacctctgtgcaaggatacgccttcaacgggactaagctcgatgctgtgtatctcaacaagaataaatatttgacggtgatcgataaagacgccttcggtggcgtctactcgggcccatccttgctggttgagaatgtggcagtctccggcaaagggttctgcaagtccttgttctcttggctgtaccggttgcccctgggcaggaagagcttatctttcgaaactcagaaggccccgcgctcctccatgccatcttag

SEQ ID NO: 293350 - DNA, 825 bp, Artificial Sequence
  derived and/or modified sequence
atgagacctgcggatttgttgcaactcgtgttgctgctggatctgcctcgcgatctcgggggtatgggatgctcctcaccaccttgcgaatgtcaccaggaggaagattttcgggttacctgtaaggacatacagaggatacccagccttccccctagcactcagacgctgaagctcattgaaacccacctccgaaccatccccagccatgcgttctccaacctgcccaacatctcaaggatctacgtttccattgacgtaacgctacagcagctggagtcacactcattttataacctgtcaaaagtgactcacatcgagatcaggaataccaggaatctcacctacatcgatccggacgcccttaaggagctgccattgctgaagttcctcggcatcttcaacacgggcctgaagatgttcccggacctcacaaaggtgtattctactgatattttctttatactggagatcactgataatccttatatgacgtctatacccgttaacgccttccaaggcctctgcaacgaaaccttgactcttaaactgtacaacaatggctttactagcgtccagggttacgcttttaatggtactaaattggacgctgtttatctcaataaaaataagtatctgacagtgatagacaaagatgccttcggtggcgtatattcagggccttccctgctcgtcgaaaacgtagccgtgtcaggcaaaggattttgcaagtctctgttttcttggctgtacagattacccctgggcagaaaatcactgagctttgagacacaaaaagcacctcgctcatccatgccctcgtag

SEQ ID NO: 293351 - DNA, 1089 bp, Artificial Sequence
  derived and/or modified sequence
agaaatagccccgagtcccgtggaaaatgaggccggcggacttgctgcagctggtgctgctgctcgacctgcccagggacctgggcggaatggggtgttcgtctccaccctgcgagtgccatcaggaggaggacttcagagtcacctgcaaggatattcaacgcatccccagcttaccgcccagtacgcagactctgaagcttattgagactcacctgagaactattccaagtcatgcattttctaatctgcccaatatttccagaatctacgtatctatagatgtgactctgcagcagctggaatcacactccttctacaatttgagtaaagtgactcacatagaaattcggaataccaggaacttaacttacatagaccctgatgccctcaaagagctccccctcctaaagttccttggcattttcaacactggacttaaaatgttccctgacctgaccaaagtttattccactgatatattctttatacttgaaattacagacaacccttacatgacgtcaatccctgtgaatgcttttcagggactatgcaatgaaaccttgacactgaagctgtacaacaatggctttacttcagtccaaggatatgctttcaatgggacaaagctggatgctgtttacctaaacaagaataaatacctgacagttattgacaaagatgcatttggaggagtatacagtggaccaagcttgctggtagaaaatgttgctgtctcgggtaaaggcttctgcaagtccctcttttcctggctgtataggctacctcttggaagaaagtccttgtcctttgagactcagaaggccccacgctccagtatgccatcatgatgcctgctaaggcagccaccttggtgtacatgctcacagaggctctgttcatggagcagctgctgtttgaaaaattttgaaatgcaagatccacaactagatggaaggcactctagtctttgcagaaaaaaatgtacctgaatgtacattgcacaatgcctggcacaaagaaggaagaatataaatgatagttcgactcgtctgtggaagaacttacaatcatggggaaagatggaat

SEQ ID NO: 293352 - protein, 430 aa, Artificial Sequence
  derived and/or modified sequence
MLVSLKMSYKAAAGEDYKADCPPGNPAPTSNHGPDATEAEEDFVDPWTVQTSSAKGIDYDKLIVRFGSSKIDKELINRIERATGQRPHHFLRRGIFFSHRDMNQVLDAYENKKPFYLYTGRGPSSEAMHVGHLIPFIFTKWLQDVFNVPLVIQMTDDEKYLWKDLTLDQAYSYAVENAKDIIACGFDINKTFIFSDLDYMGMSSGFYKNVVKIQKHVTFNQVKGIFGFTDSDCIGKISFPAIQAAPSFSNSFPQIFRDRTDIQCLIPCAIDQDPYFRMTRDVAPRIGYPKPALLHSTFFPALQGAQTKMSASDPNSSIFLTDTAKQIKTKVNKHAFSGGRDTIEEHRQFGGNCDVDVSFMYLTFFLEDDDKLEQIRKDYTSGAMLTGELKKALIEVLQPLIAEHQARRKEVTDEIVKEFMTPRKLSFDFQ

SEQ ID NO: 293353 - protein, 471 aa, Artificial Sequence
  derived and/or modified sequence
MPNSEPASLLELFNSIATQGELVRSLKAGNASKDEIDSAVKMLVSLKMSYKAAAGEDYKADCPPGNPAPTSNHGPDATEAEEDFVDPWTVQTSSAKGIDYDKLIVRFGSSKIDKELINRIERATGQRPHHFLRRGIFFSHRDMNQVLDAYENKKPFYLYTGRGPSSEAMHVGHLIPFIFTKWLQDVFNVPLVIQMTDDEKYLWKDLTLDQAYSYAVENAKDIIACGFDINKTFIFSDLDYMGMSSGFYKNVVKIQKHVTFNQVKGIFGFTDSDCIGKISFPAIQAAPSFSNSFPQIFRDRTDIQCLIPCAIDQDPYFRMTRDVAPRIGYPKPALLHSTFFPALQGAQTKMSASDPNSSIFLTDTAKQIKTKVNKHAFSGGRDTIEEHRQFGGNCDVDVSFMYLTFFLEDDDKLEQIRKDYTSGAMLTGELKKALIEVLQPLIAEHQARRKEVTDEIVKEFMTPRKLSFDFQ

SEQ ID NO: 293354 - protein, 227 aa, Artificial Sequence
  derived and/or modified sequence
MLVSLKMSYKAAAGEDYKADCPPGNPAPTSNHGPDATEAEEDFVDPWTVQTSSAKGIDYDKLIVRFGSSKIDKELINRIERATGQRPHHFLRRGIFFSHRDMNQVLDAYENKKPFYLYTGRGPSSEAMHVGHLIPFIFTKWLQDVFNVPLVIQMTDDEKYLWKDLTLDQAYSYAVENAKDIIACGFDINKTFIFSDLDYMGMSSGFYKNVVKIQKHVTFNQVKGIFG

SEQ ID NO: 293355 - protein, 107 aa, Artificial Sequence
  derived and/or modified sequence
MPNSEPASLLELFNSIATQGELVRSLKAGNASKDEIDSAVKMLVSLKMSYKAAAGEDYKADCPPGNPAPTSNHGPDATEAEEDFVDPWTVQTSSAKGIDYDKLIVRF

SEQ ID NO: 293356 - protein, 150 aa, Artificial Sequence
  derived and/or modified sequence
MPNSEPASLLELFNSIATQGELVRSLKAGNASKDEIDSAVKMLVSLKMSYKAAAGEDYKADCPPGNPAPTSNHGPDATEAEEDFVDPWTVQTSSAKGIDYDKLIVRFGSSKIDKELINRIERATGQRPHHFLRRGIFFSHRDMNQVLDAY

SEQ ID NO: 293357 - protein, 97 aa, Artificial Sequence
  derived and/or modified sequence
MPNSEPASLLELFNSIATQGELVRSLKAGNASKDEIDSAVKMLVSLKMSYKAAAGEDYKADCPPGNPAPTSNHGPDATEAEEDFVDPWTVQTSSAKG

SEQ ID NO: 293358 - protein, 26 aa, Artificial Sequence
  derived and/or modified sequence
MPNSEPASLLELFNSIATQGELVRSL

SEQ ID NO: 293359 - protein, 105 aa, Artificial Sequence
  derived and/or modified sequence
MPNSEPASLLELFNSIATQGELVRSLKAGNASKDEIDSAVKMLVSLKMSYKAAAGEDYKADCPPGNPAPTSNHGPDATEAEEDFVDPWTVQTSSAKGIDYDKLIV

SEQ ID NO: 293360 - protein, 33 aa, Artificial Sequence
  derived and/or modified sequence
MPNSEPASLLELFNSIATQGELVRSLKAGNASK

SEQ ID NO: 293361 - protein, 68 aa, Artificial Sequence
  derived and/or modified sequence
MPNSEPASLLELFNSIATQGELVRSLKAGNASKDEIDSAVKMLVSLKMSYKAAAGEDYKADCPPGNPA

SEQ ID NO: 293362 - protein, 124 aa, Artificial Sequence
  derived and/or modified sequence
MPNSEPASLLELFNSIATQGELVRSLKAGNASKDEIDSAVKMLVSLKMSYKAAAGEDYKADCPPGNPAPTSNHGPDATEAEEDFVDPWTVQTSSAKGIDYDKLIVRFGSSKIDKELINRIERAT

SEQ ID NO: 293363 - protein, 86 aa, Artificial Sequence
  derived and/or modified sequence
MPNSEPASLLELFNSIATQGELVRSLKAGNASKDEIDSAVKMLVSLKMSYKAAAGEDYKADCPPGNPAPTSNHGPDATEAEEDFVD

SEQ ID NO: 293364 - protein, 55 aa, Artificial Sequence
  derived and/or modified sequence
MPNSEPASLLELFNSIATQGELVRSLKAGNASKDEIDSAVKMLVSLKMSYKAAAG

SEQ ID NO: 293365 - protein, 63 aa, Artificial Sequence
  derived and/or modified sequence
MPNSEPASLLELFNSIATQGELVRSLKAGNASKDEIDSAVKMLVSLKMSYKAAAGEDYKADCP

SEQ ID NO: 293366 - protein, 70 aa, Artificial Sequence
  derived and/or modified sequence
MPNSEPASLLELFNSIATQGELVRSLKAGNASKDEIDSAVKMLVSLKMSYKAAAGEDYKADCPPGNPAPT

SEQ ID NO: 293367 - protein, 58 aa, Artificial Sequence
  derived and/or modified sequence
MPNSEPASLLELFNSIATQGELVRSLKAGNASKDEIDSAVKMLVSLKMSYKAAAGEDY

SEQ ID NO: 293368 - protein, 140 aa, Artificial Sequence
  derived and/or modified sequence
MLVSLKMSYKAAAGEDYKADCPPGNPAPTSNHGPDATEAEEDFVDPWTVQTSSAKGIDYDKLIVRFGSSKIDKELINRIERATGQRPHHFLRRGIFFSHRDMNQVLDAYENKKPFYLYTGRGPSSEAMHVGHLIPFIFTK

SEQ ID NO: 293369 - protein, 153 aa, Artificial Sequence
  derived and/or modified sequence
MLVSLKMSYKAAAGEDYKADCPPGNPAPTSNHGPDATEAEEDFVDPWTVQTSSAKGIDYDKLIVRFGSSKIDKELINRIERATGQRPHHFLRRGIFFSHRDMNQVLDAYENKKPFYLYTGRGPSSEAMHVGHLIPFIFTKWLQDVFNVPLVIQ

SEQ ID NO: 293370 - protein, 224 aa, Artificial Sequence
  derived and/or modified sequence
MLVSLKMSYKAAAGEDYKADCPPGNPAPTSNHGPDATEAEEDFVDPWTVQTSSAKGIDYDKLIVRFGSSKIDKELINRIERATGQRPHHFLRRGIFFSHRDMNQVLDAYENKKPFYLYTGRGPSSEAMHVGHLIPFIFTKWLQDVFNVPLVIQMTDDEKYLWKDLTLDQAYSYAVENAKDIIACGFDINKTFIFSDLDYMGMSSGFYKNVVKIQKHVTFNQVKG

SEQ ID NO: 293371 - protein, 114 aa, Artificial Sequence
  derived and/or modified sequence
MPNSEPASLLELFNSIATQGELVRSLKAGNASKDEIDSAVKMLVSLKMSYKAAAGEDYKADCPPGNPAPTSNHGPDATEAEEDFVDPWTVQTSSAKGIDYDKLIVRFGSSKIDK

SEQ ID NO: 293372 - protein, 152 aa, Artificial Sequence
  derived and/or modified sequence
MPNSEPASLLELFNSIATQGELVRSLKAGNASKDEIDSAVKMLVSLKMSYKAAAGEDYKADCPPGNPAPTSNHGPDATEAEEDFVDPWTVQTSSAKGIDYDKLIVRFGSSKIDKELINRIERATGQRPHHFLRRGIFFSHRDMNQVLDAYEN

SEQ ID NO: 293373 - protein, 154 aa, Artificial Sequence
  derived and/or modified sequence
MLVSLKMSYKAAAGEDYKADCPPGNPAPTSNHGPDATEAEEDFVDPWTVQTSSAKGIDYDKLIVRFGSSKIDKELINRIERATGQRPHHFLRRGIFFSHRDMNQVLDAYENKKPFYLYTGRGPSSEAMHVGHLIPFIFTKWLQDVFNVPLVIQM

SEQ ID NO: 293374 - protein, 212 aa, Artificial Sequence
  derived and/or modified sequence
MPNSEPASLLELFNSIATQGELVRSLKAGNASKDEIDSAVKMLVSLKMSYKAAAGEDYKADCPPGNPAPTSNHGPDATEAEEDFVDPWTVQTSSAKGIDYDKLIVRFGSSKIDKELINRIERATGQRPHHFLRRGIFFSHRDMNQVLDAYENKKPFYLYTGRGPSSEAMHVGHLIPFIFTKWLQDVFNVPLVIQMTDDEKYLWKDLTLDQAY

SEQ ID NO: 293375 - DNA, 1416 bp, Artificial Sequence
  derived and/or modified sequence
atgcccaacagcgagcccgccagcctgctggagctgttcaacagcatcgccacccagggcgagctggtgagaagcctgaaggccggcaacgccagcaaggacgagatcgacagcgccgtgaagatgctggtgagcctgaagatgagctacaaggccgccgccggcgaggactacaaggccgactgcccccccggcaaccccgcccccaccagcaaccacggccccgacgccaccgaggccgaggaggacttcgtggacccctggaccgtgcagaccagcagcgccaagggcatcgactacgacaagctgatcgtgagattcggcagcagcaagatcgacaaggagctgatcaacagaatcgagagagccaccggccagagaccccaccacttcctgagaagaggcatcttcttcagccacagagacatgaaccaggtgctggacgcctacgagaacaagaagcccttctacctgtacaccggcagaggccccagcagcgaggccatgcacgtgggccacctgatccccttcatcttcaccaagtggctgcaggacgtgttcaacgtgcccctggtgatccagatgaccgacgacgagaagtacctgtggaaggacctgaccctggaccaggcctacagctacgccgtggagaacgccaaggacatcatcgcctgcggcttcgacatcaacaagaccttcatcttcagcgacctggactacatgggcatgagcagcggcttctacaagaacgtggtgaagatccagaagcacgtgaccttcaaccaggtgaagggcatcttcggcttcaccgacagcgactgcatcggcaagatcagcttccccgccatccaggccgcccccagcttcagcaacagcttcccccagatcttcagagacagaaccgacatccagtgcctgatcccctgcgccatcgaccaggacccctacttcagaatgaccagagacgtggcccccagaatcggctaccccaagcccgccctgctgcacagcaccttcttccccgccctgcagggcgcccagaccaagatgagcgccagcgaccccaacagcagcatcttcctgaccgacaccgccaagcagatcaagaccaaggtgaacaagcacgccttcagcggcggcagagacaccatcgaggagcacagacagttcggcggcaactgcgacgtggacgtgagcttcatgtacctgaccttcttcctggaggacgacgacaagctggagcagatcagaaaggactacaccagcggcgccatgctgaccggcgagctgaagaaggccctgatcgaggtgctgcagcccctgatcgccgagcaccaggccagaagaaaggaggtgaccgacgagatcgtgaaggagttcatgacccccagaaagctgagcttcgacttccagtag

SEQ ID NO: 293376 - DNA, 324 bp, Artificial Sequence
  derived and/or modified sequence
atgcccaacagcgagcccgccagcctgctggagctgttcaacagcatcgccacccagggcgagctggtgagaagcctgaaggccggcaacgccagcaaggacgagatcgacagcgccgtgaagatgctggtgagcctgaagatgagctacaaggccgccgccggcgaggactacaaggccgactgcccccccggcaaccccgcccccaccagcaaccacggccccgacgccaccgaggccgaggaggacttcgtggacccctggaccgtgcagaccagcagcgccaagggcatcgactacgacaagctgatcgtgagattctag

SEQ ID NO: 293377 - DNA, 453 bp, Artificial Sequence
  derived and/or modified sequence
atgcccaacagcgagcccgccagcctgctggagctgttcaacagcatcgccacccagggcgagctggtgagaagcctgaaggccggcaacgccagcaaggacgagatcgacagcgccgtgaagatgctggtgagcctgaagatgagctacaaggccgccgccggcgaggactacaaggccgactgcccccccggcaaccccgcccccaccagcaaccacggccccgacgccaccgaggccgaggaggacttcgtggacccctggaccgtgcagaccagcagcgccaagggcatcgactacgacaagctgatcgtgagattcggcagcagcaagatcgacaaggagctgatcaacagaatcgagagagccaccggccagagaccccaccacttcctgagaagaggcatcttcttcagccacagagacatgaaccaggtgctggacgcctactag

SEQ ID NO: 293378 - DNA, 294 bp, Artificial Sequence
  derived and/or modified sequence
atgcccaacagcgagcccgccagcctgctggagctgttcaacagcatcgccacccagggcgagctggtgagaagcctgaaggccggcaacgccagcaaggacgagatcgacagcgccgtgaagatgctggtgagcctgaagatgagctacaaggccgccgccggcgaggactacaaggccgactgcccccccggcaaccccgcccccaccagcaaccacggccccgacgccaccgaggccgaggaggacttcgtggacccctggaccgtgcagaccagcagcgccaagggctag

SEQ ID NO: 293379 - DNA, 81 bp, Artificial Sequence
  derived and/or modified sequence
atgcccaacagcgagcccgccagcctgctggagctgttcaacagcatcgccacccagggcgagctggtgagaagcctgtag

SEQ ID NO: 293380 - DNA, 318 bp, Artificial Sequence
  derived and/or modified sequence
atgcccaacagcgagcccgccagcctgctggagctgttcaacagcatcgccacccagggcgagctggtgagaagcctgaaggccggcaacgccagcaaggacgagatcgacagcgccgtgaagatgctggtgagcctgaagatgagctacaaggccgccgccggcgaggactacaaggccgactgcccccccggcaaccccgcccccaccagcaaccacggccccgacgccaccgaggccgaggaggacttcgtggacccctggaccgtgcagaccagcagcgccaagggcatcgactacgacaagctgatcgtgtag

SEQ ID NO: 293381 - DNA, 102 bp, Artificial Sequence
  derived and/or modified sequence
atgcccaacagcgagcccgccagcctgctggagctgttcaacagcatcgccacccagggcgagctggtgagaagcctgaaggccggcaacgccagcaagtag

SEQ ID NO: 293382 - DNA, 207 bp, Artificial Sequence
  derived and/or modified sequence
atgcccaacagcgagcccgccagcctgctggagctgttcaacagcatcgccacccagggcgagctggtgagaagcctgaaggccggcaacgccagcaaggacgagatcgacagcgccgtgaagatgctggtgagcctgaagatgagctacaaggccgccgccggcgaggactacaaggccgactgcccccccggcaaccccgcctag

SEQ ID NO: 293383 - DNA, 375 bp, Artificial Sequence
  derived and/or modified sequence
atgcccaacagcgagcccgccagcctgctggagctgttcaacagcatcgccacccagggcgagctggtgagaagcctgaaggccggcaacgccagcaaggacgagatcgacagcgccgtgaagatgctggtgagcctgaagatgagctacaaggccgccgccggcgaggactacaaggccgactgcccccccggcaaccccgcccccaccagcaaccacggccccgacgccaccgaggccgaggaggacttcgtggacccctggaccgtgcagaccagcagcgccaagggcatcgactacgacaagctgatcgtgagattcggcagcagcaagatcgacaaggagctgatcaacagaatcgagagagccacctag

SEQ ID NO: 293384 - DNA, 261 bp, Artificial Sequence
  derived and/or modified sequence
atgcccaacagcgagcccgccagcctgctggagctgttcaacagcatcgccacccagggcgagctggtgagaagcctgaaggccggcaacgccagcaaggacgagatcgacagcgccgtgaagatgctggtgagcctgaagatgagctacaaggccgccgccggcgaggactacaaggccgactgcccccccggcaaccccgcccccaccagcaaccacggccccgacgccaccgaggccgaggaggacttcgtggactag

SEQ ID NO: 293385 - DNA, 168 bp, Artificial Sequence
  derived and/or modified sequence
atgcccaacagcgagcccgccagcctgctggagctgttcaacagcatcgccacccagggcgagctggtgagaagcctgaaggccggcaacgccagcaaggacgagatcgacagcgccgtgaagatgctggtgagcctgaagatgagctacaaggccgccgccggctag

SEQ ID NO: 293386 - DNA, 192 bp, Artificial Sequence
  derived and/or modified sequence
atgcccaacagcgagcccgccagcctgctggagctgttcaacagcatcgccacccagggcgagctggtgagaagcctgaaggccggcaacgccagcaaggacgagatcgacagcgccgtgaagatgctggtgagcctgaagatgagctacaaggccgccgccggcgaggactacaaggccgactgcccctag

SEQ ID NO: 293387 - DNA, 213 bp, Artificial Sequence
  derived and/or modified sequence
atgcccaacagcgagcccgccagcctgctggagctgttcaacagcatcgccacccagggcgagctggtgagaagcctgaaggccggcaacgccagcaaggacgagatcgacagcgccgtgaagatgctggtgagcctgaagatgagctacaaggccgccgccggcgaggactacaaggccgactgcccccccggcaaccccgcccccacctag

SEQ ID NO: 293388 - DNA, 177 bp, Artificial Sequence
  derived and/or modified sequence
atgcccaacagcgagcccgccagcctgctggagctgttcaacagcatcgccacccagggcgagctggtgagaagcctgaaggccggcaacgccagcaaggacgagatcgacagcgccgtgaagatgctggtgagcctgaagatgagctacaaggccgccgccggcgaggactactag

SEQ ID NO: 293389 - DNA, 345 bp, Artificial Sequence
  derived and/or modified sequence
atgcccaacagcgagcccgccagcctgctggagctgttcaacagcatcgccacccagggcgagctggtgagaagcctgaaggccggcaacgccagcaaggacgagatcgacagcgccgtgaagatgctggtgagcctgaagatgagctacaaggccgccgccggcgaggactacaaggccgactgcccccccggcaaccccgcccccaccagcaaccacggccccgacgccaccgaggccgaggaggacttcgtggacccctggaccgtgcagaccagcagcgccaagggcatcgactacgacaagctgatcgtgagattcggcagcagcaagatcgacaagtag

SEQ ID NO: 293390 - DNA, 459 bp, Artificial Sequence
  derived and/or modified sequence
atgcccaacagcgagcccgccagcctgctggagctgttcaacagcatcgccacccagggcgagctggtgagaagcctgaaggccggcaacgccagcaaggacgagatcgacagcgccgtgaagatgctggtgagcctgaagatgagctacaaggccgccgccggcgaggactacaaggccgactgcccccccggcaaccccgcccccaccagcaaccacggccccgacgccaccgaggccgaggaggacttcgtggacccctggaccgtgcagaccagcagcgccaagggcatcgactacgacaagctgatcgtgagattcggcagcagcaagatcgacaaggagctgatcaacagaatcgagagagccaccggccagagaccccaccacttcctgagaagaggcatcttcttcagccacagagacatgaaccaggtgctggacgcctacgagaactag

SEQ ID NO: 293391 - DNA, 639 bp, Artificial Sequence
  derived and/or modified sequence
atgcccaacagcgagcccgccagcctgctggagctgttcaacagcatcgccacccagggcgagctggtgagaagcctgaaggccggcaacgccagcaaggacgagatcgacagcgccgtgaagatgctggtgagcctgaagatgagctacaaggccgccgccggcgaggactacaaggccgactgcccccccggcaaccccgcccccaccagcaaccacggccccgacgccaccgaggccgaggaggacttcgtggacccctggaccgtgcagaccagcagcgccaagggcatcgactacgacaagctgatcgtgagattcggcagcagcaagatcgacaaggagctgatcaacagaatcgagagagccaccggccagagaccccaccacttcctgagaagaggcatcttcttcagccacagagacatgaaccaggtgctggacgcctacgagaacaagaagcccttctacctgtacaccggcagaggccccagcagcgaggccatgcacgtgggccacctgatccccttcatcttcaccaagtggctgcaggacgtgttcaacgtgcccctggtgatccagatgaccgacgacgagaagtacctgtggaaggacctgaccctggaccaggcctactag

SEQ ID NO: 293392 - DNA, 1416 bp, Artificial Sequence
  derived and/or modified sequence
atgccgaacagtgaacccgcttcactcttggagctcttcaacagcattgctacgcagggagagctggtccgaagtctaaaggcaggcaacgcctccaaagacgagatagacagtgctgtcaaaatgttagtgtctctcaaaatgtcttacaaggcagccgccggtgaagactataaagcagactgccctccgggaaacccggctccaacatcaaatcatgggcctgacgcaaccgaggctgaggaggatttcgtggacccatggacagtacagacttcctctgcaaaaggtatcgactatgacaagctgattgtcaggtttggtagctctaaaattgacaaggagttaatcaacagaatcgagcgcgcaaccgggcagcgaccgcaccactttctcagaagagggatctttttttcccaccgcgatatgaatcaagttctggacgcgtatgagaataaaaaacccttttacctgtatacaggtcggggcccttctagcgaggccatgcacgtggggcatctcataccctttatttttactaagtggctacaggatgtatttaatgttcctcttgttatccagatgaccgacgacgagaaatatctctggaaggatctaaccctggatcaggcctattcgtacgcagtggagaacgcaaaagacatcatcgcgtgtggcttcgatattaacaaaacattcattttctcagatctagactatatgggaatgtcatctggcttttataaaaacgtggtgaagatccaaaagcacgtaaccttcaatcaggtcaagggcatattcggattcacggacagcgattgcatcggcaaaatcagctttcccgccatacaggccgcgcccagttttagcaactccttccctcaaatatttcgggatcgtactgatatacaatgcctcattccctgcgcgattgatcaggatccttattttagaatgacccgggacgtggcaccgcgaataggctacccgaagcctgccttgctacacagcaccttctttcctgcactgcagggagcacagactaaaatgtccgcatcggacccaaatagtagtattttccttaccgacacggccaagcagattaaaactaaggtgaacaaacatgctttcagcggcggtagagacaccatcgaggaacacagacagttcggagggaattgcgacgtcgatgtcagctttatgtatttgactttctttctagaggacgacgacaagctggaacagattcggaaagactacacatccggcgccatgttaacaggtgagctgaagaaggctctgattgaggtgctgcaaccactaattgccgagcatcaggcacgacgaaaagaggtgactgatgagatcgtgaaggagtttatgactcccagaaagttaagtttcgacttccagtag

SEQ ID NO: 293393 - DNA, 1416 bp, Artificial Sequence
  derived and/or modified sequence
atgcctaactccgaaccggcatcattgctggaactgttcaattccattgcgactcaaggcgagttagtgagaagcctgaaggcaggaaacgcatctaaggatgagatcgattcagccgtaaaaatgctagtgagcctgaaaatgtcctataaggccgcagccggagaggactataaagctgactgccctccaggcaacccagcacccacgtccaatcacggacctgatgctactgaagcggaggaagactttgtcgacccttggactgtccagacaagttccgccaagggtattgactatgacaagttgattgtgcgtttcggcagtagcaagatcgacaaagagctaattaatcgcatcgaacgcgcaacagggcaacgcccacaccacttcttaagacgtggcatatttttttcacatcgggatatgaaccaagtgctcgacgcttatgaaaataaaaagcctttctacctgtacacggggaggggccccagcagtgaggccatgcatgtcggtcacctgatcccattcattttcacaaagtggttacaggacgtgtttaatgttccactcgtgatccagatgactgatgatgagaagtacctttggaaggacttgacgttagaccaggcttacagttacgccgtggaaaacgcgaaagacattatagcctgcggtttcgatattaataaaacctttattttctctgacctcgactacatgggcatgagctccggcttttacaaaaacgtggtaaagatacaaaaacacgtgactttcaatcaagtgaaggggatttttgggttcacggatagcgattgtatcggcaagattagcttccctgctattcaggctgcacccagtttctctaattcctttccacagatctttcgagaccgaacagacattcaatgccttattccttgcgccatcgaccaggacccttactttcggatgaccagggatgtggccccccgtattggctatccaaagcctgccctgttacactccacattctttccggccctgcagggagcccagactaaaatgtcagcctctgacccaaactcaagtatatttctgactgatactgctaaacagattaaaactaaggtgaacaagcacgcattcagcggaggccgtgacacaattgaagaacatcgccaatttggcggaaattgcgatgtcgacgttagctttatgtacttgacattttttttggaggatgatgacaagttagaacagatcagaaaagactatacctcgggggctatgctgactggtgagttgaaaaaggcgctgatagaggtcctacagccccttatcgctgaacatcaagcccgacgcaaagaagtgaccgatgaaatcgtcaaggaattcatgactccccgaaagctttctttcgattttcagtag

SEQ ID NO: 293394 - DNA, 324 bp, Artificial Sequence
  derived and/or modified sequence
atgccgaactccgaaccagctagtctcctggagctttttaatagtatcgccacccaaggcgagttagtgcgatcccttaaggctggaaatgcttctaaggatgagatcgacagtgcagtaaagatgctggtttcactcaagatgtcatataaggcggccgcaggggaggactataaagcagattgccctccaggcaatccggcaccaactagcaaccacggaccggacgcaacggaggccgaggaagacttcgtggatccttggaccgtccaaacatcgtcggctaaagggatagactacgacaagctgatagtgcggttttag

SEQ ID NO: 293395 - DNA, 453 bp, Artificial Sequence
  derived and/or modified sequence
atgcccaacagcgagccggccagcctgcttgagttgttcaactctattgccactcagggtgagctggtgcgctccttaaaggctggtaacgcctccaaggatgagatcgactccgcagtgaaaatgctggttagcctgaagatgagctataaagcagcagccggagaagactataaggctgattgcccgcccggcaaccccgcgccaacatcaaatcatggccctgatgccacagaagctgaggaagatttcgttgacccttggactgtccaaacatcttctgccaagggcatcgactacgataagctgatcgtgcgatttggttcatcaaaaattgacaaggaactgatcaacagaattgaaagagccactggccagcggccacaccattttctgcggcggggaattttcttttcccaccgggatatgaatcaggtgttggatgcttactag

SEQ ID NO: 293396 - DNA, 294 bp, Artificial Sequence
  derived and/or modified sequence
atgccaaattctgaacctgcgtctctgctcgagctgttcaattccattgccacccagggggagctggtcaggagtttaaaggctggcaatgcctctaaggatgagattgacagtgcggtgaagatgcttgtgagcctcaagatgagctacaaagcagctgctggggaggactacaaggctgactgtcctcccgggaacccagcacctaccagcaaccacggaccagacgctactgaggctgaggaagatttcgttgatccctggacggtccagacaagctccgccaaaggatag

SEQ ID NO: 293397 - DNA, 81 bp, Artificial Sequence
  derived and/or modified sequence
atgccaaatagcgaacctgcaagcctgctggaactgttcaatagtattgccactcagggcgagttggtgagaagtctgtag

SEQ ID NO: 293398 - DNA, 318 bp, Artificial Sequence
  derived and/or modified sequence
atgccaaacagcgagccagcctcgctgctcgagcttttcaacagtatagctactcagggcgaactcgttcgaagtctgaaggcaggaaatgcctccaaggatgagatcgatagcgcagttaagatgctggtatctctaaagatgtcttacaaggcagcagctggggaagattataaagctgactgccctcctgggaaccccgcccccacttctaatcatgggccagatgcaaccgaggctgaggaggattttgtggacccgtggaccgtacagaccagcagcgctaagggcatcgactatgataaactgatagtgtag

SEQ ID NO: 293399 - DNA, 102 bp, Artificial Sequence
  derived and/or modified sequence
atgcccaactccgagcccgccagcctgctggagctgtttaatagtatcgccacccagggagagctcgttaggtctcttaaagccggtaatgctagcaaatag

SEQ ID NO: 293400 - DNA, 207 bp, Artificial Sequence
  derived and/or modified sequence
atgcctaactcagagccagcttcactgctggagctatttaactccattgcgacacagggagagctagtacggtctctgaaagcaggcaatgcttctaaagatgagatcgattccgctgttaaaatgctggtctcactgaagatgagctacaaggccgccgctggagaagactacaaagcagactgtccacccgggaatccagcatag

SEQ ID NO: 293401 - DNA, 375 bp, Artificial Sequence
  derived and/or modified sequence
atgccaaacagtgagcctgcatccttacttgaactcttcaatagcatcgcaactcagggggagctcgtgaggagccttaaggcaggcaatgccagtaaggacgagatcgattctgcagttaaaatgttagtcagtttgaaaatgtcgtacaaggccgccgcaggagaagactataaagcagattgcccacccggtaacccggcgcccacttctaatcacgggcccgatgctactgaagctgaagaggacttcgtagacccgtggaccgtccagacatccagcgccaaaggaatagactatgacaaactgatcgtgagatttggttctagcaagatcgataaggaacttatcaacagaatcgagagagcgacatag

SEQ ID NO: 293402 - DNA, 261 bp, Artificial Sequence
  derived and/or modified sequence
atgccgaatagcgaacctgcttcactgttagagttgttcaatagtatcgccacacaaggggagctggtgcgctcactcaaggcgggaaacgcctctaaggatgagatcgatagtgctgttaagatgctggtgtctctgaaaatgtcttataaagcagccgctggtgaggactacaaggccgactgtccgcctgggaatcccgctcccacgtcaaatcatggccctgatgccacggaggctgaggaggatttcgtggattag

SEQ ID NO: 293403 - DNA, 168 bp, Artificial Sequence
  derived and/or modified sequence
atgcctaactcggagccggcctcattattggagttattcaatagcattgcaactcaaggagaacttgtgcgcagcttgaaagcaggaaacgctagcaaagacgagatcgactctgcggtgaagatgttggtatctctgaagatgagctacaaagcagccgctgggtag

SEQ ID NO: 293404 - DNA, 192 bp, Artificial Sequence
  derived and/or modified sequence
atgcccaattccgagcccgcgagcctgctcgagctgttcaattcgatcgccacgcagggcgagctggttcgtagtctgaaggccggaaacgcgtccaaggatgagatcgattccgccgtgaaaatgttggtgagcctgaagatgagctataaggcagctgccggtgaagactacaaggccgactgcccatag

SEQ ID NO: 293405 - DNA, 213 bp, Artificial Sequence
  derived and/or modified sequence
atgccaaactccgaacctgcttcacttttagagctcttcaacagtattgcaactcaaggcgaactggtgcgctctttaaaggcagggaacgcctccaaggatgagatcgacagcgccgtcaaaatgcttgtgagtctgaagatgagctataaagccgcagcgggcgaagattacaaagcagactgcccacccggtaaccctgccccaacatag

SEQ ID NO: 293406 - DNA, 177 bp, Artificial Sequence
  derived and/or modified sequence
atgcccaattctgagcccgcgtccctgcttgagctgtttaacagtatcgctacacagggggagctcgtccgaagtttgaaagccgggaacgcatctaaggacgaaattgactcagcggtcaagatgctggtttctcttaagatgtcctataaggccgccgcgggggaggattattag

SEQ ID NO: 293407 - DNA, 345 bp, Artificial Sequence
  derived and/or modified sequence
atgccaaactcagaaccggcctctctgttagaactgtttaattctatagctacccagggggagctggtcagaagcttaaaggcgggcaatgcttccaaggatgaaatagattcagccgttaaaatgctggtgtcactgaaaatgagctataaggcggccgctggagaagactacaaagctgattgtccacccggtaaccctgctccaacttcaaatcacggacctgatgcaacggaggcggaagaggattttgtggatccgtggactgtccagacctctagtgccaaaggaatagactacgacaagcttatcgtccgttttggctcttcgaagatcgacaaatag

SEQ ID NO: 293408 - DNA, 177 bp, Artificial Sequence
  derived and/or modified sequence
atgccaaacagcgaacctgccagcctgctcgaactgtttaactccattgctactcaaggtgaattggtgagatctctgaaggccgggaacgccagcaaagatgagatagattcagctgtaaagatgctggtgtcgctcaaaatgagctacaaggcagcggcaggcgaagattattag

SEQ ID NO: 293409 - DNA, 459 bp, Artificial Sequence
  derived and/or modified sequence
atgccaaactcagagcccgccagcctgctagaattgttcaactccatagccacacagggcgagctcgtgagaagtctgaaagcgggaaatgcgagcaaagatgaaatagactccgcagtaaaaatgcttgttagcctgaagatgtcatataaagcagctgcaggtgaagattataaggcagactgtccaccagggaaccctgcacctacctccaaccacggcccagatgccacagaagccgaggaggattttgtggacccatggactgtacaaaccagttcagcgaaaggcattgactacgataaactgatcgtgaggttcggctcatctaagattgacaaggagctgatcaatcgaatcgagcgcgccacaggccagagacctcatcattttctgcgaaggggcatcttcttctctcatcgcgacatgaaccaagtgttagacgcctacgagaactag

SEQ ID NO: 293410 - DNA, 1416 bp, Artificial Sequence
  derived and/or modified sequence
atgcccaatagcgagccagcttctctgttggaactctttaattctattgctacacaaggagaactggtgcgaagcttaaaagctgggaacgcgagcaaagacgagatagactcagcagtcaaaatgcttgtgagcctcaaaatgagttacaaagctgctgcaggcgaagattacaaagccgattgtcctcccgggaacccagcacccactagtaaccatggccccgatgccaccgaagccgaggaggatttcgtagatccttggactgtgcagacgagctccgctaagggtatagattacgataagctaatagtcagatttggatcctcaaaaatcgacaaagagcttattaaccggatcgagagggcaaccggacaacggcctcaccacttcctgcggagagggatctttttttctcaccgcgacatgaatcaggtcctggatgcctacgaaaataagaagcccttttacctatacaccggacggggaccgtcctccgaggccatgcacgtcgggcatctgattccgttcatattcaccaagtggctacaagatgtgttcaacgtgcccttggtcatccagatgacagatgacgaaaagtacctatggaaagatctgacactagatcaggcctacagctatgcggtcgagaacgccaaagacattatcgcatgtgggttcgacattaataaaacctttatctttagcgaccttgattatatgggcatgagctccggtttttacaaaaatgttgtgaagattcagaaacatgtgaccttcaatcaagtgaaagggatcttcggctttaccgattcggactgtatcgggaagattagcttccccgccattcaggcggcccctagtttctctaattctttcccacagattttcagggacagaacagacatccaatgcctgatcccttgtgctattgatcaggacccctacttccgaatgacgagagatgtggcgccccgaattgggtaccccaagcctgccctccttcacagcacgttttttcctgctctccagggggcgcagactaaaatgagtgcatctgatccaaactctagtatttttttgactgacacggctaaacaaataaagaccaaggtcaataagcatgcctttagtggaggaagggacaccatcgaggagcaccgccagtttggaggcaactgcgatgtggatgtgtcatttatgtacctgacatttttcctcgaggacgatgacaagctggaacagatccggaaagattatacaagcggggccatgctgactggcgaactgaaaaaagcactgattgaagtgctgcagccgcttatcgccgagcaccaagctaggcgcaaggaggtgaccgatgaaatcgtaaaggagttcatgacaccacggaaactgtcctttgactttcagtag

SEQ ID NO: 293411 - DNA, 639 bp, Artificial Sequence
  derived and/or modified sequence
atgcctaattcagagccagcatctttgttggagttgttcaactctatcgccacccagggggaattagtgcgatccctgaaagctgggaacgcatccaaggacgagatcgactctgctgtgaagatgctggtgtccctgaaaatgtcatacaaagccgccgctggcgaggattataaagcggattgcccaccggggaaccccgcgccaacatcaaatcatgggccagacgccaccgaagccgaggaggattttgttgacccttggactgtgcagacgtcatccgccaaagggattgattacgataagctgattgttcgtttcgggtcttccaaaatcgataaggagctgatcaaccggatagagagggcgacaggacagcgtccgcatcactttctccgacggggcattttcttttcccaccgagatatgaatcaggttcttgacgcatacgaaaataagaaacctttttacctgtacacagggaggggccctagctcagaagcaatgcacgtgggacacttgataccattcatatttacaaaatggctccaggacgtcttcaatgttcctctggttatacaaatgactgacgatgagaagtatctgtggaaggacttaaccctggaccaagcttattag

SEQ ID NO: 293412 - DNA, 1416 bp, Artificial Sequence
  derived and/or modified sequence
atgcccaacagcgagcccgccagcctgctggagctgttcaacagcatcgccacccagggcgagctggtgcgcagcctgaaggctggaaatgccagcaaggatgaaattgacagcgctgtgaagatgctggtgtccctgaagatgagctacaaggctgctgctggggaggactacaaggctgactgccccccaggcaacccagcccccaccagcaaccacggcccagatgccacagaggccgaggaggactttgtggacccctggacagtgcagaccagcagcgccaagggcatcgactatgacaagctgattgtgcgcttcggcagcagcaagattgacaaggagctgatcaaccgcatcgagcgggccaccggccagaggccccaccacttcctgcggcggggcatcttcttcagccaccgggacatgaaccaggtgctggatgcctatgagaacaagaagcccttctacctgtacacaggccggggccccagcagcgaggccatgcacgtgggccacctgatccccttcatcttcaccaagtggctgcaggatgtgttcaacgtgcccctggtgatccagatgacagatgatgagaagtacctgtggaaggacctgaccctggaccaggcctacagctatgctgtggagaatgccaaggacatcatcgcctgtggctttgacatcaacaagaccttcatcttcagtgacctggactacatgggcatgagcagcggcttctacaagaatgtggtgaagatccagaagcacgtgaccttcaaccaggtgaagggcatcttcggcttcacagacagcgactgcatcggcaagatctccttccctgccatccaggccgcccccagcttcagcaacagcttcccccagatcttccgggacagaacagacatccagtgcctgatcccctgtgccatcgaccaggacccctacttcaggatgaccagagatgtggcccccagaattggctaccccaagccagccctgctgcacagcaccttcttccctgccctgcagggcgcccagaccaagatgtctgccagtgaccccaacagcagcatcttcctgacagacacagccaagcagatcaagaccaaggtgaacaagcacgccttcagcggcggccgggacaccatcgaggagcaccggcagtttggaggcaactgtgatgtggatgtgtccttcatgtacctgaccttcttcctggaggatgatgacaagctggagcagatcaggaaggactacaccagcggggccatgctgactggagagctgaagaaggccctgattgaggtgctgcagcccctgattgctgagcaccaggcccggaggaaggaggtgacagatgagatcgtgaaggagttcatgacccccaggaagctgagctttgacttccagtag

SEQ ID NO: 293413 - DNA, 324 bp, Artificial Sequence
  derived and/or modified sequence
atgcccaacagcgagcccgccagcctgctggagctgttcaacagcatcgccacccagggcgagctggtgcgcagcctgaaggctggaaatgccagcaaggatgaaattgacagcgctgtgaagatgctggtgtccctgaagatgagctacaaggctgctgctggggaggactacaaggctgactgccccccaggcaacccagcccccaccagcaaccacggcccagatgccacagaggccgaggaggactttgtggacccctggacagtgcagaccagcagcgccaagggcatcgactatgacaagctgattgtgcgcttctag

SEQ ID NO: 293414 - DNA, 453 bp, Artificial Sequence
  derived and/or modified sequence
atgcccaacagcgagcccgccagcctgctggagctgttcaacagcatcgccacccagggcgagctggtgcgcagcctgaaggctggaaatgccagcaaggatgaaattgacagcgctgtgaagatgctggtgtccctgaagatgagctacaaggctgctgctggggaggactacaaggctgactgccccccaggcaacccagcccccaccagcaaccacggcccagatgccacagaggccgaggaggactttgtggacccctggacagtgcagaccagcagcgccaagggcatcgactatgacaagctgattgtgcgcttcggcagcagcaagattgacaaggagctgatcaaccgcatcgagcgggccaccggccagaggccccaccacttcctgcggcggggcatcttcttcagccaccgggacatgaaccaggtgctggatgcctactag

SEQ ID NO: 293415 - DNA, 294 bp, Artificial Sequence
  derived and/or modified sequence
atgcccaacagcgagcccgccagcctgctggagctgttcaacagcatcgccacccagggcgagctggtgcgcagcctgaaggctggaaatgccagcaaggatgaaattgacagcgctgtgaagatgctggtgtccctgaagatgagctacaaggctgctgctggggaggactacaaggctgactgccccccaggcaacccagcccccaccagcaaccacggcccagatgccacagaggccgaggaggactttgtggacccctggacagtgcagaccagcagcgccaagggctag

SEQ ID NO: 293416 - DNA, 81 bp, Artificial Sequence
  derived and/or modified sequence
atgcccaacagcgagcccgccagcctgctggagctgttcaacagcatcgccacccagggcgagctggtgcgcagcctgtag

SEQ ID NO: 293417 - DNA, 318 bp, Artificial Sequence
  derived and/or modified sequence
atgcccaacagcgagcccgccagcctgctggagctgttcaacagcatcgccacccagggcgagctggtgcgcagcctgaaggctggaaatgccagcaaggatgaaattgacagcgctgtgaagatgctggtgtccctgaagatgagctacaaggctgctgctggggaggactacaaggctgactgccccccaggcaacccagcccccaccagcaaccacggcccagatgccacagaggccgaggaggactttgtggacccctggacagtgcagaccagcagcgccaagggcatcgactatgacaagctgattgtgtag

SEQ ID NO: 293418 - DNA, 102 bp, Artificial Sequence
  derived and/or modified sequence
atgcccaacagcgagcccgccagcctgctggagctgttcaacagcatcgccacccagggcgagctggtgcgcagcctgaaggctggaaatgccagcaagtag

SEQ ID NO: 293419 - DNA, 207 bp, Artificial Sequence
  derived and/or modified sequence
atgcccaacagcgagcccgccagcctgctggagctgttcaacagcatcgccacccagggcgagctggtgcgcagcctgaaggctggaaatgccagcaaggatgaaattgacagcgctgtgaagatgctggtgtccctgaagatgagctacaaggctgctgctggggaggactacaaggctgactgccccccaggcaacccagcctag

SEQ ID NO: 293420 - DNA, 375 bp, Artificial Sequence
  derived and/or modified sequence
atgcccaacagcgagcccgccagcctgctggagctgttcaacagcatcgccacccagggcgagctggtgcgcagcctgaaggctggaaatgccagcaaggatgaaattgacagcgctgtgaagatgctggtgtccctgaagatgagctacaaggctgctgctggggaggactacaaggctgactgccccccaggcaacccagcccccaccagcaaccacggcccagatgccacagaggccgaggaggactttgtggacccctggacagtgcagaccagcagcgccaagggcatcgactatgacaagctgattgtgcgcttcggcagcagcaagattgacaaggagctgatcaaccgcatcgagcgggccacctag

SEQ ID NO: 293421 - DNA, 261 bp, Artificial Sequence
  derived and/or modified sequence
atgcccaacagcgagcccgccagcctgctggagctgttcaacagcatcgccacccagggcgagctggtgcgcagcctgaaggctggaaatgccagcaaggatgaaattgacagcgctgtgaagatgctggtgtccctgaagatgagctacaaggctgctgctggggaggactacaaggctgactgccccccaggcaacccagcccccaccagcaaccacggcccagatgccacagaggccgaggaggactttgtggactag

SEQ ID NO: 293422 - DNA, 168 bp, Artificial Sequence
  derived and/or modified sequence
atgcccaacagcgagcccgccagcctgctggagctgttcaacagcatcgccacccagggcgagctggtgcgcagcctgaaggctggaaatgccagcaaggatgaaattgacagcgctgtgaagatgctggtgtccctgaagatgagctacaaggctgctgctggatag

SEQ ID NO: 293423 - DNA, 192 bp, Artificial Sequence
  derived and/or modified sequence
atgcccaacagcgagcccgccagcctgctggagctgttcaacagcatcgccacccagggcgagctggtgcgcagcctgaaggctggaaatgccagcaaggatgaaattgacagcgctgtgaagatgctggtgtccctgaagatgagctacaaggctgctgctggggaggactacaaggctgactgcccctag

SEQ ID NO: 293424 - DNA, 213 bp, Artificial Sequence
  derived and/or modified sequence
atgcccaacagcgagcccgccagcctgctggagctgttcaacagcatcgccacccagggcgagctggtgcgcagcctgaaggctggaaatgccagcaaggatgaaattgacagcgctgtgaagatgctggtgtccctgaagatgagctacaaggctgctgctggggaggactacaaggctgactgccccccaggcaacccagcccccacctag

SEQ ID NO: 293425 - DNA, 177 bp, Artificial Sequence
  derived and/or modified sequence
atgcccaacagcgagcccgccagcctgctggagctgttcaacagcatcgccacccagggcgagctggtgcgcagcctgaaggctggaaatgccagcaaggatgaaattgacagcgctgtgaagatgctggtgtccctgaagatgagctacaaggctgctgctggggaggactactag

SEQ ID NO: 293426 - DNA, 345 bp, Artificial Sequence
  derived and/or modified sequence
atgcccaacagcgagcccgccagcctgctggagctgttcaacagcatcgccacccagggcgagctggtgcgcagcctgaaggctggaaatgccagcaaggatgaaattgacagcgctgtgaagatgctggtgtccctgaagatgagctacaaggctgctgctggggaggactacaaggctgactgccccccaggcaacccagcccccaccagcaaccacggcccagatgccacagaggccgaggaggactttgtggacccctggacagtgcagaccagcagcgccaagggcatcgactatgacaagctgattgtgcgcttcggcagcagcaagattgacaagtag

SEQ ID NO: 293427 - DNA, 459 bp, Artificial Sequence
  derived and/or modified sequence
atgcccaacagcgagcccgccagcctgctggagctgttcaacagcatcgccacccagggcgagctggtgcgcagcctgaaggctggaaatgccagcaaggatgaaattgacagcgctgtgaagatgctggtgtccctgaagatgagctacaaggctgctgctggggaggactacaaggctgactgccccccaggcaacccagcccccaccagcaaccacggcccagatgccacagaggccgaggaggactttgtggacccctggacagtgcagaccagcagcgccaagggcatcgactatgacaagctgattgtgcgcttcggcagcagcaagattgacaaggagctgatcaaccgcatcgagcgggccaccggccagaggccccaccacttcctgcggcggggcatcttcttcagccaccgggacatgaaccaggtgctggatgcctatgaaaattag

SEQ ID NO: 293428 - DNA, 639 bp, Artificial Sequence
  derived and/or modified sequence
atgcccaacagcgagcccgccagcctgctggagctgttcaacagcatcgccacccagggcgagctggtgcgcagcctgaaggctggaaatgccagcaaggatgaaattgacagcgctgtgaagatgctggtgtccctgaagatgagctacaaggctgctgctggggaggactacaaggctgactgccccccaggcaacccagcccccaccagcaaccacggcccagatgccacagaggccgaggaggactttgtggacccctggacagtgcagaccagcagcgccaagggcatcgactatgacaagctgattgtgcgcttcggcagcagcaagattgacaaggagctgatcaaccgcatcgagcgggccaccggccagaggccccaccacttcctgcggcggggcatcttcttcagccaccgggacatgaaccaggtgctggatgcctatgagaacaagaagcccttctacctgtacacaggccggggccccagcagcgaggccatgcacgtgggccacctgatccccttcatcttcaccaagtggctgcaggatgtgttcaacgtgcccctggtgatccagatgacagatgatgagaagtacctgtggaaggacctgaccctggaccaggcctactag

SEQ ID NO: 293429 - DNA, 1416 bp, Artificial Sequence
  derived and/or modified sequence
atgcccaacagcgagcccgccagcctgctggagctgttcaacagcatagccactcagggagagttggtaagaagtctcaaggctggcaatgccagcaaggacgagattgactccgcggtaaagatgctggtgtctttgaagatgagttataaggcagcagccggagaggactacaaggcagattgtcccccaggcaacccggctcctacgtccaaccacggtccagacgctactgaggcagaagaggactttgtggacccctggactgtacagacctcctccgctaagggtattgattacgacaaactcattgtacgctttgggtcttcaaaaatcgataaggagctgattaacagaattgaacgtgccactggacaacgaccacaccactttttgcgaagggggatcttcttctctcacagggacatgaaccaggtgttagatgcatacgagaataaaaagccattctacctgtatactgggagaggtcccagctccgaagcaatgcacgtgggacacctgattcctttcatctttacaaaatggcttcaggatgtgtttaatgttccacttgtgatacagatgacggacgacgagaagtatctatggaaggatctgactctcgatcaggcttattcctacgcggtggagaatgccaaggatatcatagcctgcggctttgacatcaacaagacattcatctttagtgacctcgattacatggggatgtcctcaggtttctataagaacgttgtaaaaatccagaaacacgtcacgttcaatcaggttaaaggtatatttggctttacggattcagattgcattgggaaaatctctttcccagccattcaggcggctcccagcttctctaacagctttccacagattttcagagacaggaccgacatccaatgtctgataccctgcgcaatcgatcaagacccatactttcgaatgaccagagacgtcgctccccgcataggctatccaaagcccgccctactgcactccacctttttcccggccttacaaggcgctcagacgaaaatgagtgcttctgacccaaatagctccattttcctcaccgatacagcaaagcagattaagacaaaggtgaataagcatgctttctccggcgggagagacacaattgaagaacatagacagttcggaggtaactgcgacgtcgacgtgagcttcatgtatttgacttttttcctcgaagacgatgacaagctggaacagattcgaaaggattacactagtggtgcgatgctgacaggagagctaaagaaggcactcatagaagttctccagcccctaatcgccgagcaccaagctagacggaaggaagtgacagatgagattgtgaaggagtttatgacaccgcgcaaactatcctttgacttccagtag

SEQ ID NO: 293430 - DNA, 1416 bp, Artificial Sequence
  derived and/or modified sequence
atgcccaacagcgagcccgccagcctgctggagctgttcaacagcattgctacacagggggagctggttagaagcctgaaagctgggaacgccagtaaggatgagatagacagtgccgtcaagatgctagtttccctcaaaatgtcctataaagctgccgcgggcgaggactataaagcggattgccctcccggaaatcctgccccaacaagcaaccacggcccagacgctactgaggccgaggaagacttcgttgacccttggacggtacagactagttcggctaagggaatcgattacgacaaactcatcgtgcggtttgggagcagcaagattgacaaggaactcatcaatcggatcgagcgagccactggccagcgaccgcaccatttcctgcggcgaggcatcttcttctctcacagggacatgaatcaagtcttggacgcttatgagaacaaaaaacctttctatctgtacacaggccgcggaccgagctccgaggctatgcatgtgggccaccttatacccttcatcttcactaagtggctgcaggatgtcttcaacgtgcccctcgtcattcaaatgactgatgatgagaagtacctctggaaggatctgacacttgaccaagcctattcttatgcagtggaaaatgccaaagatatcatagcatgtggcttcgatataaacaagacttttattttcagtgacctggattatatgggcatgtcatccggcttttataagaacgtcgtgaaaatacagaagcacgtgacctttaaccaggtgaaggggatatttggctttaccgattccgattgcattggcaagatttcattcccagctattcaggctgctccttccttttccaacagtttccctcagatcttccgagaccggactgacatccagtgtctgattccttgcgctattgatcaggacccatattttagaatgacaagggatgttgcccctcgaataggttatccgaagcccgcgcttctgcactctacgtttttccctgccctgcagggagctcagaccaagatgagtgcgtccgatcccaattcttcgatcttcttgacggatacagctaagcaaatcaaaactaaggtcaacaagcacgccttttccgggggccgcgacacaatcgaggagcatagacaatttggaggcaactgtgacgtggacgtatcgtttatgtacctgacattttttcttgaggatgacgacaagctggagcagatccggaaagattacacaagcggagcaatgctgactggcgaattaaagaaggccctgattgaggttctccaacctttgatagctgagcaccaagctagaaggaaggaggtcaccgacgagatcgttaaggagtttatgacgcctagaaaactttcattcgatttccaatag

SEQ ID NO: 293431 - DNA, 324 bp, Artificial Sequence
  derived and/or modified sequence
atgcccaacagcgagcccgccagcctgctggagctgttcaacagcattgccacacaaggcgagctagtgcgatcactgaaggcgggaaatgcatcaaaagacgagattgactcagctgttaagatgctggtgtcgcttaagatgtcatataaggccgcggcaggcgaagactataaggccgactgcccacctggaaatcccgccccaacatctaatcatggtcctgacgcaacggaagctgaagaggactttgtcgacccatggaccgtgcaaactagctctgccaagggcatcgattacgataagctgatagttaggttttag

SEQ ID NO: 293432 - DNA, 453 bp, Artificial Sequence
  derived and/or modified sequence
atgcccaacagcgagcccgccagcctgctggagctgttcaacagcattgccactcagggggaactggttcgctcactgaaggcgggcaatgccagtaaggacgaaatagatagcgcggtcaagatgttggtgtccctcaagatgagttacaaggctgccgctggcgaggattacaaggccgactgcccccctggcaacccagcgcccacttcgaaccatggccccgatgccactgaagctgaagaagactttgttgacccatggacggtgcaaaccagtagtgccaaggggatcgactatgacaagctgattgtccgctttggaagttccaaaattgacaaggaactcattaaccgtatcgagcgcgctactgggcagaggccacaccattttctccggagaggaattttttttagccatcgcgatatgaatcaggtgctggacgcctactag

SEQ ID NO: 293433 - DNA, 294 bp, Artificial Sequence
  derived and/or modified sequence
atgcccaacagcgagcccgccagcctgctggagctgttcaacagcatcgcaacacagggtgaattggttaggagcctcaaagcagggaacgcttccaaagatgagatcgattccgccgtaaaaatgctcgtcagcctcaagatgagctacaaggctgcagccggagaagattacaaggctgattgccctccaggtaaccccgccccgacctccaatcacggaccagacgccaccgaggcagaggaggacttcgtcgacccatggacagtacagacatcctctgctaagggctag

SEQ ID NO: 293434 - DNA, 81 bp, Artificial Sequence
  derived and/or modified sequence
atgcccaacagcgagcccgccagcctgctggagctgttcaacagcattgccacccaaggtgagctcgtgcgctccctctag

SEQ ID NO: 293435 - DNA, 318 bp, Artificial Sequence
  derived and/or modified sequence
atgcccaacagcgagcccgccagcctgctggagctgttcaacagcatcgcgactcagggtgaactcgtacgctccttaaaagcagggaacgcatcaaaggacgaaattgattccgctgtcaaaatgttggtgagcctaaaaatgtcgtataaggcagccgccggagaggactataaagctgattgcccccctggcaaccccgcgccaacctccaatcacggccctgacgccacagaggctgaagaagacttcgtcgatccatggaccgtccagacgtcctccgccaaggggatcgactatgataaactcattgtctag

SEQ ID NO: 293436 - DNA, 102 bp, Artificial Sequence
  derived and/or modified sequence
atgcccaacagcgagcccgccagcctgctggagctgttcaacagcatcgcaacccagggggagctggtgaggagcctgaaggctggaaacgcgagtaagtag

SEQ ID NO: 293437 - DNA, 207 bp, Artificial Sequence
  derived and/or modified sequence
atgcccaacagcgagcccgccagcctgctggagctgttcaacagcattgccacccagggggaactcgtgcgatccctgaaggcgggcaatgcatccaaggatgagattgattcagcggttaagatgctggtgagcctgaagatgtcatacaaggctgctgcaggtgaggattacaaagccgactgcccgcctggaaaccccgcatag

SEQ ID NO: 293438 - DNA, 375 bp, Artificial Sequence
  derived and/or modified sequence
atgcccaacagcgagcccgccagcctgctggagctgttcaacagcatcgcgactcaaggcgagttggtgaggtcactgaaagccggcaatgcctccaaggatgaaatcgattccgctgtcaaaatgctggtaagtcttaaaatgtcttataaagcagcggccggtgaagactataaggcagattgccccccaggcaatccggccccaacctctaaccatggtcccgatgcaacggaagcggaagaggactttgttgatccgtggacagtccaaacgtccagcgctaagggaatcgattatgataagttgattgtaagattcggttccagcaagatagacaaagagctaatcaaccggatcgagagagccacatag

SEQ ID NO: 293439 - DNA, 261 bp, Artificial Sequence
  derived and/or modified sequence
atgcccaacagcgagcccgccagcctgctggagctgttcaacagcatcgccacgcagggagagctagtgcgcagtctcaaggccggcaacgcgagcaaggacgagatcgatagcgcggtgaaaatgctggtttctctcaagatgagttataaggccgccgccggggaggactataaagcagactgtccccccgggaatccggcccccacctctaatcacggcccagatgctacggaggccgaggaggacttcgtggattag

SEQ ID NO: 293440 - DNA, 168 bp, Artificial Sequence
  derived and/or modified sequence
atgcccaacagcgagcccgccagcctgctggagctgttcaacagcattgctacccagggggagctggtgcgatccctcaaggccggcaatgctagcaaggatgaaatagatagcgccgtgaaaatgctggtgtcgctaaaaatgtcctataaggccgccgcaggctag

SEQ ID NO: 293441 - DNA, 192 bp, Artificial Sequence
  derived and/or modified sequence
atgcccaacagcgagcccgccagcctgctggagctgttcaacagcattgccacccagggcgagttagtgcgatccctgaaagcgggtaacgcaagcaaggacgagattgatagtgccgtaaagatgctagtttcgctaaagatgagctacaaagctgcagccggagaagactacaaggcggactgtccctag

SEQ ID NO: 293442 - DNA, 213 bp, Artificial Sequence
  derived and/or modified sequence
atgcccaacagcgagcccgccagcctgctggagctgttcaacagcatcgccacacagggggaactggtcagaagcctgaaggctggaaatgccagcaaggatgagattgactcagcagtgaaaatgttggtaagcctgaagatgtcctataaagccgccgccggagaagattacaaggctgactgtccacctggaaatcctgcacctacgtag

SEQ ID NO: 293443 - DNA, 177 bp, Artificial Sequence
  derived and/or modified sequence
atgcccaacagcgagcccgccagcctgctggagctgttcaacagcatcgctacccagggagagctggtgcggtcactgaaggctggaaacgcctctaaggacgaaattgacagcgccgtgaagatgcttgtctctctgaagatgagctataaggcagccgctggggaggattactag

SEQ ID NO: 293444 - DNA, 345 bp, Artificial Sequence
  derived and/or modified sequence
atgcccaacagcgagcccgccagcctgctggagctgttcaacagcattgccacacaaggagagctggttcggtcactcaaagccggaaatgcatctaaagacgaaattgattccgcggttaaaatgttggtgtctttgaagatgagctataaagccgcagcaggcgaggattataaagctgattgccccccgggcaaccctgctcctacgtctaatcacgggcccgacgccacggaggcggaggaggactttgtggatccatggaccgtccaaaccagcagtgctaagggcatcgactacgacaagctgatcgtgcgctttggctcctccaagattgacaagtag

SEQ ID NO: 293445 - DNA, 177 bp, Artificial Sequence
  derived and/or modified sequence
atgcccaacagcgagcccgccagcctgctggagctgttcaacagcatcgcaacccagggagagttagtaagatcccttaaagcagggaacgctagcaaggacgaaatagattccgcagtgaagatgttagtgtcactaaaaatgtcttataaggccgccgctggcgaagattactag

SEQ ID NO: 293446 - DNA, 459 bp, Artificial Sequence
  derived and/or modified sequence
atgcccaacagcgagcccgccagcctgctggagctgttcaacagcatagcgactcaaggtgaactagttagatccctgaaggctggtaatgcatccaaagacgaaatcgactctgccgtaaagatgcttgtgtcactgaagatgagttacaaagccgccgcaggtgaagactacaaggcggattgtccaccggggaatcctgctcccacttccaatcacgggcctgatgctacagaagcagaggaggacttcgtggacccatggaccgtacagacctcttcagcaaaggggatcgactacgataagttgattgtccggtttggttccagcaagattgacaaggagctgattaatagaattgagcgcgccacagggcagagaccccatcatttccttcgtcgggggatctttttctctcatcgggatatgaatcaggtcttggatgcttacgaaaattag

SEQ ID NO: 293447 - DNA, 1416 bp, Artificial Sequence
  derived and/or modified sequence
atgcccaacagcgagcccgccagcctgctggagctgttcaacagcatcgccacccaaggggagcttgtcaggagcctcaaagcaggaaacgcaagcaaagacgaaattgactccgccgtaaaaatgctggtgtccctcaagatgtcatacaaggccgctgccggcgaagactataaggctgactgccctcccggtaaccccgccccaacttccaatcacggcccggacgccactgaggccgaggaggattttgttgacccttggaccgttcagacctcgagcgctaaaggaatcgattacgataaactaatagtgcgctttggttcatcaaaaattgacaaggaactgattaatcgaatagaaagggccacaggacagaggccacatcactttctgcgtagaggaatctttttttctcatcgggatatgaaccaggtgctcgacgcatatgaaaataagaagcccttttatctctacacaggccgcgggccgtctagcgaggctatgcatgtgggccacttgatccctttcatctttaccaagtggcttcaagacgtctttaatgtccctcttgtgattcagatgaccgatgacgaaaagtatctttggaaggatctgaccctggatcaggcctatagttatgcagtcgagaacgcaaaggatatcattgcttgcggctttgacataaacaagacttttatcttcagcgatctcgactacatgggcatgagctctggattttacaaaaatgtagttaagatccaaaaacacgtgaccttcaatcaggtaaagggtattttcgggttcacagactcagattgtatcggtaagatcagcttcccagccattcaggccgcgcctagcttctctaactcctttccacagatattcagagatagaaccgatattcagtgcctgatcccatgcgccatcgatcaagacccttatttcaggatgacccgggatgtggcccccagaatcggttacccaaagccagctctgctgcacagcacattttttccggctctgcagggggcacaaactaaaatgagcgctagcgaccctaattcatcgatcttccttactgatacagctaagcaaattaaaactaaggtaaacaaacatgctttctccggtggtcgagacacaattgaagagcatcgtcagtttggaggaaattgcgatgtggatgtttctttcatgtacctcaccttctttctggaggacgatgataaactggagcagatcagaaaggattacacctctggagcaatgttgacaggcgaactgaagaaagctcttatcgaggtgctccagccacttatcgcagagcatcaagccaggcggaaagaggtgacagacgagatcgtgaaagagttcatgacaccccgaaagctatccttcgattttcagtag

SEQ ID NO: 293448 - DNA, 639 bp, Artificial Sequence
  derived and/or modified sequence
atgcccaacagcgagcccgccagcctgctggagctgttcaacagcatcgccacccagggcgaactggtgagaagtttgaaggccggaaatgcatcgaaggatgagatcgactcagctgttaagatgctggttagtctcaagatgagctacaaggccgcagcaggggaggactacaaggcggactgccccccgggaaatccggctccaacgagtaaccacggccccgatgccactgaggctgaggaggactttgtcgatccttggacagtgcaaacctcgagcgccaagggaatcgattatgacaagctgatcgtccggttcggatcatcgaagatcgataaagaactgataaatcgaattgagcgcgccactgggcagagaccccatcattttttaagaagggggatattcttttctcatagggacatgaaccaagtcttggacgcatacgaaaacaaaaaaccgttttacctgtatacagggcgcgggcccagttccgaggccatgcatgttggacatctgatccccttcatctttaccaagtggttgcaggacgtgttcaatgtacctcttgtgatacagatgactgatgacgaaaaatatctttggaaggacctgacactggaccaggcctattag

SEQ ID NO: 293449 - DNA, 1416 bp, Artificial Sequence
  derived and/or modified sequence
atgcccaactcggagccggcatccctgttagagctctttaacagcattgccacccagggggagctagtgcggagtcttaaggcaggcaacgccagcaaagatgagatcgatagtgctgtgaagatgcttgtgtcccttaaaatgagttacaaggccgctgccggtgaggattataaggccgactgccccccaggaaacccagcgcctaccagcaatcatgggccagacgcaactgaggctgaggaggattttgttgacccttggacagttcaaacgagctccgcgaaaggtatcgactacgataagttgattgtgcgtttcgggagttccaaaattgataaggaattgatcaataggattgagcgcgcaacagggcaacggcctcaccactttctgcggagagggatctttttttcccacagggatatgaaccaggttctggatgcctacgagaataaaaagcccttctacctctacacaggtaggggaccctcctctgaggccatgcacgtgggacacctgattcccttcatctttaccaagtggctccaggatgtgtttaacgtgcctctggtcattcagatgactgacgacgaaaagtatttatggaaagaccttactctagaccaggcctacagctacgctgtggagaatgcaaaagacataattgcttgtgggtttgatattaataagacatttatcttctcagacctggattatatggggatgtccagcggattttacaagaacgtggttaagattcagaagcatgttacattcaatcaggttaaagggattttcggatttacggatagtgattgtataggaaagatatccttccccgcaatccaggccgctccaagtttctcaaattcatttccacaaatctttcgtgatcgcacagacatccagtgtctgatcccttgcgctatcgatcaagatccttatttccgaatgactcgagacgtcgcccctaggattggttaccccaaacctgcactcctgcactcaacctttttcccagctctgcaaggggcacagaccaagatgtctgcatcagatccaaatagctccatctttctcacagataccgccaaacagattaaaaccaaagtgaacaaacacgcctttagcggcggaagagacacaattgaagagcaccggcaatttggaggtaactgtgacgtagatgtctcattcatgtatctaaccttttttctggaagatgacgataagctggaacagattcgtaaggattacacctcaggcgcaatgctgactggggagttaaagaaagcactgatagaagtgttgcagcctttgatcgcagaacaccaggctcgacgaaaggaagtcacagatgaaatcgtcaaggagttcatgactccccgaaaactgagctttgactttcagtag

SEQ ID NO: 293450 - DNA, 1416 bp, Artificial Sequence
  derived and/or modified sequence
atgcccaacagtgaaccagcatctctcctggaactatttaatagcatcgctacgcagggagaactggtcagatccttgaaagctggaaacgcttcaaaggatgaaatcgattccgctgttaaaatgctggtcagtttgaaaatgtcttacaaggcagcagcaggcgaggattacaaagctgactgtccacccggaaatccagccccaacttcaaatcacggaccagatgctacagaggcagaggaagacttcgtcgacccgtggaccgtgcagactagctctgcaaaagggatcgactacgacaaacttatcgtgcggtttggaagctctaagatcgataaagaacttattaatcggatcgagagagctaccgggcagcgtccccaccactttctacggaggggaatcttcttctcccatcgggatatgaatcaagttctggatgcctatgaaaataaaaagcctttttacctgtacacgggcaggggccctagttccgaggcgatgcacgtcggccatttgattccctttattttcactaagtggcttcaagacgtgttcaatgtgccactagttatccagatgaccgacgacgagaagtatttgtggaaggatcttactcttgaccaggcctattcctacgcggtcgagaatgccaaagacatcattgcttgcggcttcgacatcaacaaaacatttatctttagcgacctggattatatgggtatgtcctcaggattttataagaatgtggtgaagatccaaaaacacgtgacattcaaccaggtcaaggggatctttgggtttactgactctgattgtatcggaaagatttcttttccagctatccaggccgctccatcttttagtaatagctttcctcagatctttcgggatcgcaccgacattcagtgtctgatcccgtgcgcgatcgaccaggatccatatttccgcatgacccgggacgtcgctcctcgtatcggataccccaagcctgctttgttacactctactttttttcccgctcttcagggggcacagaccaagatgtcggcaagcgacccaaactcaagtatcttcctgacggacacagccaaacaaatcaagactaaggtgaacaagcacgccttctccggaggcagggatacgatcgaagagcaccgccagttcggaggcaactgcgacgtggacgtgtctttcatgtacctaacatttttcttggaagacgacgacaaattggaacaaatccggaaggattacactagcggagcaatgctgactggagagctcaaaaaagccttgatcgaggtcctacagccactgatcgcggagcaccaggcgagacgcaaggaggtgacagacgagatcgttaaagaattcatgacccccagaaaattgagctttgattttcagtag

SEQ ID NO: 293451 - DNA, 324 bp, Artificial Sequence
  derived and/or modified sequence
atgccaaacagcgagccggcaagtctcctggaactttttaactccatcgctacccaaggggaactagtgcggtccctcaaagcaggaaatgcttcaaaggatgaaatcgattccgcagtgaagatgctggtgagcctgaagatgtcctataaggcggcagcaggagaagattacaaggctgactgtccgccagggaatccagcaccaacttccaatcatggcccagatgctacggaggcagaagaagattttgtggatccttggacagtccagacttccagtgcaaaaggaatagactatgacaagcttatcgtgcgcttctag

SEQ ID NO: 293452 - DNA, 453 bp, Artificial Sequence
  derived and/or modified sequence
atgcctaacagcgaacctgcctccttacttgaactgtttaatagtattgctacacagggcgagctggtccgctcccttaaagcagggaacgcgtcaaaagacgagattgacagtgctgtaaagatgctagtgtctttgaagatgagctacaaggccgctgccggagaggactataaggcagattgccctccaggtaaccccgcaccaaccagtaatcacggtccggatgcaaccgaagccgaagaggattttgtggatccttggactgtccaaacgagcagcgccaaaggaattgattacgacaagctcatcgttagattcggtagctccaagatagataaggagttgataaatcggattgagagagcaacgggccagcgtccccatcactttctccgcaggggaatctttttcagtcacagggatatgaatcaagtgttggacgcctactag

SEQ ID NO: 293453 - DNA, 294 bp, Artificial Sequence
  derived and/or modified sequence
atgcccaacagtgagcccgcatcactcctggagctcttcaattcaatagcaacacagggagagctcgtacgctcactgaaagctggtaacgccagcaaggacgagatcgatagtgccgtgaagatgctcgtgtccttgaagatgagctataaggctgcagcaggagaggattacaaagcagattgcccgccaggaaacccagccccaacctctaaccatggccctgacgctaccgaggctgaggaggactttgtcgacccatggacagtccagacttcgtctgctaaagggtag

SEQ ID NO: 293454 - DNA, 81 bp, Artificial Sequence
  derived and/or modified sequence
atgcctaactctgaaccagctagcctgctggagttattcaattccattgccacccagggcgaacttgtgcggtccctgtag

SEQ ID NO: 293455 - DNA, 318 bp, Artificial Sequence
  derived and/or modified sequence
atgccaaattcagaacctgcatccttactggagctgtttaactcaattgcaacacaaggagagctcgtgcgctcactgaaagcaggcaacgcaagtaaagacgagattgattcagccgtgaagatgctggtgtccctcaagatgtcatataaggccgctgcaggagaggattacaaggcagattgccctcccggaaaccccgcaccaacgagcaaccacggaccagatgccaccgaagcagaagaagacttcgttgacccctggacggtgcagacatctagcgctaaaggtatcgattatgacaagttgattgtttag

SEQ ID NO: 293456 - DNA, 102 bp, Artificial Sequence
  derived and/or modified sequence
atgcctaatagtgaaccagcgtcattgcttgaactattcaattccatcgctacacagggcgaattggtgcgcagtcttaaggccggaaacgcctccaagtag

SEQ ID NO: 293457 - DNA, 207 bp, Artificial Sequence
  derived and/or modified sequence
atgcctaactcggaacctgcctctctcctcgagctgttcaacagcatcgccacacaaggggaactggtgcggagtctcaaggcgggtaatgcctccaaagatgagattgatagcgccgtgaagatgctggtcagcttgaaaatgtcctacaaggcagccgctggggaggactacaaggcagattgtcctcctggcaaccctgcttag

SEQ ID NO: 293458 - DNA, 375 bp, Artificial Sequence
  derived and/or modified sequence
atgcccaactccgaaccagctagtttgcttgaactgttcaactccatcgctacacagggagagctggtccgaagtcttaaagctggaaacgcctctaaagacgagatcgatagtgcagtgaaaatgctggtgtccctcaagatgagctataaagctgcggcaggagaagactataaggccgattgccctcctgggaatcccgcacccactagtaaccacggaccagacgcaacagaggccgaagaggattttgtggacccatggacagtacaaacgtcctctgcaaagggcatcgattacgataagctgatcgtgcggttcggaagtagcaagatcgacaaagaattgattaatcgcattgagcgggcaacatag

SEQ ID NO: 293459 - DNA, 261 bp, Artificial Sequence
  derived and/or modified sequence
atgccaaattccgaaccagcttctttgctagaactgttcaactctattgccacacaaggcgagctggtacgctcattgaaggcaggcaacgcgagtaaggatgaaatcgattctgcagtcaagatgctggttagcctgaagatgagctacaaggctgcagcaggggaggactacaaggctgattgtcccccaggcaaccctgctcctactagtaatcatggaccagacgccaccgaggcagaggaagattttgttgactag

SEQ ID NO: 293460 - DNA, 168 bp, Artificial Sequence
  derived and/or modified sequence
atgccaaattccgaacctgcttctctgctcgagctcttcaatagtattgctactcagggcgagctggtccgctcattgaaggcgggtaacgccagtaaagatgaaatagacagcgccgtgaagatgttggtgagcctaaaaatgagctacaaggccgctgccggatag

SEQ ID NO: 293461 - DNA, 192 bp, Artificial Sequence
  derived and/or modified sequence
atgccaaacagcgaaccagccagtcttctcgagctttttaatagtatcgccacacaaggtgagctcgtgaggtcactcaaggccggaaatgcgagcaaagatgagatagatagtgcggtgaagatgctcgtctctttaaaaatgtcatataaggcagccgctggagaggactataaagctgactgcccgtag

SEQ ID NO: 293462 - DNA, 213 bp, Artificial Sequence
  derived and/or modified sequence
atgccaaatagtgagccagccagcttgctcgaactgttcaacagcatcgctactcaaggagagctcgtcaggtcgctgaaggctgggaatgcctctaaggacgagattgactctgccgtgaaaatgctcgtctctcttaagatgagctataaagcagccgcaggcgaggactataaagcagactgcccccctggcaatccagccccaacctag

SEQ ID NO: 293463 - DNA, 177 bp, Artificial Sequence
  derived and/or modified sequence
atgccaaatagcgagcctgcctccctcctagagttgtttaatagcatagccactcagggcgagctggtacggagcctaaaagccggaaatgcgtccaaagatgaaatcgactctgccgtgaagatgctggtctccctgaaaatgtcctacaaagccgcagctggtgaggactactag

SEQ ID NO: 293464 - DNA, 345 bp, Artificial Sequence
  derived and/or modified sequence
atgcctaactcggagccagcctctctcctggaactgttcaattcgatagctacccagggcgaactggtacggagtctcaaggcgggtaacgctagtaaagatgaaattgactccgctgtcaaaatgttggtgtcgctcaagatgagctacaaggccgctgcaggagaagattacaaggcagattgcccaccgggaaacccagcccctacgagcaaccacgggccagacgcaactgaggccgaagaagattttgttgacccatggacggtacaaacatccagcgccaagggtattgactatgacaaactgattgtacggtttggctcatcgaagatagacaaatag

SEQ ID NO: 293465 - DNA, 177 bp, Artificial Sequence
  derived and/or modified sequence
atgcctaatagcgagccagcatccttactggaattgtttaattcaatcgccacccaaggcgagctggtgcggtccttgaaggccggaaatgcctccaaggacgaaatcgactctgctgtgaagatgctggtgtcactgaagatgtcttacaaggcagccgcaggagaagattactag

SEQ ID NO: 293466 - DNA, 459 bp, Artificial Sequence
  derived and/or modified sequence
atgccgaattccgaacccgcatctctgcttgagcttttcaactcaattgctacccaaggagaattggttcgctccctcaaagcaggaaacgcatctaaagacgagattgatagcgctgtgaagatgctggtgagcctgaaaatgtcctacaaagcggcagcgggagaagactataaggccgattgtccgccaggcaatccagccccaacctctaatcatgggccagacgccacagaggcggaggaggacttcgtcgatccttggaccgttcagacctcgtcagctaagggtattgactatgataagcttatcgtgcgcttcggatctagtaaaatagataaggaactcatcaatcggattgaacgagcaactggtcaacgtcctcatcatttcctccgacggggaatcttcttctcacacagggacatgaatcaggttctggacgcatatgagaattag

SEQ ID NO: 293467 - DNA, 1416 bp, Artificial Sequence
  derived and/or modified sequence
atgcctaatagcgagccagctagtctgttagagctgttcaattccattgcgacgcaaggggaactggtacgcagcctcaaggcaggtaatgccagcaaagatgaaattgattccgccgtgaagatgctcgtgtccctaaaaatgtcctataaggccgctgcaggcgaggactacaaagcagactgccctccagggaatccagccccaacatcaaaccacggacctgatgccacagaggccgaggaagattttgtcgatccctggacagtgcagacatctagcgccaagggaatcgactatgataaactgatcgtacgcttcgggtcctccaagattgacaaagagctgattaatcggatcgagagggcgaccgggcaaagaccccaccacttcttaagaagaggcatcttcttcagtcaccgcgacatgaaccaggtcctggacgcatatgagaataaaaagcccttctacttatacactggacgcggtccaagtagcgaagccatgcacgtaggacacctaatcccctttatctttactaagtggctccaggatgtgttcaacgttccactggttatccagatgaccgatgatgaaaagtacctttggaaggacttgaccttggaccaggcctatagctacgctgtcgagaatgccaaagacattatcgcctgcgggtttgatattaataaaacgtttattttctctgacctggattatatggggatgagctctggcttttacaaaaatgtggtcaagatccagaagcacgtgaccttcaatcaggttaagggcatctttgggttcactgactccgattgcattgggaaaatttctttccctgctatccaggccgctccctcgttctctaacagttttccgcaaatattccgggaccgaacagacatccagtgcctgatcccctgcgctatcgaccaggatccctattttcgtatgacccgtgacgtcgctcctcgcattggctacccaaaaccggcactccttcattccacctttttccccgcactgcagggagcgcaaactaaaatgtccgctagtgacccaaacagctctattttcctgactgacactgccaagcaaatcaaaacaaaggttaacaagcacgctttttcaggcggaagagacaccatcgaggagcacaggcaatttggtgggaattgtgacgtagatgtgtcctttatgtatcttaccttcttcctggaggatgacgataaactcgaacagatcaggaaagattatacgagtggcgctatgctcaccggagagctcaaaaaggctctcatcgaagttcttcaaccccttatcgctgagcatcaggctaggcggaaggaggtgaccgacgagattgtaaaggaatttatgactcccagaaaattgtctttcgacttccagtag

SEQ ID NO: 293468 - DNA, 639 bp, Artificial Sequence
  derived and/or modified sequence
atgcctaattccgagcccgcttctctgctggagctattcaattcgatcgctacgcagggagaattagtgaggtccctgaaggctgggaacgcaagtaaagatgaaatcgacagtgccgtaaaaatgctcgtgtctttgaagatgtcttacaaggcagctgcaggggaggattataaagctgattgccctccgggtaacccagcaccgactagtaatcatgggccagacgctactgaggccgaggaagacttcgttgacccatggacagtgcagaccagtagcgctaaaggaatcgactatgataaactcatagtgaggtttgggagtagcaagatcgacaaggagttaattaacagaatcgagcgtgctacgggacagaggccgcatcactttctgcggagaggcatctttttttcacatagagatatgaatcaagtcctcgatgcctacgagaacaagaaacccttctatctgtacacagggagggggccaagctccgaggccatgcatgtgggtcacttgattcctttcatcttcaccaagtggctgcaagatgtctttaacgtgccattggtgattcagatgaccgacgatgagaagtatctgtggaaggacctcaccctggatcaggcctattag

SEQ ID NO: 293469 - DNA, 2690 bp, Artificial Sequence
  derived and/or modified sequence
caatgaccagctaatggctcgattctcaagagggtttcattggtctcaacctggccccccaggcaacccacccctgattggacagtctcatcaagaaggttggtcaagagctcaagtgtttctgagaatctgggtgatttataagaaacccttagctgaatgcagggtggggagaacgaaagacaaaagcatcttttttcagaagggaaactgaaagaaagaggggaagagtattaaagaccatttctggctgggcagggcactctcagcagctcaactgcccagcgtgaccagtggccacctctgcagtgtcttccacaacctgggatgaaattgattctgcagtaaagatgttggtgtcattaaaaatgagctacaaagctgccgcgggggaggattacaaggctgactgtcctccagggaacccagcacctaccagtaatcatggcccagatgccacagaagctgaagaggattttgtggacccatggacagtacagacaagcagtgcaaaaggcatagactacgataagctcattgttcggtttggaagtagtaaaattgacaaagagctaataaaccgaatagagagagccaccggccaaagaccacaccacttcctgcgcagaggcatcttcttctcacacagagatatgaatcaggttcttgatgcctatgaaaataagaagccattttatctgtacacgggccggggcccctcttctgaagcaatgcatgtaggtcacctcattccatttattttcacaaagtggctccaggatgtatttaacgtgcccttggtcatccagatgacggatgacgagaagtatctgtggaaggacctgaccctggaccaggcctatagctatgctgtggagaatgccaaggacatcatcgcctgtggctttgacatcaacaagactttcatattctctgacctggactacatggggatgagctcaggtttctacaaaaatgtggtgaagattcaaaagcatgttaccttcaaccaagtgaaaggcattttcggcttcactgacagcgactgcattgggaagatcagttttcctgccatccaggctgctccctccttcagcaactcattcccacagatcttccgagacaggacggatatccagtgccttatcccatgtgccattgaccaggatccttactttagaatgacaagggacgtcgcccccaggatcggctatcctaaaccagccctgctgcactccaccttcttcccagccctgcagggcgcccagaccaaaatgagtgccagcgaccccaactcctccatcttcctcaccgacacggccaagcagatcaaaaccaaggtcaataagcatgcgttttctggagggagagacaccatcgaggagcacaggcagtttgggggcaactgtgatgtggacgtgtctttcatgtacctgaccttcttcctcgaggacgacgacaagctcgagcagatcaggaaggattacaccagcggagccatgctcaccggtgagctcaagaaggcactcatagaggttctgcagcccttgatcgcagagcaccaggcccggcgcaaggaggtcacggatgagatagtgaaagagttcatgactccccggaagctgtccttcgactttcagtagcactcgttttacatatgcttataaaagaagtgatgtatcagtaatgtatcaataatcccagcccagtcaaagcaccgccacctgtaggcttctgtctcatggtaattactgggcctggcctctgtaagcctgtgtatgttatcaatactgtttcttcctgtgagttccattatttctatctcttatgggcaaagcattgtgggtaattggtgctggctaacattgcatggtcggatagagaagtccagctgtgagtctctccccaaagcagccccacagtggagcctttggctggaagtccatgggccaccctgttcttgtccatggaggactccgagggttccaagtatactcttaagacccactctgtttaaaaatatatattctatgtatgcgtatatggaattgaaatgtcattattgtaacctagaaagtgctttgaaatattgatgtggggaggtttattgagcacaagatgtatttcagcccatgccccctcccaaaaagaaattgataagtaaaagcttcgttatacatttgactaagaaatcacccagctttaaagctgcttttaacaatgaagattgaacagagttcagcaattttgattaaattaagacttgggggtgaaactttccagtttactgaactccagaccatgcatgtagtccactccagaaatcatgctcgcttcccttggcacaccagtgttctcctgccaaatgaccctagaccctctgtcctgcagagtcagggtggcttttcccctgactgtgtccgatgccaaggagtcctggcctccgcagatgcttcattttgacccttggctgcagtggaagtcagcacagagcagtgccctggctgtgtccctggacgggtggacttagctagggagaaagtcgaggcagcagccctcgaggccctcacagatgtctaggcaggcctcatttcatcacgcagcatgtgcaggcctggaagagcaaagccaaatctcagggaagtccttggttgatgtatctgggtctcctctggagcactctgccctcc

SEQ ID NO: 293470 - DNA, 3092 bp, Artificial Sequence
  derived and/or modified sequence
tgtcaagccctatgctgggtctggtgtgggtggaaatcaaacacaaaacacagatccccccggaggccccagagcgatgaaagcaacaaacaagatacgaccagagatgggttttgaaggatgaataggagttagctgagctgtcaatagtaagaagtaaggttggtccaaggcacagcgctttctgaaggaacaggaagtgaaaggaaggcgagcggctatgagagaccgcgttaagcggcacggggcgctttaggcgctgcccagtcccggcccctccagcccggggcccgccgctcaccacacgcaccggaagcgctcggttctcccggaggcagaccggccagcacactaccatccagtcacgttccgacgcgacgccgcggccgccagccaatcagtggcggcctctgccccgcccccgcgcgaacagccaatgacggcgccgtcgggccggaagttgttccgtccggacggcgtttccacggacgcccaggagacagccggttgctgagccgggagcgctgactggcccggctgggcaggtcttgactcgtctgctgaacaaatcctctgacctcaggccggctgtgaacgtagttcctgagagatagcaaacatgcccaacagtgagcccgcatctctgctggagctgttcaacagcatcgccacacaaggggagctcgtaaggtccctcaaagcgggaaatgcgtcaaaggatgaaattgattctgcagtaaagatgttggtgtcattaaaaatgagctacaaagctgccgcgggggaggattacaaggctgactgtcctccagggaacccagcacctaccagtaatcatggcccagatgccacagaagctgaagaggattttgtggacccatggacagtacagacaagcagtgcaaaaggcatagactacgataagctcattgttcggtttggaagtagtaaaattgacaaagagctaataaaccgaatagagagagccaccggccaaagaccacaccacttcctgcgcagaggcatcttcttctcacacagagatatgaatcaggttcttgatgcctatgaaaataagaagccattttatctgtacacgggccggggcccctcttctgaagcaatgcatgtaggtcacctcattccatttattttcacaaagtggctccaggatgtatttaacgtgcccttggtcatccagatgacggatgacgagaagtatctgtggaaggacctgaccctggaccaggcctatagctatgctgtggagaatgccaaggacatcatcgcctgtggctttgacatcaacaagactttcatattctctgacctggactacatggggatgagctcaggtttctacaaaaatgtggtgaagattcaaaagcatgttaccttcaaccaagtgaaaggcattttcggcttcactgacagcgactgcattgggaagatcagttttcctgccatccaggctgctccctccttcagcaactcattcccacagatcttccgagacaggacggatatccagtgccttatcccatgtgccattgaccaggatccttactttagaatgacaagggacgtcgcccccaggatcggctatcctaaaccagccctgctgcactccaccttcttcccagccctgcagggcgcccagaccaaaatgagtgccagcgaccccaactcctccatcttcctcaccgacacggccaagcagatcaaaaccaaggtcaataagcatgcgttttctggagggagagacaccatcgaggagcacaggcagtttgggggcaactgtgatgtggacgtgtctttcatgtacctgaccttcttcctcgaggacgacgacaagctcgagcagatcaggaaggattacaccagcggagccatgctcaccggtgagctcaagaaggcactcatagaggttctgcagcccttgatcgcagagcaccaggcccggcgcaaggaggtcacggatgagatagtgaaagagttcatgactccccggaagctgtccttcgactttcagtagcactcgttttacatatgcttataaaagaagtgatgtatcagtaatgtatcaataatcccagcccagtcaaagcaccgccacctgtaggcttctgtctcatggtaattactgggcctggcctctgtaagcctgtgtatgttatcaatactgtttcttcctgtgagttccattatttctatctcttatgggcaaagcattgtgggtaattggtgctggctaacattgcatggtcggatagagaagtccagctgtgagtctctccccaaagcagccccacagtggagcctttggctggaagtccatgggccaccctgttcttgtccatggaggactccgagggttccaagtatactcttaagacccactctgtttaaaaatatatattctatgtatgcgtatatggaattgaaatgtcattattgtaacctagaaagtgctttgaaatattgatgtggggaggtttattgagcacaagatgtatttcagcccatgccccctcccaaaaagaaattgataagtaaaagcttcgttatacatttgactaagaaatcacccagctttaaagctgcttttaacaatgaagattgaacagagttcagcaattttgattaaattaagacttgggggtgaaactttccagtttactgaactccagaccatgcatgtagtccactccagaaatcatgctcgcttcccttggcacaccagtgttctcctgccaaatgaccctagaccctctgtcctgcagagtcagggtggcttttcccctgactgtgtccgatgccaaggagtcctggcctccgcagatgcttcattttgacccttggctgcagtggaagtcagcacagagcagtgccctggctgtgtccctggacgggtggacttagctagggagaaagtcgaggcagcagccctcgaggccctcacagatgtctaggcaggcctcatttcatcacgcagcatgtgcaggcctggaagagcaaagccaaatctcagggaagtccttggttgatgtatctgggtctcctctggagcactctgccctcctgtcacccag

SEQ ID NO: 293471 - DNA, 2466 bp, Artificial Sequence
  derived and/or modified sequence
cggacggcgtttccacggacgcccaggagacagccggttgctgagccgggagcgctgactggcccggctgggcagggatgaaattgattctgcagtaaagatgttggtgtcattaaaaatgagctacaaagctgccgcgggggaggattacaaggctgactgtcctccagggaacccagcacctaccagtaatcatggcccagatgccacagaagctgaagaggattttgtggacccatggacagtacagacaagcagtgcaaaaggcatagactacgataagctcattgttcggtttggaagtagtaaaattgacaaagagctaataaaccgaatagagagagccaccggccaaagaccacaccacttcctgcgcagaggcatcttcttctcacacagagatatgaatcaggttcttgatgcctatgaaaataagaagccattttatctgtacacgggccggggcccctcttctgaagcaatgcatgtaggtcacctcattccatttattttcacaaagtggctccaggatgtatttaacgtgcccttggtcatccagatgacggatgacgagaagtatctgtggaaggacctgaccctggaccaggcctatagctatgctgtggagaatgccaaggacatcatcgcctgtggctttgacatcaacaagactttcatattctctgacctggactacatggggatgagctcaggtttctacaaaaatgtggtgaagattcaaaagcatgttaccttcaaccaagtgaaaggcattttcggcttcactgacagcgactgcattgggaagatcagttttcctgccatccaggctgctccctccttcagcaactcattcccacagatcttccgagacaggacggatatccagtgccttatcccatgtgccattgaccaggatccttactttagaatgacaagggacgtcgcccccaggatcggctatcctaaaccagccctgctgcactccaccttcttcccagccctgcagggcgcccagaccaaaatgagtgccagcgaccccaactcctccatcttcctcaccgacacggccaagcagatcaaaaccaaggtcaataagcatgcgttttctggagggagagacaccatcgaggagcacaggcagtttgggggcaactgtgatgtggacgtgtctttcatgtacctgaccttcttcctcgaggacgacgacaagctcgagcagatcaggaaggattacaccagcggagccatgctcaccggtgagctcaagaaggcactcatagaggttctgcagcccttgatcgcagagcaccaggcccggcgcaaggaggtcacggatgagatagtgaaagagttcatgactccccggaagctgtccttcgactttcagtagcactcgttttacatatgcttataaaagaagtgatgtatcagtaatgtatcaataatcccagcccagtcaaagcaccgccacctgtaggcttctgtctcatggtaattactgggcctggcctctgtaagcctgtgtatgttatcaatactgtttcttcctgtgagttccattatttctatctcttatgggcaaagcattgtgggtaattggtgctggctaacattgcatggtcggatagagaagtccagctgtgagtctctccccaaagcagccccacagtggagcctttggctggaagtccatgggccaccctgttcttgtccatggaggactccgagggttccaagtatactcttaagacccactctgtttaaaaatatatattctatgtatgcgtatatggaattgaaatgtcattattgtaacctagaaagtgctttgaaatattgatgtggggaggtttattgagcacaagatgtatttcagcccatgccccctcccaaaaagaaattgataagtaaaagcttcgttatacatttgactaagaaatcacccagctttaaagctgcttttaacaatgaagattgaacagagttcagcaattttgattaaattaagacttgggggtgaaactttccagtttactgaactccagaccatgcatgtagtccactccagaaatcatgctcgcttcccttggcacaccagtgttctcctgccaaatgaccctagaccctctgtcctgcagagtcagggtggcttttcccctgactgtgtccgatgccaaggagtcctggcctccgcagatgcttcattttgacccttggctgcagtggaagtcagcacagagcagtgccctggctgtgtccctggacgggtggacttagctagggagaaagtcgaggcagcagccctcgaggccctcacagatgtctaggcaggcctcatttcatcacgcagcatgtgcaggcctggaagagcaaagccaaatctcagggaagtccttggttgatgtatctgggtctcctctggagcactctgccctcctgtcacccagtagagtaaataaactt

SEQ ID NO: 293472 - DNA, 2938 bp, Artificial Sequence
  derived and/or modified sequence
atttggaggccagcggggggtgaggggtggctgatgcaatgaccagctaatggctcgattctcaagagggtttcattggtctcaacctggccccccaggcaacccacccctgattggacagtctcatcaagaaggttggtcaagagctcaagtgtttctgagaatctgggtgatttataagaaacccttagctgaatgcagggtggggagaacgaaagacaaaagcatcttttttcagaagggaaactgaaagaaagaggggaagagtattaaagaccatttctggctgggcagggcactctcagcagctcaactgcccagcgtgaccagtggccacctctgcagtgtcttccacaacctggtcttgactcgtctgctgaacaaatcctctgacctcaggccggctgtgaacgtagttcctgagagatagcaaacatgcccaacagtgagcccgcatctctgctggagctgttcaacagcatcgccacacaaggggagctcgtaaggtccctcaaagcgggaaatgcgtcaaaggatgaaattgattctgcagtaaagatgttggtgtcattaaaaatgagctacaaagctgccgcgggggaggattacaaggctgactgtcctccagggaacccagcacctaccagtaatcatggcccagatgccacagaagctgaagaggattttgtggacccatggacagtacagacaagcagtgcaaaaggcatagactacgataagctcattgttcggtttggaagtagtaaaattgacaaagagctaataaaccgaatagagagagccaccggccaaagaccacaccacttcctgcgcagaggcatcttcttctcacacagagatatgaatcaggttcttgatgcctatgaaaataagaagccattttatctgtacacgggccggggcccctcttctgaagcaatgcatgtaggtcacctcattccatttattttcacaaagtggctccaggatgtatttaacgtgcccttggtcatccagatgacggatgacgagaagtatctgtggaaggacctgaccctggaccaggcctatagctatgctgtggagaatgccaaggacatcatcgcctgtggctttgacatcaacaagactttcatattctctgacctggactacatggggatgagctcaggtttctacaaaaatgtggtgaagattcaaaagcatgttaccttcaaccaagtgaaaggcattttcggcttcactgacagcgactgcattgggaagatcagttttcctgccatccaggctgctccctccttcagcaactcattcccacagatcttccgagacaggacggatatccagtgccttatcccatgtgccattgaccaggatccttactttagaatgacaagggacgtcgcccccaggatcggctatcctaaaccagccctgctgcactccaccttcttcccagccctgcagggcgcccagaccaaaatgagtgccagcgaccccaactcctccatcttcctcaccgacacggccaagcagatcaaaaccaaggtcaataagcatgcgttttctggagggagagacaccatcgaggagcacaggcagtttgggggcaactgtgatgtggacgtgtctttcatgtacctgaccttcttcctcgaggacgacgacaagctcgagcagatcaggaaggattacaccagcggagccatgctcaccggtgagctcaagaaggcactcatagaggttctgcagcccttgatcgcagagcaccaggcccggcgcaaggaggtcacggatgagatagtgaaagagttcatgactccccggaagctgtccttcgactttcagtagcactcgttttacatatgcttataaaagaagtgatgtatcagtaatgtatcaataatcccagcccagtcaaagcaccgccacctgtaggcttctgtctcatggtaattactgggcctggcctctgtaagcctgtgtatgttatcaatactgtttcttcctgtgagttccattatttctatctcttatgggcaaagcattgtgggtaattggtgctggctaacattgcatggtcggatagagaagtccagctgtgagtctctccccaaagcagccccacagtggagcctttggctggaagtccatgggccaccctgttcttgtccatggaggactccgagggttccaagtatactcttaagacccactctgtttaaaaatatatattctatgtatgcgtatatggaattgaaatgtcattattgtaacctagaaagtgctttgaaatattgatgtggggaggtttattgagcacaagatgtatttcagcccatgccccctcccaaaaagaaattgataagtaaaagcttcgttatacatttgactaagaaatcacccagctttaaagctgcttttaacaatgaagattgaacagagttcagcaattttgattaaattaagacttgggggtgaaactttccagtttactgaactccagaccatgcatgtagtccactccagaaatcatgctcgcttcccttggcacaccagtgttctcctgccaaatgaccctagaccctctgtcctgcagagtcagggtggcttttcccctgactgtgtccgatgccaaggagtcctggcctccgcagatgcttcattttgacccttggctgcagtggaagtcagcacagagcagtgccctggctgtgtccctggacgggtggacttagctagggagaaagtcgaggcagcagccctcgaggccctcacagatgtctaggcaggcctcatttcatcacgcagcatgtgcaggcctggaagagcaaagccaaatctcagggaagtccttggttgatgtatctgggtctcctctggagcactctgccctcctgtcacccagtagagtaaataaacttccttggctcctgct

SEQ ID NO: 293473 - DNA, 801 bp, Artificial Sequence
  derived and/or modified sequence
aatgaccagctaatggctcgattctcaagagggtttcattggtctcaacctggccccccaggcaacccacccctgattggacagtctcatcaagaaggatgaaattgattctgcagtaaagatgttggtgtcattaaaaatgagctacaaagctgccgcgggggaggattacaaggctgactgtcctccagggaacccagcacctaccagtaatcatggcccagatgccacagaagctgaagaggattttgtggacccatggacagtacagacaagcagtgcaaaaggcatagactacgataagctcattgttcggtttggaagtagtaaaattgacaaagagctaataaaccgaatagagagagccaccggccaaagaccacaccacttcctgcgcagaggcatcttcttctcacacagagatatgaatcaggttcttgatgcctatgaaaataagaagccattttatctgtacacgggccggggcccctcttctgaagcaatgcatgtaggtcacctcattccatttattttcacaaagtggctccaggatgtatttaacgtgcccttggtcatccagatgacggatgacgagaagtatctgtggaaggacctgaccctggaccaggcctatagctatgctgtggagaatgccaaggacatcatcgcctgtggctttgacatcaacaagactttcatattctctgacctggactacatggggatgagctcaggtttctacaaaaatgtggtgaagattcaaaagcatgttaccttcaaccaagtgaaaggcattttcgg

SEQ ID NO: 293474 - DNA, 568 bp, Artificial Sequence
  derived and/or modified sequence
aggagacagccggttgctgagccgggagcgctgactggcccggctgggcaggggaaactgaaagaaagaggggaagagtattaaagaccatttctggctgggcagggcactctcagcagctcaactgcccagcgtgaccagtggccacctctgcagtgtcttccacaacctggtcttgactcgtctgctgaacaaatcctctgacctcaggccggctgtgaacgtagttcctgagagatagcaaacatgcccaacagtgagcccgcatctctgctggagctgttcaacagcatcgccacacaaggggagctcgtaaggtccctcaaagcgggaaatgcgtcaaaggatgaaattgattctgcagtaaagatgttggtgtcattaaaaatgagctacaaagctgccgcgggggaggattacaaggctgactgtcctccagggaacccagcacctaccagtaatcatggcccagatgccacagaagctgaagaggattttgtggacccatggacagtacagacaagcagtgcaaaaggcatagactacgataagctcattgttcggtttg

SEQ ID NO: 293475 - DNA, 707 bp, Artificial Sequence
  derived and/or modified sequence
ggacggcgtttccacggacgcccaggagacagccggttgctgagccgggagcgctgactggcccggctgggcagggtgaatctacttctcttaacaaagtctcaatgtcctatttgcaatttatgtggtaaacactgaagacaatggtccttaaccttttggcatctcagcctcctttcgaaagtcttgactcgtctgctgaacaaatcctctgacctcaggccggctgtgaacgtagttcctgagagatagcaaacatgcccaacagtgagcccgcatctctgctggagctgttcaacagcatcgccacacaaggggagctcgtaaggtccctcaaagcgggaaatgcgtcaaaggatgaaattgattctgcagtaaagatgttggtgtcattaaaaatgagctacaaagctgccgcgggggaggattacaaggctgactgtcctccagggaacccagcacctaccagtaatcatggcccagatgccacagaagctgaagaggattttgtggacccatggacagtacagacaagcagtgcaaaaggcatagactacgataagctcattgttcggtttggaagtagtaaaattgacaaagagctaataaaccgaatagagagagccaccggccaaagaccacaccacttcctgcgcagaggcatcttcttctcacacagagatatgaatcaggttcttgatgcctat

SEQ ID NO: 293476 - DNA, 591 bp, Artificial Sequence
  derived and/or modified sequence
aatgaccagctaatggctcgattctcaagagggtttcattggtctcaacctggccccccaggcaacccacccctgattggacagtctcatcaagaagagtgtactatttgttaaacaggtgaatctacttctcttaacaaagtctcaatgtcctatttgcaatttatgtggtaaacactgaagacaatggtccttaaccttttggcatctcagcctcctttcgaaagtcttgactcgtctgctgaacaaatcctctgacctcaggccggctgtgaacgtagttcctgagagatagcaaacatgcccaacagtgagcccgcatctctgctggagctgttcaacagcatcgccacacaaggggagctcgtaaggtccctcaaagcgggaaatgcgtcaaaggatgaaattgattctgcagtaaagatgttggtgtcattaaaaatgagctacaaagctgccgcgggggaggattacaaggctgactgtcctccagggaacccagcacctaccagtaatcatggcccagatgccacagaagctgaagaggattttgtggacccatggacagtacagacaagcagtgcaaaaggc

SEQ ID NO: 293477 - DNA, 572 bp, Artificial Sequence
  derived and/or modified sequence
agacagccggttgctgagccgggagcgctgactggcccggctgggcagggcaacccacccctgattggacagtctcatcaagaaggttggtcaagagctcaagtgtttctgagaatctgggtgatttataagaaacccttagctgaatgcagggtggggagaacgaaagacaaaagcatcttttttcagaagggaaactgaaagaaagaggggaagagtattaaagaccatttctggctgggcagggcactctcagcagctcaactgcccagcgtgaccagtggccacctctgcagtgtcttccacaacctgggtgaatctacttctcttaacaaagtctcaatgtcctatttgcaatttatgtggtaaacactgaagacaatggtccttaaccttttggcatctcagcctcctttcgaaagtcttgactcgtctgctgaacaaatcctctgacctcaggccggctgtgaacgtagttcctgagagatagcaaacatgcccaacagtgagcccgcatctctgctggagctgttcaacagcatcgccacacaaggggagctcgtaaggtccct

SEQ ID NO: 293478 - DNA, 562 bp, Artificial Sequence
  derived and/or modified sequence
gagacagccggttgctgagccgggagcgctgactggcccggctgggcaggaagggaaactgaaagaaagaggggaagagtattaaagaccatttctggctgggcagggcactctcagcagctcaactgcccagcgtgaccagtggccacctctgcagtgtcttccacaacctggtcttgactcgtctgctgaacaaatcctctgacctcaggccggctgtgaacgtagttcctgagagatagcaaacatgcccaacagtgagcccgcatctctgctggagctgttcaacagcatcgccacacaaggggagctcgtaaggtccctcaaagcgggaaatgcgtcaaaggatgaaattgattctgcagtaaagatgttggtgtcattaaaaatgagctacaaagctgccgcgggggaggattacaaggctgactgtcctccagggaacccagcacctaccagtaatcatggcccagatgccacagaagctgaagaggattttgtggacccatggacagtacagacaagcagtgcaaaaggcatagactacgataagctcattgtt

SEQ ID NO: 293479 - DNA, 530 bp, Artificial Sequence
  derived and/or modified sequence
gatgcggggaatttacagtttctctttccaccgcccacgactacacaaaatcagtcacactgacgctgagggtggggaacgggaagagggtggggaggttatttggaggccagcggggggtgaggggtggctgatgcaatgaccagctaatggctcgattctcaagagggtttcattggtctcaacctggccccccaggcaacccacccctgattggacagtctcatcaagaagaagggaaactgaaagaaagaggggaagagtattaaagaccatttctggctgggcagggcactctcagcagctcaactgcccagcgtgaccagtggccacctctgcagtgtcttccacaacctggtcttgactcgtctgctgaacaaatcctctgacctcaggccggctgtgaacgtagttcctgagagatagcaaacatgcccaacagtgagcccgcatctctgctggagctgttcaacagcatcgccacacaaggggagctcgtaaggtccctcaaagcgggaaatgcgtcaaag

SEQ ID NO: 293480 - DNA, 560 bp, Artificial Sequence
  derived and/or modified sequence
gagacagccggttgctgagccgggagcgctgactggcccggctgggcaggaagggaaactgaaagaaagaggggaagagtattaaagaccatttctggctgggcagggcactctcagcagctcaactgcccagcgtgaccagtggccacctctgcagtgtcttccacaacctgggtgaatctacttctcttaacaaagtctcaatgtcctatttgcaatttatgtggtaaacactgaagacaatggtccttaaccttttggcatctcagcctcctttcgaaagtcttgactcgtctgctgaacaaatcctctgacctcaggccggctgtgaacgtagttcctgagagatagcaaacatgcccaacagtgagcccgcatctctgctggagctgttcaacagcatcgccacacaaggggagctcgtaaggtccctcaaagcgggaaatgcgtcaaaggatgaaattgattctgcagtaaagatgttggtgtcattaaaaatgagctacaaagctgccgcgggggaggattacaaggctgactgtcctccagggaacccagca

SEQ ID NO: 293481 - DNA, 562 bp, Artificial Sequence
  derived and/or modified sequence
gacagccggttgctgagccgggagcgctgactggcccggctgggcaggggcactctcagcagctcaactgcccagcgtgaccagtggccacctctgcagtgtcttccacaacctggtcttgactcgtctgctgaacaaatcctctgacctcaggccggctgtgaacgtagttcctgagagatagcaaacatgcccaacagtgagcccgcatctctgctggagctgttcaacagcatcgccacacaaggggagctcgtaaggtccctcaaagcgggaaatgcgtcaaaggatgaaattgattctgcagtaaagatgttggtgtcattaaaaatgagctacaaagctgccgcgggggaggattacaaggctgactgtcctccagggaacccagcacctaccagtaatcatggcccagatgccacagaagctgaagaggattttgtggacccatggacagtacagacaagcagtgcaaaaggcatagactacgataagctcattgttcggtttggaagtagtaaaattgacaaagagctaataaaccgaatagagagagccaccg

SEQ ID NO: 293482 - DNA, 538 bp, Artificial Sequence
  derived and/or modified sequence
gtgatttataagaaacccttagctgaatgcagggtggggagaacgaaagacaaaagcatcttttttcagaagggaaactgaaagaaagaggggaagagtattaaagaccatttctggctgggcagggcactctcagcagctcaactgcccagcgtgaccagtggccacctctgcagtgtcttccacaacctggcctcctttcgaaagtcttgactcgtctgctgaacaaatcctctgacctcaggccggctgtgaacgtagttcctgagagatagcaaacatgcccaacagtgagcccgcatctctgctggagctgttcaacagcatcgccacacaaggggagctcgtaaggtccctcaaagcgggaaatgcgtcaaaggatgaaattgattctgcagtaaagatgttggtgtcattaaaaatgagctacaaagctgccgcgggggaggattacaaggctgactgtcctccagggaacccagcacctaccagtaatcatggcccagatgccacagaagctgaagaggattttgtggac

SEQ ID NO: 293483 - DNA, 658 bp, Artificial Sequence
  derived and/or modified sequence
ggctcgattctcaagagggtttcattggtctcaacctggccccccaggcaacccacccctgattggacagtctcatcaagaaggttggtcaagagctcaagtgtttctgagaatctgggtgatttataagaaacccttagctgaatgcagggtggggagaacgaaagacaaaagcatcttttttcagaagggaaactgaaagaaagaggggaagagtattaaagaccatttctggctgggcagggcactctcagcagctcaactgcccagcgtgaccagtggccacctctgcagtgtcttccacaacctgggtgaatctacttctcttaacaaagtctcaatgtcctatttgcaatttatgtggtaaacactgaagacaatggtccttaaccttttggcatctcagcctcctttcgaaagtcttgactcgtctgctgaacaaatcctctgacctcaggccggctgtgaacgtagttcctgagagatagcaaacatgcccaacagtgagcccgcatctctgctggagctgttcaacagcatcgccacacaaggggagctcgtaaggtccctcaaagcgggaaatgcgtcaaaggatgaaattgattctgcagtaaagatgttggtgtcattaaaaatgagctacaaagctgccgcgggg

SEQ ID NO: 293484 - DNA, 410 bp, Artificial Sequence
  derived and/or modified sequence
ctcagcagctcaactgcccagcgtgaccagtggccacctctgcagtgtcttccacaacctggtctcaatgtcctatttgcaatttatgtggtaaacactgaagacaatggtccttaaccttttggcatctcagcctcctttcgaaagtcttgactcgtctgctgaacaaatcctctgacctcaggccggctgtgaacgtagttcctgagagatagcaaacatgcccaacagtgagcccgcatctctgctggagctgttcaacagcatcgccacacaaggggagctcgtaaggtccctcaaagcgggaaatgcgtcaaaggatgaaattgattctgcagtaaagatgttggtgtcattaaaaatgagctacaaagctgccgcgggggaggattacaaggctgactgtcctc

SEQ ID NO: 293485 - DNA, 564 bp, Artificial Sequence
  derived and/or modified sequence
agcgctgactggcccggctgggcaggaagggaaactgaaagaaagaggggaagagtattaaagaccatttctggctgggcagggcactctcagcagctcaactgcccagcgtgaccagtggccacctctgcagtgtcttccacaacctggagtgtactatttgttaaacaggtgaatctacttctcttaacaaagtctcaatgtcctatttgcaatttatgtggtaaacactgaagacaatggtccttaaccttttggcatctcagcctcctttcgaaagtcttgactcgtctgctgaacaaatcctctgacctcaggccggctgtgaacgtagttcctgagagatagcaaacatgcccaacagtgagcccgcatctctgctggagctgttcaacagcatcgccacacaaggggagctcgtaaggtccctcaaagcgggaaatgcgtcaaaggatgaaattgattctgcagtaaagatgttggtgtcattaaaaatgagctacaaagctgccgcgggggaggattacaaggctgactgtcctccagggaacccagcacctacca

SEQ ID NO: 293486 - DNA, 517 bp, Artificial Sequence
  derived and/or modified sequence
taagaaacccttagctgaatgcagggtggggagaacgaaagacaaaagcatcttttttcagaagggaaactgaaagaaagaggggaagagtattaaagaccatttctggctgggcagggcactctcagcagctcaactgcccagcgtgaccagtggccacctctgcagtgtcttccacaacctggatgttcctgaactccaagttgaaaaacctctgaagttcaactcaattctgaaagtcaacaaagaaataaaggaggatgtcaatagtcttgactcgtctgctgaacaaatcctctgacctcaggccggctgtgaacgtagttcctgagagatagcaaacatgcccaacagtgagcccgcatctctgctggagctgttcaacagcatcgccacacaaggggagctcgtaaggtccctcaaagcgggaaatgcgtcaaaggatgaaattgattctgcagtaaagatgttggtgtcattaaaaatgagctacaaagctgccgcgggggaggattac

SEQ ID NO: 293487 - DNA, 547 bp, Artificial Sequence
  derived and/or modified sequence
gatgcaatgaccagctaatggctcgattctcaagagggtttcattggtctcaacctggccccccaggcaacccacccctgattggacagtctcatcaagaaggatgaaattgattctgcagtaaagatgttggtgtcattaaaaatgagctacaaagctgccgcgggggaggattacaaggctgactgtcctccagggaacccagcacctaccagtaatcatggcccagatgccacagaagctgaagaggattttgtggacccatggacagtacagacaagcagtgcaaaaggcatagactacgataagctcattgttcggtttggaagtagtaaaattgacaaagagctaataaaccgaatagagagagccaccggccaaagaccacaccacttcctgcgcagaggcatcttcttctcacacagagatatgaatcaggttcttgatgcctatgaaaataagaagccattttatctgtacacgggccggggcccctcttctgaagcaatgcatgtaggtcacctcattccatttattttcacaaagt

SEQ ID NO: 293488 - DNA, 528 bp, Artificial Sequence
  derived and/or modified sequence
ccggttgctgagccgggagcgctgactggcccggctgggcagggatgaaattgattctgcagtaaagatgttggtgtcattaaaaatgagctacaaagctgccgcgggggaggattacaaggctgactgtcctccagggaacccagcacctaccagtaatcatggcccagatgccacagaagctgaagaggattttgtggacccatggacagtacagacaagcagtgcaaaaggcatagactacgataagctcattgttcggtttggaagtagtaaaattgacaaagagctaataaaccgaatagagagagccaccggccaaagaccacaccacttcctgcgcagaggcatcttcttctcacacagagatatgaatcaggttcttgatgcctatgaaaataagaagccattttatctgtacacgggccggggcccctcttctgaagcaatgcatgtaggtcacctcattccatttattttcacaaagtggctccaggatgtatttaacgtgcccttggtcatccagat

SEQ ID NO: 293489 - DNA, 847 bp, Artificial Sequence
  derived and/or modified sequence
ggagcgctgactggcccggctgggcaggaagggaaactgaaagaaagaggggaagagtattaaagaccatttctggctgggcagggcactctcagcagctcaactgcccagcgtgaccagtggccacctctgcagtgtcttccacaacctgggatgaaattgattctgcagtaaagatgttggtgtcattaaaaatgagctacaaagctgccgcgggggaggattacaaggctgactgtcctccagggaacccagcacctaccagtaatcatggcccagatgccacagaagctgaagaggattttgtggacccatggacagtacagacaagcagtgcaaaaggcatagactacgataagctcattgttcggtttggaagtagtaaaattgacaaagagctaataaaccgaatagagagagccaccggccaaagaccacaccacttcctgcgcagaggcatcttcttctcacacagagatatgaatcaggttcttgatgcctatgaaaataagaagccattttatctgtacacgggccggggcccctcttctgaagcaatgcatgtaggtcacctcattccatttattttcacaaagtggctccaggatgtatttaacgtgcccttggtcatccagatgacggatgacgagaagtatctgtggaaggacctgaccctggaccaggcctatagctatgctgtggagaatgccaaggacatcatcgcctgtggctttgacatcaacaagactttcatattctctgacctggactacatggggatgagctcaggtttctacaaaaatgtggtgaagattcaaaagcatgttaccttcaaccaagtgaaagg

SEQ ID NO: 293490 - DNA, 2508 bp, Artificial Sequence
  derived and/or modified sequence
ggggagtaaggccggggcggagtgaggaaacaagggagggagtgatggagggacgctggcgcggcgcccagtggcctggccctcccgggagtatccttagagcccggcttgctgcccgccgcgttctggcactgtgaggcgcggagcctgccaccgacccctcgcccctttcctctgagcgccgccgacccaccccgtctccctttcccactggcacccttcatcgtctccgcctgttcgcttttcccgaggagagaggcccccatttttatttagcgcctgccatgtgccagaggctttgcgtagtgttgcacttagtcccctcaacggtaatgttagcaggcttctccatgcccattccacagatgaggaaaccgaaggggaagcagaaaagtaatgcgacccttgcccaaggtttcgaataagtccaagctgggattgaaacccaggcgtctgtgaccccagaactcctgatctttccactgcactgtgccgcctcggtgaacagatgcggggaatttacagtttctctttccaccgcccacgactacacaaaatcagtcacactgacgctgagggtggggaacgggaagagggtggggaggttatttggaggccagcggggggtgaggggtggctgatgcaatgaccagctaatggctcgattctcaagagggtttcattggtctcaacctggccccccaggcaacccacccctgattggacagtctcatcaagaagggcactctcagcagctcaactgcccagcgtgaccagtggccacctctgcagtgtcttccacaacctgggatgaaattgattctgcagtaaagatgttggtgtcattaaaaatgagctacaaagctgccgcgggggaggattacaaggctgactgtcctccagggaacccagcacctaccagtaatcatggcccagatgccacagaagctgaagaggattttgtggacccatggacagtacagacaagcagtgcaaaaggcatagactacgataagctcattgttcggtttggaagtagtaaaattgacaaagagctaataaaccgaatagagagagccaccggccaaagaccacaccacttcctgcgcagaggcatcttcttctcacacagagatatgaatcaggttcttgatgcctatgaaaataagaagccattttatctgtacacgggccggggcccctcttctgaagcaatgcatgtaggtcacctcattccatttattttcacaaagtggctccaggatgtatttaacgtgcccttggtcatccagatgacggatgacgagaagtatctgtggaaggacctgaccctggaccaggcctatagctatgctgtggagaatgccaaggacatcatcgcctgtggctttgacatcaacaagactttcatattctctgacctggactacatggggatgagctcaggtttctacaaaaatgtggtgaagattcaaaagcatgttaccttcaaccaagtgaaaggcattttcggcttcactgacagcgactgcattgggaagatcagttttcctgccatccaggctgctccctccttcagcaactcattcccacagatcttccgagacaggacggatatccagtgccttatcccatgtgccattgaccaggatccttactttagaatgacaagggacgtcgcccccaggatcggctatcctaaaccagccctgctgcactccaccttcttcccagccctgcagggcgcccagaccaaaatgagtgccagcgaccccaactcctccatcttcctcaccgacacggccaagcagatcaaaaccaaggtcaataagcatgcgttttctggagggagagacaccatcgaggagcacaggcagtttgggggcaactgtgatgtggacgtgtctttcatgtacctgaccttcttcctcgaggacgacgacaagctcgagcagatcaggaaggattacaccagcggagccatgctcaccggtgagctcaagaaggcactcatagaggttctgcagcccttgatcgcagagcaccaggcccggcgcaaggaggtcacggatgagatagtgaaagagttcatgactccccggaagctgtccttcgactttcagtagcactcgttttacatatgcttataaaagaagtgatgtatcagtaatgtatcaataatcccagcccagtcaaagcaccgccacctgtaggcttctgtctcatggtaattactgggcctggcctctgtaagcctgtgtatgttatcaatactgtttcttcctgtgagttccattatttctatctcttatgggcaaagcattgtgggtaattggtgctggctaacattgcatggtcggatagagaagtccagctgtgagtctctccccaaagcagccccacagtggagcctttggctggaagtccatgggccaccctgttcttgtccatggaggactccgagggttccaagtatactcttaagacccactctgtttaaaaatatat

SEQ ID NO: 293491 - DNA, 584 bp, Artificial Sequence
  derived and/or modified sequence
aatgtctttgccttttaagataatgttcatgctgttatttggcggggaaagcaatctttcttttagtgtttaaaaaaaatggaacatgatgggtcccaaaaggtgtcaagaaatccttgctctaaagaagtcattttcttgtcctctgggaacttgccagtccaaagtcttgactcgtctgctgaacaaatcctctgacctcaggccggctgtgaacgtagttcctgagagatagcaaacatgcccaacagtgagcccgcatctctgctggagctgttcaacagcatcgccacacaaggggagctcgtaaggtccctcaaagcgggaaatgcgtcaaaggatgaaattgattctgcagtaaagatgttggtgtcattaaaaatgagctacaaagctgccgcgggggaggattacaaggctgactgtcctccagggaacccagcacctaccagtaatcatggcccagatgccacagaagctgaagaggattttgtggacccatggacagtacagacaagcagtgcaaaaggcatagactacgataagctcattgttcggtttggaagtagtaaaattgacaaaga

SEQ ID NO: 293492 - DNA, 553 bp, Artificial Sequence
  derived and/or modified sequence
agaaattaatgtctttgccttttaagataatgttcatgctgttatttggcggggaaagcaatctttcttttagtgtttaaaaaaaatggaacatgatgggtcccaaaaggtgtcaagaaatccttgctctaaagaagtcattttcttgtcctctgggaacttgccagtccaaagagtgtactatttgttaaacaggtgaatctacttctcttaacaaagtctcaatgtcctatttgcaatttatgtggtaaacactgaagacaatggtccttaaccttttggcatctcagcctcctttcgaaagtcttgactcgtctgctgaacaaatcctctgacctcaggccggctgtgaacgtagttcctgagagatagcaaacatgcccaacagtgagcccgcatctctgctggagctgttcaacagcatcgccacacaaggggagctcgtaaggtccctcaaagcgggaaatgcgtcaaaggatgaaattgattctgcagtaaagatgttggtgtcattaaaaatgagctacaaagctgccgcgggggaggattacaa

SEQ ID NO: 293493 - DNA, 640 bp, Artificial Sequence
  derived and/or modified sequence
actctcagcagctcaactgcccagcgtgaccagtggccacctctgcagtgtcttccacaacctggacaatggtccttaaccttttggcatctcagcctcctttcgaaagtcttgactcgtctgctgaacaaatcctctgacctcaggccggctgtgaacgtagttcctgagagatagcaaacatgcccaacagtgagcccgcatctctgctggagctgttcaacagcatcgccacacaaggggagctcgtaaggtccctcaaagcgggaaatgcgtcaaaggatgaaattgattctgcagtaaagatgttggtgtcattaaaaatgagctacaaagctgccgcgggggaggattacaaggctgactgtcctccagggaacccagcacctaccagtaatcatggcccagatgccacagaagctgaagaggattttgtggacccatggacagtacagacaagcagtgcaaaaggcatagactacgataagctcattgttcggtttggaagtagtaaaattgacaaagagctaataaaccgaatagagagagccaccggccaaagaccacaccacttcctgcgcagaggcatcttcttctcacacagagatatgaatcaggttcttgatgcctatgaaaataa

SEQ ID NO: 293494 - DNA, 2080 bp, Artificial Sequence
  derived and/or modified sequence
actctcagcagctcaactgcccagcgtgaccagtggccacctctgcagtgtcttccacaacctggagtgtactatttgttaaacaggtgaatctacttctcttaacaaagtctcaatgtcctatttgcaatttatgtggtaaacactgaagacaatggtccttaaccttttggcatctcagcctcctttcgaaagtcttgactcgtctgctgaacaaatcctctgacctcaggccggctgtgaacgtagttcctgagagatagcaaacatgcccaacagtgagcccgcatctctgctggagctgttcaacagcatcgccacacaaggggagctcgtaaggtccctcaaagcgggaaatgcgtcaaaggatgaaattgattctgcagtaaagatgttggtgtcattaaaaatgagctacaaagctgccgcgggggaggattacaaggctgactgtcctccagggaacccagcacctaccagtaatcatggcccagatgccacagaagctgaagaggattttgtggacccatggacagtacagacaagcagtgcaaaaggcatagactacgataagctcattgttcggtttggaagtagtaaaattgacaaagagctaataaaccgaatagagagagccaccggccaaagaccacaccacttcctgcgcagaggcatcttcttctcacacagagatatgaatcaggttcttgatgcctatgaaaataagaagccattttatctgtacacgggccggggcccctcttctgaagcaatgcatgtaggtcacctcattccatttattttcacaaagtggctccaggatgtatttaacgtgcccttggtcatccagatgacggatgacgagaagtatctgtggaaggacctgaccctggaccaggcctatagctatgctgtggagaatgccaaggacatcatcgcctgtggctttgacatcaacaagactttcatattctctgacctggactacatggggatgagctcaggtttctacaaaaatgtggtgaagattcaaaagcatgttaccttcaaccaagtgaaaggcattttcggcttcactgacagcgactgcattgggaagatcagttttcctgccatccaggctgctccctccttcagcaactcattcccacagatcttccgagacaggacggatatccagtgccttatcccatgtgccattgaccaggatccttactttagaatgacaagggacgtcgcccccaggatcggctatcctaaaccagccctgctgcactccaccttcttcccagccctgcagggcgcccagaccaaaatgagtgccagcgaccccaactcctccatcttcctcaccgacacggccaagcagatcaaaaccaaggtcaataagcatgcgttttctggagggagagacaccatcgaggagcacaggcagtttgggggcaactgtgatgtggacgtgtctttcatgtacctgaccttcttcctcgaggacgacgacaagctcgagcagatcaggaaggattacaccagcggagccatgctcaccggtgagctcaagaaggcactcatagaggttctgcagcccttgatcgcagagcaccaggcccggcgcaaggaggtcacggatgagatagtgaaagagttcatgactccccggaagctgtccttcgactttcagtagcactcgttttacatatgcttataaaagaagtgatgtatcagtaatgtatcaataatcccagcccagtcaaagcaccgccacctgtaggcttctgtctcatggtaattactgggcctggcctctgtaagcctgtgtatgttatcaatactgtttcttcctgtgagttccattatttctatctcttatgggcaaagcattgtgggtaattggtgctggctaacattgcatggtcggatagagaagtccagctgtgagtctctccccaaagcagccccacagtggagcctttggctggaagtccatgggccaccctgttcttgtccatggaggactccgagggttccaagtatactcttaagacccactctgtttaaaaatatatattctatgtatgcg

SEQ ID NO: 293495 - DNA, 821 bp, Artificial Sequence
  derived and/or modified sequence
aactgcccagcgtgaccagtggccacctctgcagtgtcttccacaacctggagtgtactatttgttaaacaggtgaatctacttctcttaacaaagtctcaatgtcctatttgcaatttatgtggtaaacactgaagacaatggtccttaaccttttggcatctcagcctcctttcgaaagtcttgactcgtctgctgaacaaatcctctgacctcaggccggctgtgaacgtagttcctgagagatagcaaacatgcccaacagtgagcccgcatctctgctggagctgttcaacagcatcgccacacaaggggagctcgtaaggtccctcaaagcgggaaatgcgtcaaagtaaagatgttggtgtcattaaaaatgagctacaaagctgccgcgggggaggattacaaggctgactgtcctccagggaacccagcacctaccagtaatcatggcccagatgccacagaagctgaagaggattttgtggacccatggacagtacagacaagcagtgcaaaaggcatagactacgataagctcattgttcggtttggaagtagtaaaattgacaaagagctaataaaccgaatagagagagccaccggccaaagaccacaccacttcctgcgcagaggcatcttcttctcacacagagatatgaatcaggttcttgatgcctatgaaaataagaagccattttatctgtacacgggccggggcccctcttctgaagcaatgcatgtaggtcacctcattccatttattttcacaaagtggctccaggatgtatttaacgtgcccttggtcatccagatga

SEQ ID NO: 293496 - DNA, 848 bp, Artificial Sequence
  derived and/or modified sequence
aggagacagccggttgctgagccgggagcgctgactggcccggctgggcaggatgttcctgaactccaagttgaaaaacctctgaagttcaactcaattctgaaagtcaacaaagaaataaaggaggatgtcaatagtcttgactcgtctgctgaacaaatcctctgacctcaggccggctgtgaacgtagttcctgagagatagcaaacatgcccaacagtgagcccgcatctctgctggagctgttcaacagcatcgccacacaaggggagctcgtaaggtccctcaaagcgggaaatgcgtcaaaggatgaaattgattctgcagtaaagatgttggtgtcattaaaaatgagctacaaagctgccgcgggggaggattacaaggctgactgtcctccagggaacccagcacctaccagtaatcatggcccagatgccacagaagctgaagaggattttgtggacccatggacagtacagacaagcagtgcaaaaggcatagactacgataagctcattgttcggtttggaagtagtaaaattgacaaagagctaataaaccgaatagagagagccaccggccaaagaccacaccacttcctgcgcagaggcatcttcttctcacacagagatatgaatcaggttcttgatgcctatgaaaataagaagccattttatctgtacacgggccggggcccctcttctgaagcaatgcatgtaggtcacctcattccatttattttcacaaagtggctccaggatgtatttaacgtgcccttggtcatccagatgacggatgacgagaagtatctgtggaaggacctgaccctggaccaggcctatag

SEQ ID NO: 293497 - DNA, 828 bp, Artificial Sequence
  derived and/or modified sequence
atggatgacgaggattgcgaaagaaggagaatggagtgcctggacgagatgagcaacctggagaaacagtttaccgacctgaaggatcaactctataaggagagactttctcaggtggacgccaaactgcaggaggtcattgcaggaaaagcacctgagtaccttgagccactggctactctgcaagagaacatgcagatccggactaaagtggcaggcatttaccgggagctttgccttgaatctgttaaaaataagtacgagtgcgaaatccaggccagtcgccaacattgcgagtccgagaagcttctgctgtatgacacggtacagtctgagctggaggagaagattcgaagactcgaagaagacaggcactccatcgacatcacatcagagctttggaacgatgaattacaatctcgaaaaaaacggaaagatcccttttccccagataaaaaaaaacctgttgtggttagcggtccatatattgtgtacatgttgcaggatctggacatcctggaagactggacaaccatccggaaagccatggcaacgctcggccctcacagagtgaagaccgaacctccagtcaaactggaaaagcacctccatagcgcacgctccgaagagggaaggctgtattatgacggcgaatggtacattaggggccagaccatttgtatcgataaaaaagacgagtgccccacttccgccgtcattactacgatcaatcacgatgaagtctggtttaagcggccagacgggtctaagagtaaattatatattagccagctccagaaaggcaagtattctataaaacatagttag

SEQ ID NO: 293498 - DNA, 828 bp, Artificial Sequence
  derived and/or modified sequence
atggatgatgaggactgtgagaggaggaggatggagtgcctggatgagatgagcaacctggagaagcagttcacagacctgaaggaccagctgtacaaggagcggctgagccaggtggatgccaagctgcaggaggtgattgctgggaaggcccctgagtacctggagcccctggccaccctgcaggagaacatgcagatccgcaccaaggtggccggcatctaccgggagctgtgcctggagagcgtgaagaacaagtatgaatgtgagatccaggccagccggcagcactgtgagagcgagaagctgctgctgtatgacacagtgcagagcgagctggaggagaagatccggcggctggaggaggacagacacagcattgacatcaccagcgagctgtggaatgatgagctgcagagcaggaagaagaggaaggaccccttctccccagacaagaagaagcctgtggtggtgtctggcccctacatcgtgtacatgctgcaggacctggacatcctggaggactggaccaccatcaggaaggccatggccaccctgggcccccaccgggtgaagacagagccccctgtgaagctggagaagcacctgcacagcgcccggtctgaggagggccgcctgtactatgatggagagtggtacatccggggccagaccatctgcatcgacaagaaggatgaatgtcccaccagcgctgtgatcaccaccatcaaccatgatgaggtgtggttcaagaggccagatggcagcaagagcaagctgtacatcagccagctgcagaagggcaagtacagcatcaagcacagctag

SEQ ID NO: 293499 - DNA, 828 bp, Artificial Sequence
  derived and/or modified sequence
atggacgacgaggactgcgagcggcggcggatggagtgcctggacgaaatgagcaacttagaaaagcagttcaccgacctgaaagaccagttgtacaaggaaaggctgtcacaagtggacgcaaagctgcaagaggtgatcgcgggcaaagcccccgaatatctagagcccctggcgaccctgcaggagaacatgcagatcagaacgaaggttgccggaatctacagggagctatgtttggagtccgtgaagaacaagtatgagtgcgagattcaggcttcacggcagcactgcgaaagcgaaaaacttctgctgtacgataccgtgcagagtgaattagaggagaagattcggcgtctggaagaagatcgccatagtattgatatcacctccgaactgtggaacgacgaactgcaatctcgcaagaaacggaaagacccattctcaccagacaagaaaaaacccgttgtggtgtctggcccgtatatcgtgtatatgcttcaggatcttgacatcctggaggactggacaactattcgaaaggccatggccacacttggccctcaccgggtgaagactgagcctcccgtcaagctggaaaagcatcttcactccgcacgttccgaagaggggagattgtattacgacggtgaatggtacattagaggccagaccatttgtattgataaaaaggacgagtgccccaccagcgccgtgattacaaccatcaaccacgatgaggtttggtttaaacgacccgatggatcaaagagcaagctctatatcagtcagctgcagaaaggcaaatattccatcaagcattcgtag

SEQ ID NO: 293500 - DNA, 828 bp, Artificial Sequence
  derived and/or modified sequence
atggacgatgaggactgtgaaagaagacggatggagtgtctggacgagatgtcgaatcttgagaagcagttcactgacctcaaagaccagctatacaaggagcgcctgtcccaggtagatgctaagctgcaagaggtaatagcaggcaaggcgcctgaatacctggaaccactcgctactcttcaggaaaacatgcagatacggaccaaggtggcgggtatctaccgagaattgtgcctggagagcgttaaaaataagtacgaatgtgaaattcaggcctcccggcaacattgtgagtctgagaaactgcttctgtacgacacagtccagagcgagctcgaggagaagattaggcggctggaggaagaccgacactctatcgacattacatctgagctgtggaacgatgagttgcaaagcaggaaaaaacgtaaggatcccttttcacctgacaaaaagaaacctgttgtggtgagtggcccttatatagtctatatgcttcaggatctggatattctggaagattggactaccatcaggaaagccatggccaccctgggacctcacagagttaagaccgaacccccagtcaagttggagaaacacctccactctgcaaggagtgaagagggacgactttactacgacggggaatggtatatacggggtcagaccatctgtatcgacaaaaaggacgaatgtccaaccagtgctgtcattacgaccattaaccacgatgaggtttggttcaaacgccctgacgggtccaagtcaaaactgtacatatcccagttgcagaaaggcaagtactcaattaaacactcctag

SEQ ID NO: 293501 - DNA, 828 bp, Artificial Sequence
  derived and/or modified sequence
atggacgacgaggactgcgagagaagaagaatggagtgcctggacgagatgagcaacctggagaagcagttcaccgacctgaaggaccagctgtacaaggagagactgagccaggtggacgccaagctgcaggaggtgatcgccggcaaggcccccgagtacctggagcccctggccaccctgcaggagaacatgcagatcagaaccaaggtggccggcatctacagagagctgtgcctggagagcgtgaagaacaagtacgagtgcgagatccaggccagcagacagcactgcgagagcgagaagctgctgctgtacgacaccgtgcagagcgagctggaggagaagatcagaagactggaggaggacagacacagcatcgacatcaccagcgagctgtggaacgacgagctgcagagcagaaagaagagaaaggaccccttcagccccgacaagaagaagcccgtggtggtgagcggcccctacatcgtgtacatgctgcaggacctggacatcctggaggactggaccaccatcagaaaggccatggccaccctgggcccccacagagtgaagaccgagccccccgtgaagctggagaagcacctgcacagcgccagaagcgaggagggcagactgtactacgacggcgagtggtacatcagaggccagaccatctgcatcgacaagaaggacgagtgccccaccagcgccgtgatcaccaccatcaaccacgacgaggtgtggttcaagagacccgacggcagcaagagcaagctgtacatcagccagctgcagaagggcaagtacagcatcaagcacagctag

SEQ ID NO: 293502 - DNA, 5455 bp, Artificial Sequence
  derived and/or modified sequence
gacaaaccctcaggaagccctggccaacccccttctccagccccatctccagtccctgaacctgatgcccaagctgaagacgtagctcctccgcccaccatggctgaggaggaagaggggaccactggggagctccgctctgcagagccagctccagctgactctcgccaccctctgacctatcggaaaaccaccaactttgccctggacaagtttctcgaccctgcccggccctataagtgcactgtgtgtaaggagtccttcacccagaagaatattctgttggttcattataattctgtctcccaccttcacaagatgaagaaggctgccattgacccctctgcccctgcacggggagaggccggtgccccacccaccaccactgctgccacagacaagccctttaagtgcacagtctgcagagtctcctacaaccagagctccaccctggagatccacatgcggtcagttctgcatcagactcgctctcggggaaccaagactgattccaagattgaagggccagaacgcagccaagaagagcccaaggaaggcgagacagagggggaggtgggcactgagaagaagggccctgacaccagtggcttcatatctggattgcctttcctgtcccctcccccacctcccttggacctgcaccgattcccagcccctctcttcaccccaccagtcctgccccccttccctctggtgcccgaatcactgcttaagctccagcagcagcagctgctcctgcccttctacctccacgatctcaaggtggggcccaagctgacactagctgggcctgcacctgtgctgtccctgccagctgccacccctcctcctccaccccaacctcccaaggctgagctggctgagcgggagtgggagcggccccccatggccaaagagggtaatgaggcagggccttcctcaccccccgacccattgcccaacgaggctgcccgcactgcagccaaagcccttctagaaaactttggctttgagctggtgatccagtacaatgaagggaagcaagctgtgccccctccccctaccccacccccacctgaggccctcgggggtggggacaagctggcctgtggggcctgtgggaaactcttctccaatatgcttatcctcaagacacacgaggaacatgtccaccgccgctttctgccctttgaagccctgagccgttatgctgctcagtttcgaaagagctatgacagcctatacccgccccttgcagagcctcccaaacctcctgatgggtctctggattcacctgttccccatctgggcccacccttcctggtcccagagcctgaggcaggggggacccgtgcccctgaagagcgaagtcgagcagggggacactggcccatagaagaggaagaaagctccagagggaatcttcctcccctggtgcctgccggccgccggttctccagaaccaagttcacagagttccagacccaagccctgcagtctttctttgagactagcgcctaccccaaagacggagaggtggagcgactcgcaagtctgttgggtctggctagccgtgtggtggtggtgtggttccagaatgcccgccagaaagcacgcaaaaatgcctgtgagggtgggtccatgccaaccggaggaggcactgggggagcctccggctgcaggcgttgccacgccactttctcctgtgtttttgagttggtgcgccacctcaagaagtgctatgatgaccagacccttgaagaggaggaggaagaggcagagagaggggaagaggaggaagaggtggaagaagaagaagtagaggaggaacagggccttgaacctccagcagggcctgagggcccattaccagagcctccagatggggaggagctgagccaagcagaggcaacaaaggcaggaggcaaagagcctgaagagaaggctactccatcaccttccccagcccatacctgtgaccagtgtgccatttctttctccagccaggacctcctgaccagtcaccgccgactacatttcctgccatctctgcagcccagtgctcccccccaactcctagatctgcccttgctggtgtttggggagagaaaccccctggtggcagccacctcaccaatgccaggtccacctctcaaacggaagcatgaggacggcagcttgtctcccacaggcagtgaagcagggggaggaggggagggcgagccccccagggacaagcgcctgcgcaccaccatcttgcctgagcagctagagatcctgtaccgttggtacatgcaggattccaacccaacacgcaagatgctcgactgcatctccgaggaggtggggctcaaaaagcgagtggtacaggtctggttccagaataccagggcccgggagaggaaaggccagtttcgaagcacccctgggggggtgcctagtccagcagtgaaaccgcctgccacagccacccctgcatccttgcccaagttcaacctcttattaggcaaggtagatgatggcactgggagggaagccccaaagagggaagcacctgcttttccctaccccactgccacgcttgcttctgggccccagcctttcctaccacctgggaaagaggccaccaccccaacaccagagccacctctacctctcctacctccccctccacccagtgaggaagagggcccagaggaaccacctaaagcttctccagagagtgaggcttgcagtctctctgcaggagatctgagtgattcatctgcttccagcctagctgaaccagaatcccctggggctggagggaccagtgggggacctggaggtgggactggggttccagatggaatggggcagcggcgctacaggacccagatgagcagcctgcagctgaagatcatgaaagcctgctatgaagcttaccgcacccccaccatgcaggagtgtgaggtgctgggagaggagattgggctgcccaagagagtcatccaggtctggttccagaatgctcgtgccaaggaaaagaaggccaaactacaggggacagccgctgggagcactgggggcagcagtgagggcctcttagcagcccagcgcactgactgcccctattgtgatgtcaagtatgatttctatgtctcctgccgaggccatctcttttcccgtcagcacctggccaagctcaaggaggcggttcgagcccagctgaagagtgaaagcaagtgctacgacttggccccagcacctgaggctcccccagctctcaaggccccacctgccaccacacctgcctccatgcccctcggggctgccccaaccttgcctcgcctggcgccggtcctcttatctggcccagctctggctcagcccccgctgggcaacttagctcctttcaattcaggcccggcagcctcctcaggcctcctcggcctcgccacttcggtcctgcctaccaccacagtggtccagactgctggcccaggccgccccttacctcagagacccatgcccgaccaaaccaacacctccacagcaggcaccactgaccctgtcccaggccctcctactgagcccttgggggacaaggtctccagtgagcgaaagccagttgcaggccccaccagctcctccaatgatgccctcaagaacctcaaagcattgaagaccactgtcccagccctgttggggggccagttcctgccctttccattgccccctgctgggggaacagcaccgccagctgtctttggcccccagctacagggggcctacttccaacagctctatggcatgaagaaggggctatttcccatgaaccccatgatacctcagaccctcattgggctgctccccaatgccctcctccagccgccaccccagccccctgagcccacagccacagcacctccaaagcctcctgaactgcctgctccaggggagggggaagctggtgaggttgatgagctgctgacaggcagcactggcatctccaccgtggatgtaacccatcgctacctgtgccgccagtgcaagatggcatttgacggggaggccccggctactgcccaccagagatccttctgcttctttgggcggggctctgggggctccatgccacccccattgcgggtgcccatctgcacctaccactgcctggcatgtgaggtgctgctgagtgggcgtgaagccctagcctcccacctgcgctcctcggcccacaggcgcaaggcagccccacctcaagggggcccacccatctccatcaccaacgccgccactgctgcctcggctgctgtggcttttgccaaagaggaagcaagattacctcacacggactccaacccaaaaactacgactacctctacacttctagctttataaacagattaaccaagatggggagaggggagggcctcagggctccctcttttaccccaaggggtgtttggtgggagctcaaatccctcaccccaccccctggccccgcccacctcacaggaactgttcagttcccaccctcagtgggcaccacacaccccacttccagcagagtcctgcctcctcccaatccccacagacacacacattgatcctcctcctcagctccttgcagatgtagcccttgcccatcttcacagacacatacacccatcttggcaccctgattattcatacatgtctgcctaccacacacaaaatatatccttggttctatcttccttttcctcactgaattcccagctccccatccccataaatgcatacacatacatgcacacacacacgttatcccatgatgttccactgagaaaacaccaaaaaattttgaaaaagaagataaaaagaagaaacgaaaaagaaagcccaaggcaaagaagggggaaggaaaacaaacttcgccactctctcttctccttcctaaccctttgtctagagcaccacaccgctcacaaactctttccaaatgctcagttggctcccaaagttggagcctggcatgggcagggagcccacaaaactctaaccaaactggaggctggcatgggagaagtgcttctggttcactcttcctaccctctccctcctaaccctctccttgcctgacaggggagcccctgtggcctggactctaggggatgccgccaccagaaacccctctgccaatccctaccttgcaccctgggaactgcagtaacttattctcaaaggctttaaacacagagatcctctcagcggccgtgggcctgccccttgtcctagccctgccacgtgagggtccagcctccagggacaggcactgcccaccaacggcaaatccaaagttctttcaaaaaaaaaaactgaaacacaaccaaaaaagcaagagcgagagagagtacgtgcacacgcgcacaaaagagagaaacggacaccagaggaatgaactaaagaaaaacgtaaacttggaaaatac

SEQ ID NO: 293503 - protein, 210 aa, Artificial Sequence
  derived and/or modified sequence
MEQAIHSRVKPIQLKGEHHSNIFCLAFNSGNTKVFSGGNDEQVILHDVESETLDVFAHEDAVYGLSVSPVNDNIFASSSDDGRVLIWDIRESPHGEPFCLANYPSAFHSVMFNPVEPRLLATANSKEGVGLWDIRKPQSSLLRYGGNLSLQSAMSVRFNSNGTQLLALRRRLPPVLYDIHSRLPVFQFDNQGYFNSCTMKSCCFAGDRDQ

SEQ ID NO: 293504 - protein, 428 aa, Artificial Sequence
  derived and/or modified sequence
MATSWGTVFFMLVVSCVCSAVSHRNQQTWFEGIFLSSMCPINVSASTLYGIMFDAGSTGTRIHVYTFVQKMPGQLPILEGEVFDSVKPGLSAFVDQPKQGAETVQGLLEVAKDSIPRSHWKKTPVVLKATAGLRLLPEHKAKALLFEVKEIFRKSPFLVPKGSVSIMDGSDEGILAWVTVNFLTGQLHGHRQETVGTLDLGGASTQITFLPQFEKTLEQTPRGYLTSFEMFNSTYKLYTHSYLGFGLKAARLATLGALETEGTDGHTFRSACLPRWLEAEWIFGGVKYQYGGNQEGEVGFEPCYAEVLRVVRGKLHQPEEVQRGSFYAFSYYYDRAVDTDMIDYEKGGILKVEDFERKAREVCDNLENFTSGSPFLCMDLSYITALLKDGFGFADSTVLQLTKKVNNIETGWALGATFHLLQSLGISH

SEQ ID NO: 293505 - DNA, 1287 bp, Artificial Sequence
  derived and/or modified sequence
atggctacctcctggggtactgtattcttcatgttagtcgtcagttgtgtctgcagcgcggtcagccaccggaatcagcagacctggtttgagggcatctttctatccagtatgtgccccatcaacgtgtccgctagcactttgtatggtatcatgtttgacgcaggctctaccggaacacgcattcacgtgtacaccttcgtgcaaaaaatgcccggccaactgcctatcctcgagggagaggtttttgacagcgtgaaacccgggctaagtgcctttgtggatcagccgaagcagggagctgagactgtccaaggtctgcttgaggtggcgaaagactcaattccccggtctcattggaagaaaacacccgttgtgctaaaagctacagctggtctgcggctcctaccagaacataaggccaaggctcttttattcgaggtcaaggaaattttcagaaaatcaccgtttcttgtccctaaaggatcggtttccataatggatggctcggacgagggaattctagcttgggtcactgtcaacttcctcactggacagctgcatgggcaccggcaggaaaccgtcggcaccctggacctcggcggcgcttccacccaaatcacatttctacctcagttcgaaaagaccctggaacagactccacggggttatctaacctcttttgagatgtttaatagcacttataaactctacacccacagctatctgggatttggtctgaaagctgccagactggccacactaggagcacttgagaccgagggaaccgacggccacacctttcgctcagcgtgcctgcctcgttggcttgaggccgagtggattttcggcggggtaaagtaccagtacggcggaaaccaggagggtgaggtcgggtttgagccctgttacgctgaggtcttaagagtggtgaggggcaaactacaccagcccgaggaggtccaacgggggagtttttatgccttctcttattattatgatcgtgccgtggatactgacatgatcgactatgaaaagggaggaatactgaaagtcgaagatttcgagcgcaaagcccgggaagtttgcgacaacctagagaacttcacctcgggttcccctttcctctgcatggacttgagctatatcactgcacttttgaaagatggattcgggtttgcggactctactgtgttgcagctgaccaaaaaagtgaacaacatcgaaactggttgggccttaggcgcaacctttcacttgctgcaatccctgggcatttcccactag

SEQ ID NO: 293506 - DNA, 1287 bp, Artificial Sequence
  derived and/or modified sequence
atggccacctcctggggcaccgtcttcttcatgctggtggtgtcctgtgtgtgcagcgctgtgagccacaggaaccagcagacctggtttgagggcatcttcctgagctccatgtgccccatcaacgtgtctgccagcaccctgtatggcatcatgtttgatgctggcagcacaggcacccgcatccacgtgtacacctttgtgcagaagatgcctggccagctgcccatcctggagggggaggtgtttgattctgtgaagccaggcctgagcgcctttgtggaccagcccaagcagggcgctgagaccgtgcagggcctgctggaggtggccaaggacagcatccccaggagccactggaagaagacccctgtggtgctgaaggccacagctggcctgcggctgctgcctgagcacaaggccaaggccctgctgtttgaggtgaaggagatcttcaggaagagccccttcctggtgcccaagggctctgtgtccatcatggatggcagtgatgagggcatcctggcctgggtgacagtgaacttcctgaccggccagctgcacggccaccggcaggagaccgtgggcaccctggacctgggcggggccagcacccagatcaccttcctgccccagtttgagaagaccctggagcagaccccccggggctacctgaccagctttgagatgttcaacagcacctacaagctgtacacccacagctacctgggcttcggcctgaaggccgcccggctggccaccctgggcgccctggagacagagggcacagatggccacaccttccgcagcgcctgcctgccccgctggctggaggccgagtggatctttggaggagtgaagtaccagtatggaggcaaccaggagggggaggtgggctttgagccctgctacgccgaggtgctgcgggtggtgcggggcaagctgcaccagcctgaggaggtgcagaggggcagcttctacgccttctcctactactatgacagagctgtggacacagacatgattgattatgagaagggcggcatcctgaaggtggaggactttgagaggaaggcccgggaggtgtgtgacaacctggagaacttcaccagcggcagccccttcctgtgcatggacctgagctacatcacagccctgctgaaggatggctttggatttgctgacagcacagtgctgcagctgaccaagaaggtgaacaacatcgagaccggctgggccctgggcgccaccttccacctgctgcagagcctgggcatcagccactag

SEQ ID NO: 293507 - DNA, 1287 bp, Artificial Sequence
  derived and/or modified sequence
atggccaccagctggggcaccgtgttcttcatgctggtggtgagctgcgtgtgttctgcagtcagtcaccggaatcaacagacttggttcgagggcatttttttgtcatcaatgtgtcccatcaacgtgtccgcatccactttatacggtataatgtttgatgctggttctacagggacacgcattcacgtttacacattcgtgcagaaaatgcccggccaattgcctattttggaaggcgaggtcttcgacagtgtgaagcccggtctatcagcattcgtcgatcagcccaagcagggagccgagactgtccaaggactgttggaggtggcaaaagactcaattccacgaagccattggaagaaaactccagtagtgctcaaagctactgcaggactgcgactcctccccgaacataaagcgaaagctttattatttgaggtgaaggagatctttaggaaaagcccatttttggtccccaagggctcggtgagcattatggacgggagtgatgagggcattctggcatgggtcacagtcaactttctcaccggacagttgcatggccatcggcaggaaaccgttggcaccctggatctgggcggtgcctccacccagattacgttcctgcctcagtttgaaaagactcttgagcagacgcccagaggctacttgacctctttcgagatgtttaattccacatataaattgtacacccattcctatctcggattcggtctcaaggccgcgcggctggcaacactgggagctctcgagaccgagggcaccgatggccacacatttaggtcagcttgcctgcccagatggttggaggccgaatggatctttggcggcgtcaagtaccagtatggggggaaccaggaaggagaagtgggcttcgagccatgttatgccgaggtactgagggtggtaaggggcaaactccatcagcctgaggaggtccagcgaggcagtttctacgccttttcctactactatgacagggctgtagataccgacatgatagactacgagaaggggggaattctgaaggtcgaagacttcgagcgcaaggcgcgggaagtttgtgataatttggagaacttcacatcaggctcaccatttctgtgcatggatctcagttacatcacagccctgctcaaagacggttttggatttgccgactccaccgtcctgcagctgacgaagaaagtgaacaacatagagaccggttgggcattgggggctaccttccacctgctgcagtcactaggtatctcccactag

SEQ ID NO: 293508 - DNA, 1287 bp, Artificial Sequence
  derived and/or modified sequence
atggctacttcttggggcactgttttttttatgcttgtggtaagctgtgtctgtagtgcagtttcccaccgtaatcagcagacctggttcgagggcattttcctgtcatccatgtgccccattaatgtcagcgcatccacattatacgggattatgtttgacgccggatccaccggcaccagaatccatgtctatacttttgtgcagaaaatgccagggcagctcccaatcctggaaggggaggtctttgattctgtgaaaccgggactttcagcttttgtggaccagcccaagcagggagccgaaacagtccaagggctgcttgaagtggcgaaggactccatccccagatcgcactggaaaaaaactcctgtggtgctgaaggctaccgctggattacgcctcctaccagaacataaagccaaagccttgctgtttgaagtgaaggagatcttccggaaatctccatttctggtgcctaaaggaagcgtgagcatcatggacggaagcgacgagggcatactggcatgggtcaccgtgaacttcctcaccggtcagctgcatgggcatcggcaggagaccgtgggcacgctggacttgggaggagcatcgacacagatcacttttctgccccaattcgaaaagaccctggagcaaactcctagaggctacctgactagcttcgaaatgttcaatagtacctataaattgtacacccattcttacctgggctttggcctcaaggctgccaggctcgcgacacttggagccctggagactgagggtacagatggccacaccttccggtcagcttgcctgccgagatggttagaagccgagtggattttcggcggtgtgaagtaccagtacgggggaaaccaggagggcgaagtgggcttcgaaccatgttacgccgaggttctgcgtgttgtgagaggtaaactccatcagccagaggaggttcagagaggttcattctacgcctttagttactattatgacagagctgtcgataccgacatgattgattacgaaaaaggcggaatactcaaagtcgaggacttcgagcgcaaagctagggaggtgtgtgacaatctggaaaacttcacctcgggtagtccgtttctgtgtatggatctgtcttacatcacagccctgcttaaggatggcttcggctttgcagattctaccgtcttgcagctgactaaaaaagtcaacaacatagagaccggatgggcacttggagctacctttcacttgctccagtctctcgggatcagccactag

SEQ ID NO: 293509 - DNA, 1287 bp, Artificial Sequence
  derived and/or modified sequence
atggccaccagctggggcaccgtgttcttcatgctggtggtgagctgcgtgtgcagcgccgtgagccacagaaaccagcagacctggttcgagggcatcttcctgagcagcatgtgccccatcaacgtgagcgccagcaccctgtacggcatcatgttcgacgccggcagcaccggcaccagaatccacgtgtacaccttcgtgcagaagatgcccggccagctgcccatcctggagggcgaggtgttcgacagcgtgaagcccggcctgagcgccttcgtggaccagcccaagcagggcgccgagaccgtgcagggcctgctggaggtggccaaggacagcatccccagaagccactggaagaagacccccgtggtgctgaaggccaccgccggcctgagactgctgcccgagcacaaggccaaggccctgctgttcgaggtgaaggagatcttcagaaagagccccttcctggtgcccaagggcagcgtgagcatcatggacggcagcgacgagggcatcctggcctgggtgaccgtgaacttcctgaccggccagctgcacggccacagacaggagaccgtgggcaccctggacctgggcggcgccagcacccagatcaccttcctgccccagttcgagaagaccctggagcagacccccagaggctacctgaccagcttcgagatgttcaacagcacctacaagctgtacacccacagctacctgggcttcggcctgaaggccgccagactggccaccctgggcgccctggagaccgagggcaccgacggccacaccttcagaagcgcctgcctgcccagatggctggaggccgagtggatcttcggcggcgtgaagtaccagtacggcggcaaccaggagggcgaggtgggcttcgagccctgctacgccgaggtgctgagagtggtgagaggcaagctgcaccagcccgaggaggtgcagagaggcagcttctacgccttcagctactactacgacagagccgtggacaccgacatgatcgactacgagaagggcggcatcctgaaggtggaggacttcgagagaaaggccagagaggtgtgcgacaacctggagaacttcaccagcggcagccccttcctgtgcatggacctgagctacatcaccgccctgctgaaggacggcttcggcttcgccgacagcaccgtgctgcagctgaccaagaaggtgaacaacatcgagaccggctgggccctgggcgccaccttccacctgctgcagagcctgggcatcagccactag

SEQ ID NO: 293510 - DNA, 5842 bp, Artificial Sequence
  derived and/or modified sequence
tagcccaggcgccgcggcgcgcggggtggggcggaggtcgcgccgagggcggcgggctgccgcgcaagggtggcgcgcgcgcgttttccttgttcctggtcaacaaagaaatgtggagtgtcttggctgaatcctcatacagacaagatcattatggtgctgttaggtaggacttgtatccagatgtaaggttgaaaaagtgatataataaaggaaccaaggagaaaattcagaaggaaagaaaaaattgcctctgcaggtgtgcgagcaggattgcttctgcaacaaaagcctccacccagccacatcttgggaaaagaatggccacttcttggggcacagtctttttcatgctggtggtatcctgtgtttgcagcgctgtctcccacaggaaccagcagacttggtttgagggtatcttcctgtcttccatgtgccccatcaatgtcagcgccagcaccttgtatggaattatgtttgatgcagggagcactggaactcgaattcatgtttacacctttgtgcagaaaatgccaggacagcttccaattctagaaggggaagtttttgattctgtgaagccaggactttctgcttttgtagatcaacctaagcagggtgctgagaccgttcaagggctcttagaggtggccaaagactcaatcccccgaagtcactggaaaaagaccccagtggtcctaaaggcaacagcaggactacgcttactgccagaacacaaagccaaggctctgctctttgaggtaaaggagatcttcaggaagtcacctttcctggtaccaaagggcagtgttagcatcatggatggatccgacgaaggcatattagcttgggttactgtgaattttctgacaggtcagctgcatggccacagacaggagactgtggggaccttggacctagggggagcctccacccaaatcacgttcctgccccagtttgagaaaactctggaacaaactcctaggggctacctcacttcctttgagatgtttaacagcacttataagctctatacacatagttacctgggatttggattgaaagctgcaagactagcaaccctgggagccctggagacagaagggactgatgggcacactttccggagtgcctgtttaccgagatggttggaagcagagtggatctttgggggtgtgaaataccagtatggtggcaaccaagaaggggaggtgggctttgagccctgctatgccgaagtgctgagggtggtacgaggaaaacttcaccagccagaggaggtccagagaggttccttctatgctttctcttactattatgaccgagctgttgacacagacatgattgattatgaaaaggggggtattttaaaagttgaagattttgaaagaaaagccagggaagtgtgtgataacttggaaaacttcacctcaggcagtcctttcctgtgcatggatctcagctacatcacagccctgttaaaggatggctttggctttgcagacagcacagtcttacagctcacaaagaaagtgaacaacatagagacgggctgggccttgggggccacctttcacctgttgcagtctctgggcatctcccattgaggccacgtacttccttggagacctgcatttgccaacacctttttaaggggaggagagagcacttagtttctgaactagtctggggacatcctggacttgagcctagagatttaggtttaattaattttacacatctaatgtgaactgctgcctaaccactcaagagtacacagctggcaccagagcatcacagagagccctgtgagccaaaaagtatagttttggaacttaaccttggagtgagagcccagggacaggtccctggaaaccaaagaaaaatcgcatttcaaccctttgagtgcctcattccactgaatatttaaattttcctcttaaatggtaaactgacttattgcaatcccaagacccatcaatatcagtatttttttcctccctatacagtgccctgcccacccttatctgcacccacctcccctgaaaaagagagaaaaaaaaaaacctggttttgctttccatgtataattcaacaacgcaaaatgggaccatgtcagaatctgtatgatcctattctgtgttagctccaatcagccagctgagagccatcctaaatattaataggatgagagagtaactcctaactgtgcataaattacagccttaagaaagaaggccacccggtctctggggacatgttttgggagggtgtggctgcctcatatagcctacctttgctttaatcagcattttatcagtcaactctgggattaatgaacatatccgactttatgggtatgtgtatattcagtgccagtaccacctcccaggctaatgtgttaacagtgttttctatgattctaaacttgttttctttgtatttctaagaaatacaactaggccctaacttttggtctgtggtcagaggtcagtgtctgtgctattccaggatctattatttcagtttgcccttttattctctccgtttgtaacagtaccttcctgtcctggtccctgatcactttagctaatatcctttgaattatttatctagttcagagtttccaataccgttcctgacaaaaccccacttggatttggttggctctctcagcccacatcagtacagtggaccaacatttccagggagaaccatatttaatgtccctcatgctctctttttgaatccaagtgctcagagctcttgactgtgaattatttaccccaaattcattatcttgcacttttttttgagatggagtcttgctctgttgctcaggctagagtggagtggcgcaatctcagctcactgcaacctccgcccccaggttcaagcgattcttgttctcagcctcctgaagagctgggattacaggtgcccaccaccattcctggctaatttttgtatttgtagtagagatggggtttcaccatgttggccaggctggtttccaactcctgatctcaattgatccacccgcttcccaaagtgctgggattacaggcatgagacaccgcgcctggccttatcttgcactttcaacataatcatccctgcttctcatctgccctgcagtgctcttggacctggaagatctccctgtggtctggcccctttgccttggttgttaacctccagcttctttgcaggagtgtatttccccaaaacttgtggctttcacagtagactccgtttccatcctctctctcacaaaggatgttaagtatgcctggccctcacacagtccatgggaaaccttatttttaacattactccattgagtcaataaatatttaccatctgctgtgtgcaagttactaggcaaatttctgtatccttgtccctaaaattcttgtctttaaattcattgtggaatttctttagacttcacactgacttttattactaaggtcacctttataccaactgccttcctcaaaatgcttataatgaaataacagaatcttgagttggaaacagcccaaagaaataatccaatgttgtactcagtgcagaattccctagaatttctaacaggttgtcattcagcttctgctaagccatgttcaaacagcttattccatttggaactgcactgatattaaaaaaaattccttatattgagctgaaatctacctatcttctaagtggtcttagttctgctctaatctctccttccaaaatctttggatcttttgaaaaaagttcctcccaagttcttttataagtgacatgacttttagaccccttcccatctttgtcaacaaaagtagggtgccagaccagtcacagaacactaaatgtcatccatgtttccttcagtagaaaccagcagttttaaaagaggtaagctgtgttcactaaagactgttccagcttgacaaatgcagagatataagtctctggtctttaatcactgtgggggccattttgtaaaacacacatactgtccagcagactcctttggtcatcccaaatacctctgaactccagggaagatgcattctaactccacgaacttacctattttgttaaccttgattagaccttctggagaagtaaccaatttgtccatcttaggagcaatttggaatgagagtttttatttttttctgtaacgcccatcctgcctgcagtagaccctttgggcttaagaggtcctacagattctaatagtttcctctttgtagatgtgttaacatatttaaaatacttaggacatggcctggtacgtgacagatggtgtttaacatcattgtcatatgaagaacactctctgtgggccaatggaggtgtgccttaaaattcttcatcttgcctgattttgtttgcataacttctggagagtctgtgtcctcctcatctaggccacctttccattttttgtgaaagatgaccttgtccctgcagtctccgccaggagtcacacagcttttcacagcagctgccatctttaattctttttcctgagattccagcaaggttgtgacattgtcacttttttgttctagactcttttaaattttctgcatttgcctgaaaagcacccctgtaagaatagatttctcatggctctaaaaattattcccaagaataccttacttggttcaaaagcagactgtttctcttcatttcatctcaaatcagacttctgggcaagatgttctttagagtaagcaaacctacaacctaaaaatctcttcaagaggcatctctggtcttgtgacgagacctcttcaaaaacccacagtaaaactcccctccctccagttggccaccagtctgccaccaaacatgaacaaattctgctgctaatcggtttcccttgtgatctggttcctgaggtcttcggatctgtgcaatgaattatttattgttttattaaaccgacagtggtgtcccagagaggaaccataaataaaatggaaatctggtgctgtgataaagtaataactagcattaatgagacctggttttcctttcagaaagtccagtatacctgtaacaaaggttaaagcaatttatatttaatttgcattctgatgttaacatttaaacagcaattctaacaaaaatgcatcgagtctaattcttacctctatcaaaaaacaactgtataaatttatgaccaacattaaaacaaaaacaaaatgtaaattttctctttagaaatgattaactggaaatgagtgagacagcaccttgtgggttttttagtaataaaaagctcttttcaaccaaattgtaagtcttccttcgaagttttttcctttggtctggctaatatacgctcctcacagcaaattatcattcattatttgggtgccacaggcccattaagcaaagaagaaaaagagaattttaatgtaaagtaagtttattaaattaaataagatcttgaaaatatgtatgatgggtcctgggcaggatgttctttttcatcaacgtaatctttctttaggagaggagtactcatttgcttgcaaaggccataatctgttcctggagaaaaaataaaagtgaatgaaactcttaacacagtaaggtgaagaaaataattattgtagataataatcacgtaggtattcttcccaagtgtccttgttttatttcagctaaaaaaagaaaaatatacatacatatacacacgttttagagacagggtctcactctgttgactgggctggagtgcagtggtgtgatcatagctcactgcagcctcaaactcctaggctcaagcaatcctccctccccagcctcctataaagtgctgggatta

SEQ ID NO: 293511 - DNA, 939 bp, Artificial Sequence
  derived and/or modified sequence
accaaggctctgctgaagtacactggagaagtcacttggatcccacccgcgatatttaagagttcttgcaagatcgacgttacatacttcccgtttgattaccagaattgcaccatgaagtttggcagctggtcctatgataaggccaagatcgatctagtacttatcgggtccagcatgaacttgaaggattactgggagtctggagaatgggcaatcataaaagcacccggatataagcacgatatcaagtacaactgttgtgaggaaatataccccgacatcacttactctctgtacatccggcgcctcccacttttttacactataaatcttatcattccctgtttgttaatatcttttttgacagtgctggttttttatctgcccagcgactgtggtgaaaaggtcactttgtgcatctctgtcctgctatctctcacggtcttcctactagtgattacagagacaataccgtctacaagcctggtaatcccactgattggtgaatatctgctctttaccatgatcttcgtgaccctctctatcgtcatcacggttttcgtgctgaacgtgcactataggactccaacaacccacactatgccctcatgggtgaaaactgttttcctcaacctcttaccgagggtcatgtttatgacgcggcccacatccaatgaaggtaatgcccagaaacccagaccactatacggtgcaagccccaaggcagctcggcgagagattaaggaggcaattcaatctgtgaagtacatagctgagaacatgaaagcccagaacgaggcaaaggagatccaggatgattggaaatatgtcgctatggttatcgacaggatttttctatgggtgttcaccctcgtgtgtatcctgggcaccgccggcctatttctccagccccttatggcccgagaagatgcctag

SEQ ID NO: 293512 - DNA, 939 bp, Artificial Sequence
  derived and/or modified sequence
accaaggccctgctgaagtacaccggggaggtgacctggatccccccagccatcttcaagagcagctgcaagattgatgtgacctacttcccctttgactaccagaactgcaccatgaagtttggctcctggagctatgacaaggccaagattgacctggtgctgattggcagctccatgaacctgaaggactactgggagagcggggagtgggccatcatcaaggcccctggctacaagcatgacatcaagtacaactgctgtgaggagatctacccagacatcacctacagcctgtacatccggcggctgcccctcttctacaccatcaacctgatcatcccctgcctgctgatctccttcctgactgtgctggtgttctacctgcccagcgactgtggggagaaggtgaccctgtgcatctctgtgctgctgagcctgaccgtcttcctgctggtgatcacagagaccatccccagcaccagcctggtgatccccctcatcggggagtacctgctcttcaccatgatctttgtgaccctgagcatcgtcatcaccgtgtttgtgctgaatgtgcactaccgcacccccaccacccacaccatgcccagctgggtgaagacagtgttcctgaacctgctgccccgggtgatgttcatgacccggcccaccagcaatgaaggaaatgcccagaagccccggcccctgtatggagccagccccaaggccgcccggcgggagatcaaggaggccatccagagcgtgaagtacatcgccgagaacatgaaggcccagaatgaggccaaggagatccaggatgactggaagtatgtggccatggtgattgaccgcatcttcctgtgggtgttcaccctggtgtgcatcctgggcacagctggcctcttcctgcagcccctgatggcccgggaggatgcctag

SEQ ID NO: 293513 - DNA, 939 bp, Artificial Sequence
  derived and/or modified sequence
accaaggccctgctgaagtacaccggcgaggtgacctggatcccccctgctatatttaagtccagctgcaaaattgacgtaacatatttccctttcgattaccagaactgtactatgaagtttggctcctggtcatatgacaaggcgaagatagatcttgtgttaatcggcagctctatgaaccttaaggattactgggagtcgggggaatgggccatcattaaagcacctgggtacaagcatgacatcaagtataactgctgcgaggagatttacccagatatcacttattctctgtacatccgccggctaccattattctatactataaaccttataataccatgcctgctgatctctttcctcactgtgctggtgttctatctcccatctgattgcggtgaaaaagtgacgctgtgcatctctgttttactcagtttgaccgtgtttctgttagtgatcactgaaacaatcccttcaacaagcctggtgattcccttaattggggagtatctcctgttcactatgatctttgtgacactgtctatagttatcaccgtgtttgtgttgaacgttcactaccgcacacccaccacccatacgatgcccagctgggtgaagacagtcttcctgaatctattgcccagagtgatgttcatgaccagacccactagtaacgagggtaacgcccaaaagccgcgtcctttgtacggcgcgtctccgaaagccgcgagaagggagattaaggaggccatacagagcgtcaaatacatagcagagaatatgaaggcccagaacgaggcgaaagagatccaggacgactggaaatacgttgctatggttattgaccgcatattcctatgggtcttcaccctcgtatgtatccttggcaccgccggattgtttttgcaacccctcatggcccgagaagacgcatag

SEQ ID NO: 293514 - DNA, 939 bp, Artificial Sequence
  derived and/or modified sequence
acaaaggccctgttgaagtataccggagaggtaacctggattcccccagcaattttcaagagcagctgtaagattgacgtaacatactttccatttgattaccagaactgcaccatgaagtttggcagctggagttacgacaaggcaaaaattgatctggtgctcataggatcatcaatgaacctgaaggattactgggaatcaggggagtgggctattattaaagccccagggtataaacatgacatcaagtacaactgctgtgaggagatttacccagatatcacctactccctgtacatccgtaggctgcccctgttttacacgatcaatctcattatcccatgcttactgattagcttcctcaccgttttggttttttacttaccgtctgactgtggcgagaaggtgaccctgtgcattagtgtgctgctaagtctgacagtgttcctgctggtgatcactgaaaccattccaagtacctctcttgtgattcctctaataggggaatatctgttgttcacgatgatttttgtgacccttagcatcgtgattacagtctttgtattaaacgtgcattacagaaccccaacaactcatacaatgccctcttgggtgaagacagtgtttctcaacttattgccacgtgttatgttcatgacgcgccctacaagtaatgagggcaatgcccagaagccaagaccgctgtacggagcaagtcctaaggccgcaaggcgggagattaaagaagcgatccagagcgtgaagtatatcgcagagaacatgaaggcgcagaatgaagccaaagaaatccaggatgattggaagtacgtcgctatggtgatagaccgcatttttctttgggtgtttaccttagtttgcattcttgggactgctggactcttcttacaacctctgatggccagagaggacgcctag

SEQ ID NO: 293515 - DNA, 2238 bp, Artificial Sequence
  derived and/or modified sequence
accaaagccttactcaagtacactggggaggtgacttggatacctccggccatctttaagagctcctgtaaaatcgacgtgacctacttcccgtttgattaccaaaactgtaccatgaagttcggttcctggtcctacgataaggcgaaaatcgatctggtcctgatcggctcttccatgaacctcaaggactattgggagagcggcgagtgggccatcatcaaagccccaggctacaaacacgacatcaagtacaactgctgcgaggagatctaccccgacatcacatactcgctgtacatccggcgcctgcccttgttctacaccatcaacctcatcatcccctgcctgctcatctccttcctcactgtgctcgtcttctacctgccctccgactgcggtgagaaggtgaccctgtgcatttctgtcctcctctccctgacggtgtttctcctggtgatcactgagaccatcccttccacctcgctggtcatccccctgattggagagtacctcctgttcaccatgatttttgtaaccttgtccatcgtcatcaccgtcttcgtgctcaacgtgcactacagaaccccgacgacacacacaatgccctcatgggtgaagactgtattcttgaacctgctccccagggtcatgttcatgaccaggccaacaagcaacgagggcaacgctcagaagccgaggcccctctacggtgccagtccaaaggctgcaaggagggaaatcaaagaagccatccaaagtgtcaagtatattgctgaaaatatgaaagcacaaaatgaagccaaagagattcaagatgattggaagtatgttgccatggtgattgatcgtatttttctgtgggttttcaccctggtgtgcattctagggacagcaggattgtttctgcaacccctgatggccagggaagatgcataagcactaagctgtgtgcctgcctgggagacttccttgtgtcagggcaggaggaggctgcttcctagtaagaacgtactttctgttatcaagctaccagctttgtttttggcatttcgaggtttacttattttccacttatcttggaatcatgcaaaaaaaaaaatgtcaagagtatttattaccgataaatgaacatttaactagcctttttggtatggtaaagagatgtcaaaatgtgattctatgtgattagtatgctatgctatggaatatacatgtaaaaatgtttccttttagttgttgaaacaaaactggatagaaaaatgctgttcagaaatatgaaaagtcattcagttatcactacagatctcccagtaatttttcttatttagcccataatctctttgaaggtttatactaattcagcaatcccccatcgttacccatttcttaccatgcatttctcgttctttactgggtctaaagggctatgcctccatttcagagagcttcaactacttctcttgcatacttctaaattataccatgagaaatcatgcctagttattcattgttaatataactgtcttagtacaccataaactgggtggattataaacaacagaaacttctcagttttggaggttgggaggtccaaggtcaaggcaccagcaaatttggtgtctggtgagggtcctcttcctcaaagggtgccttctagctgtgtcctcacatgactgaagggactagctatctctgtggggtctattttataagggcactaaccccattcatgagagcagagcccccatggcctaatcacctttccaaggccccaccttctatctaagacaatcacgctgggaataggtttcaacatatgaattgggggaggacacatttggaccacagcatgaacctttagaacagggtttctcagccttagcactatggacattttgggctggataaatatgtgttggtacagaatgggggtatcctgtgcattgtaggatctttagcagtaccctagcctcaactcactagatgccaatgacataccttgcttcttcaccagttatgataaccaagaatgtctccattgttaaatgttcccttaggagcaaaattgcccctggttgagaaacattgctttagacaaattgttaagagtatcatgtactacacttctgaaacttaacgtgatcatcaccactgacagatgattcacagagactgtttgaatcttgtctcactagtttttcctgtgcaaaaataaaatggacagaattgcagccc

SEQ ID NO: 293516 - DNA, 939 bp, Artificial Sequence
  derived and/or modified sequence
accaaggccctgctgaagtacaccggcgaggtgacctggatcccccccgccatcttcaagagcagctgcaagatcgacgtgacctacttccccttcgactaccagaactgcaccatgaagttcggcagctggagctacgacaaggccaagatcgacctggtgctgatcggcagcagcatgaacctgaaggactactgggagagcggcgagtgggccatcatcaaggcccccggctacaagcacgacatcaagtacaactgctgcgaggagatctaccccgacatcacctacagcctgtacatcagaagactgcccctgttctacaccatcaacctgatcatcccctgcctgctgatcagcttcctgaccgtgctggtgttctacctgcccagcgactgcggcgagaaggtgaccctgtgcatcagcgtgctgctgagcctgaccgtgttcctgctggtgatcaccgagaccatccccagcaccagcctggtgatccccctgatcggcgagtacctgctgttcaccatgatcttcgtgaccctgagcatcgtgatcaccgtgttcgtgctgaacgtgcactacagaacccccaccacccacaccatgcccagctgggtgaagaccgtgttcctgaacctgctgcccagagtgatgttcatgaccagacccaccagcaacgagggcaacgcccagaagcccagacccctgtacggcgccagccccaaggccgccagaagagagatcaaggaggccatccagagcgtgaagtacatcgccgagaacatgaaggcccagaacgaggccaaggagatccaggacgactggaagtacgtggccatggtgatcgacagaatcttcctgtgggtgttcaccctggtgtgcatcctgggcaccgccggcctgttcctgcagcccctgatggccagagaggacgcctag

SEQ ID NO: 293517 - DNA, 3525 bp, Artificial Sequence
  derived and/or modified sequence
gagcccggcaaggaccacgtgtgcagattcatcggctgcggcagaaacgacagattcaactacgtggtgatgcagctgcagggcagaaacctggccgacctgagaagaagccagagcagaggcaccttcaccatcagcaccaccctgagactgggcagacagatcctggagagcatcgagagcatccacagcgtgggcttcctgcacagagacatcaagcccagcaacttcgccatgggcagattccccagcacctgcagaaagtgctacatgctggacttcggcctggccagacagttcaccaacagctgcggcgacgtgagaccccccagagccgtggccggcttcagaggcaccgtgagatacgccagcatcaacgcccacagaaacagagagatgggcagacacgacgacctgtggagcctgttctacatgctggtggagttcgtggtgggccagctgccctggagaaagatcaaggacaaggagcaggtgggcagcatcaaggagagatacgaccacagactgatgctgaagcacctgccccccgagttcagcatcttcctggaccacatcagcagcctggactacttcaccaagcccgactaccagctgctgaccagcgtgttcgacaacagcatcaagaccttcggcgtgatcgagagcgaccccttcgactgggagaagaccggcaacgacggcagcctgaccaccaccaccaccagcaccaccccccagctgcacaccagactgacccccgccgccatcggcatcgccaacgccacccccatccccggcgacctgctgagagagaacaccgacgaggtgttccccgacgagcagctgagcgacggcgagaacggcatccccgtgggcgtgagccccgacaagctgcccggcagcctgggccaccccagaccccaggagaaggacgtgtgggaggagatggacgccaacaagaacaagatcaagctgggcatctgcaaggccgccaccgaggaggagaacagccacggccaggccaacggcctgctgaacgcccccagcctgggcagccccatcagagtgagaagcgagatcacccagcccgacagagacatccccctggtgagaaagctgagaagcatccacagcttcgagctggagaagagactgaccctggagcccaagcccgacaccgacaagttcctggagacctgcctggagaagatgcagaaggacaccagcgccggcaaggagagcatcctgcccgccctgctgcacaagccctgcgtgcccgccgtgagcagaaccgaccacatctggcactacgacgaggagtacctgcccgacgccagcaagcccgccagcgccaacacccccgagcaggccgacggcggcggcagcaacggcttcatcgccgtgaacctgagcagctgcaagcaggagatcgacagcaaggagtgggtgatcgtggacaaggagcaggacctgcaggacttcagaaccaacgaggccgtgggccacaagaccaccggcagccccagcgacgaggagcccgaggtgctgcaggtgctggaggccagcccccaggacgagaagctgcagctgggcccctgggccgagaacgaccacctgaagaaggagaccagcggcgtggtgctggccctgagcgccgagggcccccccaccgccgccagcgagcagtacaccgacagactggagctgcagcccggcgccgccagccagttcatcgccgccacccccaccagcctgatggaggcccaggccgagggccccctgaccgccatcaccatccccagacccagcgtggccagcacccagagcaccagcggcagcttccactgcggccagcagcccgagaagaaggacctgcagcccatggagcccaccgtggagctgtacagccccagagagaacttcagcggcctggtggtgaccgagggcgagccccccagcggcggcagcagaaccgacctgggcctgcagatcgaccacatcggccacgacatgctgcccaacatcagagagagcaacaagagccaggacctgggccccaaggagctgcccgaccacaacagactggtggtgagagagttcgagaacctgcccggcgagaccgaggagaagagcatcctgctggagagcgacaacgaggacgagaagctgagcagaggccagcactgcatcgagatcagcagcctgcccggcgacctggtgatcgtggagaaggaccacagcgccaccaccgagcccctggacgtgaccaagacccagaccttcagcgtggtgcccaaccaggacaagaacaacgagatcatgaagctgctgaccgtgggcaccagcgagatcagcagcagagacatcgacccccacgtggagggccagatcggccaggtggccgagatgcagaagaacaagatcagcaaggacgacgacatcatgagcgaggacctgcccggccaccagggcgacctgagcaccttcctgcaccaggagggcaagagagagaagatcacccccagaaacggcgagctgttccactgcgtgagcgagaacgagcacggcgcccccaccagaaaggacatggtgagaagcagcttcgtgaccagacacagcagaatccccgtgctggcccaggagatcgacagcaccctggagagcagcagccccgtgagcgccaaggagaagctgctgcagaagaaggcctaccagcccgacctggtgaagctgctggtggagaagagacagttcaagagcttcctgggcgacctgagcagcgccagcgacaagctgctggaggagaagctggccaccgtgcccgcccccttctgcgaggaggaggtgctgacccccttcagcagactgaccgtggacagccacctgagcagaagcgccgaggacagcttcctgagccccatcatcagccagagcagaaagagcaagatccccagacccgtgagctgggtgaacaccgaccaggtgaacagcagcaccagcagccagttcttccccagacccccccccggcaagccccccaccagacccggcgtggaggccagactgagaagatacaaggtgctgggcagcagcaacagcgacagcgacctgttcagcagactggcccagatcctgcagaacggcagccagaagcccagaagcaccacccagtgcaagagccccggcagcccccacaaccccaagaccccccccaagagccccgtggtgcccagaagaagccccagcgccagccccagaagcagcagcctgcccagaaccagcagcagcagccccagcagagccggcagaccccaccacgaccagagaagcagcagcccccacctgggcagaagcaagagcccccccagccacagcggcagcagcagcagcagaagaagctgccagcaggagcactgcaagcccagcaagaacggcctgaagggcagcggcagcctgcaccaccacagcgccagcaccaagaccccccagggcaagagcaagcccgccagcaagctgagcagatag

SEQ ID NO: 293518 - DNA, 3525 bp, Artificial Sequence
  derived and/or modified sequence
gagccgggcaaggatcacgtgtgcaggttcatcgggtgcggaagaaacgacaggttcaactacgtcgtgatgcagctgcagggcagaaatcttgctgaccttaggcgatcacaatcacgggggacctttactatcagcacaaccttgagattaggtagacagatactcgagagcatagagagcattcatagtgtgggatttctccatcgcgatatcaagccctccaatttcgctatgggccgcttccctagtacgtgtcgcaagtgctatatgttggactttgggctggcacgccagtttaccaattcttgcggagatgtcaggcctccacgggcggtggcaggatttcgcggcacagtgaggtacgccagcataaacgcgcaccggaaccgtgagatgggacgccacgatgacctttggtcactgttctatatgctggtggaattcgtcgtgggccaactgccatggcgtaaaataaaagataaggagcaggtgggcagtataaaagagcgttacgatcacagactgatgttaaaacacctcccacctgagttttctatctttttggaccacatctcttctttggactacttcactaaacccgattatcaattgctgacctctgttttcgacaacagcatcaagaccttcggggtgattgagagcgacccatttgattgggaaaagacggggaatgacggaagtctcaccaccacaactacatccaccactccccaattacatacacgtttaacacctgcggcaatcggcattgcaaatgcaactccgatccccggtgatctgctgcgcgaaaacaccgatgaagtgttcccggatgaacagctgagcgacggagagaatggcatccccgtcggggtcagccccgacaagctgcccggaagccttggccatccgagaccacaggaaaaagacgtgtgggaagaaatggatgcaaataagaacaagatcaaactaggtatttgtaaggccgccacagaggaagagaacagccacgggcaggctaacggtctcctgaacgctccaagcctgggaagccccattagggtcagatctgaaattacacaaccggacagagatatacctctcgtgcggaaactgaggagtatccattcgtttgagcttgaaaagcgcttgacccttgaacccaaacctgacaccgacaagtttttggagacctgtttggaaaaaatgcagaaggatacgagtgcaggcaaagagtccattctccctgccctcctccataaaccctgcgtgcccgctgtttctcgtactgatcacatttggcattatgatgaagaatacctcccagacgcgtccaagccagccagtgccaataccccagagcaggctgacggcggcggttcgaatgggtttattgcagtgaatctgtccagctgtaagcaggagatcgacagtaaggagtgggtgatcgtggataaagaacaggacctgcaagacttccgcactaacgaggctgtgggacacaagactaccggttctcccagcgatgaagagccggaagtactgcaagtgctggaggcttcaccacaggatgagaaactacagttgggtccgtgggctgaaaatgatcacctgaaaaaggaaacttctggcgtagttctcgccttgtctgctgaagggcctcccacagccgcttcagagcagtacaccgaccggcttgagttacaacctggggccgccagtcaatttatcgcagcgacgccgacatccctgatggaggcacaggccgaaggtccgctaacagcaatcactatcccacggccttcagtggccagtactcagtccacatccgggagctttcactgcggccagcagcccgagaaaaaggacctccagccaatggaacccacagtcgaactgtattctccccgagaaaatttttctgggttagttgtgactgagggagagcctccttcaggtggctcgcggacagatcttggcctgcagatcgaccacatcggacacgatatgctgccaaacatacgtgagtcgaataagtcccaggacctggggcctaaggaattgcccgaccataaccgcctggtggttcgggagtttgagaatttacctggagagacagaggagaagtccatcctccttgaatcggacaatgaggacgaaaaattaagccggggacagcattgcattgaaataagttctctcccgggcgacctcgtcattgtagagaaagatcactctgcaactacagagccgctggacgtcaccaagacacagacctttagtgtcgtcccaaatcaagataaaaacaacgaaataatgaaactcctcaccgtggggacctcagaaatctcctctcgcgatattgacccgcatgtggagggccaaattggccaggtggccgagatgcaaaagaacaaaatctcaaaggacgacgatattatgtcagaggatctgcctgggcaccagggcgacttatccacttttctccatcaggaaggcaaacgcgaaaagattactccccgcaatggtgaactttttcactgtgttagcgagaatgagcatggggctcctacacgtaaggatatggttaggagcagcttcgtgacccggcactctcgtattccggtcttagcccaggaaattgattccacactcgaaagctcctccccagtgtccgcaaaggagaagctgttgcagaagaaggcctaccaacctgacctggttaagctcctggttgagaaaagacaatttaagtcgtttttaggagatctctcatctgcctcggataagctcctggaagagaaactggcaaccgtgcctgcaccgttttgtgaggaagaggtgttgactcccttcagcagactgactgtggactctcatctgagccgcagtgccgaagacagcttcttatcccccatcatctctcagtctagaaaaagcaagattccccgtccagttagttgggttaatacagatcaggtgaacagttccacgagttctcaatttttcccaaggcccccacctgggaaaccacctacgcgccccggggtagaggccagattgcgaaggtataaagttctgggtagtagtaatagtgactcagacctgttctctcgcctcgcgcagattttacagaatggctctcagaaaccacgaagcactactcagtgcaaaagtcccggctcccctcataaccccaaaacaccacctaagagtcctgtagtcccccgtagatcaccgtccgctagtcccaggagctcctcgctgccacgcaccagtagttcgtcacctagccgagcaggtcgtccacaccacgatcaacggagtagttcacctcacctgggtcgtagcaagagtcctccctctcactccgggagcagctctagcagaaggtcgtgccaacaggagcattgcaaaccatccaagaacgggcttaagggatcagggtcgcttcatcaccactctgcctccaccaagactcctcagggaaagagcaaacctgcctccaaattgtcgagatag

SEQ ID NO: 293519 - DNA, 3525 bp, Artificial Sequence
  derived and/or modified sequence
gagcccgggaaggaccacgtgtgccgcttcatcggctgcggcagaaatgaccgcttcaactacgtggtgatgcagctgcagggcaggaacctggccgacctgcggcgcagccagagccggggcaccttcaccatcagcaccaccctgcggctgggccggcagatcctggagagcattgagagcatccacagcgtgggcttcctgcaccgggacatcaagcccagcaactttgccatgggccgcttccccagcacctgcaggaagtgctacatgctggactttggcctggcccggcagttcaccaacagctgtggagatgtgcggccccccagggctgtggccggcttccggggcaccgtgcgctatgccagcatcaatgcccacaggaaccgggagatgggcagacatgatgacctgtggagcctcttctacatgctggtggagtttgtggtgggccagctgccctggaggaagatcaaggacaaggagcaggtgggcagcatcaaggagagatatgaccaccggctgatgctgaagcacctgcccccagagttcagcatcttcctggaccacatcagcagcctggactacttcaccaagccagactaccagctgctgacctctgtgtttgacaacagcatcaagacctttggagtcatcgagagtgacccctttgactgggagaagacaggaaatgatggcagcctgaccaccaccaccaccagcaccaccccccagctgcacacccggctgaccccagctgccatcggcatcgccaatgccacccccatccctggggacctgctgagagaaaatacagatgaggtgtttcctgatgagcagctgagtgatggagaaaatggcatccctgtgggcgtgtccccagacaagctgcccggcagcctgggccacccccggccccaggagaaggatgtgtgggaggagatggatgccaacaagaacaagatcaagctgggcatctgcaaggccgccacagaggaggagaacagccacggccaggccaacggcctgctgaatgcccccagcctgggcagccccatccgggtgcgctctgagatcacccagcctgaccgggacatccccctggtgaggaagctgcggagcatccacagctttgagctggagaagaggctgaccctggagcccaagccagacacagacaagttcctggagacctgcctggagaagatgcagaaggacaccagcgctgggaaggagagcatcctgcctgccctgctgcacaagccctgtgtgcctgctgtgtccaggacagaccacatctggcactatgatgaggagtacctgcctgatgccagcaagccagccagcgccaacaccccagagcaggctgatggcggcggcagcaatggcttcatcgctgtgaacctgagcagctgcaagcaggagattgacagcaaggagtgggtgattgtggacaaggagcaggacctgcaggacttccgcaccaatgaagctgtgggccacaagaccaccggcagccccagtgatgaggagcctgaggtgctgcaggtgctggaggccagcccccaggatgagaagctgcagctgggcccctgggccgagaatgaccacctgaagaaggagaccagcggcgtggtgctggccctgtctgctgagggccccccaacagctgccagcgagcagtacacagaccggctggagctgcagcctggagctgccagccagttcatcgccgccacccccaccagcctgatggaggcccaggccgagggccccctgacagccatcaccatcccccggcccagcgtggccagcacccagagcaccagcggcagcttccactgcggccagcagcctgagaagaaggacctgcagcccatggagcccaccgtggagctgtacagcccccgggagaacttcagcggcctggtggtgacagaaggagagcccccatctgggggcagcaggacagacctgggcctgcagattgaccacatcggccatgacatgctgcccaacatccgggagagcaacaagagccaggacctgggccccaaggagctgcctgaccacaaccggctggtggtgcgggagtttgagaacctgcccggggagacagaggagaagagcatcctgctggagagtgacaatgaagatgagaagctgagccggggccagcactgcatcgagatcagcagcctgcccggggacctggtgattgtggagaaggaccacagcgccaccacagagcccctggatgtgaccaagacccagaccttctctgtggtgcccaaccaggacaagaacaatgagatcatgaagctgctgactgtgggcaccagcgagatcagcagccgggacatcgacccccacgtggagggccagatcggccaggtggccgagatgcagaagaacaagatcagcaaggatgatgacatcatgtctgaggacctgcccggccaccagggcgacctgagcaccttcctgcaccaggagggcaagcgggagaagatcaccccaagaaatggagagctgttccactgtgtgtctgaaaatgaacatggagcccccaccaggaaggacatggtgcgcagcagctttgtgaccaggcacagccgcatccctgtgctggcccaggagattgacagcaccctggagagcagcagccctgtgtctgccaaggagaagctgctgcagaagaaggcctaccagcctgacctggtgaagctgctggtggagaagaggcagttcaagagcttcctgggggacctgagcagcgccagtgacaagctgctggaggagaagctggccaccgtgcctgcccccttctgtgaggaggaggtgctgacccccttcagccggctgactgtggacagccacctgagccgctctgcagaagattccttcctgagccccatcatcagccagagcaggaagagcaagatccccaggcctgtgtcctgggtgaacacagaccaggtgaacagcagcaccagcagccagttcttccccaggcctcctcctgggaagccacccaccaggcctggggtggaggcccggctgcggcgctacaaggtgctgggcagcagcaacagcgacagcgacctcttcagccggctggcccagatcctgcagaatggcagccagaagcccaggagcaccacccagtgcaagagccctggcagcccccacaaccccaagaccccacccaagagccctgtggtgccccggcgcagccccagcgccagccccaggagcagcagcctgcccaggaccagcagcagcagccccagcagagctggccggccccaccacgaccagaggagcagcagcccccacctgggccgcagcaagagcccccccagccacagcggcagcagcagcagcagaagaagctgccagcaggagcactgcaagcccagcaagaatggcctgaagggcagcggcagcctgcaccaccacagcgccagcaccaagaccccccagggcaagagcaagccagccagcaagctgagcaggtag

SEQ ID NO: 293520 - DNA, 3525 bp, Artificial Sequence
  derived and/or modified sequence
gagcccggcaaggaccacgtgtgccggttcatcggctgcggccggaacgacaggttcaattacgtggttatgcagctccagggacgtaacctggcggatctgagaaggagccagtccaggggaactttcacgatttccactaccctgcgtctcgggcggcagattctcgaatccatagagtccattcactcagtcggatttctgcacagggacatcaaaccctccaatttcgcgatgggaagatttccttcgacctgccggaagtgctacatgctcgacttcggcttggccagacagtttaccaattcctgcggcgacgtcaggcccccccgagctgtagcggggtttagaggcacggtgagatacgctagcatcaacgcacatagaaatcgtgagatgggaagacatgatgacttgtggtctctcttttacatgctcgtcgagtttgtggtgggccagctgccttggcggaaaattaaggataaagagcaggtgggatctattaaagagagatacgaccatcgattgatgctgaagcatctcccgcctgaattctcaatttttctggatcacatttcctctctggactattttaccaagcctgactaccagcttctaacttcagtatttgataattctattaagacttttggagtgattgagtcagacccttttgactgggagaagacggggaatgacggaagtctcaccacaactaccacttcaaccacaccccagctacacacgagactgacacccgcggccattggaatagctaacgccacacctattcccggcgatctgctgcgggagaatactgacgaagtgttcccggatgaacagctttccgatggcgagaacgggatacccgtcggggtctcccctgataagctccccggctcactcggtcatccacgccctcaggaaaaggatgtgtgggaggaaatggatgccaataagaataagataaagttagggatatgtaaagctgcaactgaggaagagaactcccacggccaagccaacggcctgttaaatgctccttcactaggatcacccattagggtacgatccgagattactcaacctgatcgtgatattcctttggttcggaaactgaggtcaatacactcttttgagctggaaaagcgccttactctggaacctaagccagataccgacaagtttctggagacatgcctggaaaaaatgcagaaggatacctctgcaggcaaggaaagcattctgcccgccctgctgcacaagccctgcgttccggccgtctccaggactgatcatatctggcattatgacgaagagtacctcccagacgcgagtaagccggccagtgccaatacacctgaacaggcggacggcggtgggagcaacgggttcatagcggtcaaccttagcagctgcaaacaagagatagattccaaagaatgggtgatcgtggataaggagcaagatctgcaagacttccggaccaacgaggctgtcgggcacaagaccacaggaagtccttcggacgaggagcctgaagtgctgcaagttctagaagcaagtccacaggacgagaagcttcaattgggaccctgggctgaaaacgatcatcttaagaaggaaacctccggagttgtgcttgctttgtcggctgagggcccacccactgctgcctcagaacaatacaccgacaggctggaactgcagcccggtgcggcaagtcagtttatagccgccacacctactagcctgatggaagcacaagccgagggaccactcaccgccatcacgattccccgccccagcgttgcaagtacccagagcacctccggaagcttccactgcggtcagcagcccgaaaagaaggatcttcaacctatggagcctacagttgagctgtactcaccacgggagaactttagtgggttagtggtgactgagggagaaccaccatctggtggcagccgcacagatctgggactgcagatcgaccacattgggcacgacatgctcccaaatattcgggagtcgaacaaaagccaagacctgggccccaaagaattaccagaccacaatcggttagtcgtgcgagagtttgagaaccttccaggagagacagaagaaaaatccatcctgctcgaaagcgacaatgaagacgaaaagctctcacggggacagcactgtatcgagatttcatctctgccaggagaccttgttatcgtggaaaaggaccactctgctacgactgaacctttggatgtcacaaaaacacagacgttctctgtcgtacctaatcaagataagaacaatgaaatcatgaaacttctgaccgtggggacctcagagatatcaagtcgcgacatagacccccacgtcgaaggacaaattggtcaggtcgccgagatgcagaagaacaagatctcaaaggacgatgacattatgtccgaagatcttccaggacatcagggggacttgagtacctttctacaccaagagggcaagcgggaaaaaatcactcctaggaatggagaactgttccactgtgttagtgaaaacgagcacggggccccgacccgcaaagatatggtacggagtagcttcgtgacccgccactcccggattcccgtactggcgcaggagatagactccactcttgagagctctagccccgtgagcgctaaggaaaagctgctccaaaagaaggcatatcagcctgatttagtgaagctgctggtcgaaaagcgacagtttaagagtttcctaggggacctgtccagtgcctccgacaagctgctcgaagagaagctagccacagttccagccccattttgtgaagaggaagtcttaacccccttctcacgactgactgtggactcccatcttagtaggagcgcggaggattctttcctgtctccaattatcagccagagcaggaagtccaaaatccccaggcctgtttcttgggttaacaccgaccaggtgaactctagtactagcagtcagttttttccacggcccccccccggcaaaccccccacaaggcccggcgtggaggcccgcctgcgtagatataaggttctgggttcctccaactccgacagcgatcttttttcaagattggcccagattctgcagaacggcagccagaaaccacgaagcaccacacagtgcaagagccctggctctccccataatcctaagactcctcctaaatcgcccgttgtgcctcggcgatcaccgagcgccagccctagatcctccagcctgcctcgcacttcatcctcgtctcccagccgggccggacggccacaccacgatcagaggtcctcatcaccccacttaggcaggtccaaaagccctccatctcacagtgggtcctcatcttctaggcgctcctgccagcaggagcactgtaagccttccaagaatgggctgaaggggagcggctccctgcaccatcatagtgcctccactaaaaccccccagggaaagtctaaacctgcctcaaagctgtcccgttag

SEQ ID NO: 293521 - DNA, 3525 bp, Artificial Sequence
  derived and/or modified sequence
gagccaggtaaggatcacgtttgtcgtttcattgggtgtggcaggaatgacaggttcaattacgtcgtgatgcagttacagggtcggaacctggctgatctcagacggtcacagtcccgaggaacattcaccatttccacaaccctgagactgggaagacaaattcttgaatctatagaatccatccactccgtcggcttcctccacagggatatcaaacctagcaattttgctatgggtagatttccctccacatgcagaaagtgctacatgctggacttcggactggccagacagtttactaactcttgtggcgacgtccgcccaccacgggcagtggcagggttcagagggactgtgcgttatgccagtattaatgcccatagaaaccgggagatggggagacacgatgacctctggagcctattctacatgctcgttgagttcgtcgttgggcagttgccttggaggaaaattaaggataaagaacaggtaggcagcattaaggaaagatacgaccatcgacttatgctgaagcatcttcctcctgagttttccatctttttggatcatatttctagcctggactatttcacaaaacctgactatcagctcctgaccagcgtttttgacaacagcatcaaaacctttggcgtcatcgagagcgatccatttgactgggagaaaacaggcaacgacgggagccttaccaccacaactaccagcacaactccgcagcttcatacccggttgacaccagcagctatcggaattgctaacgccaccccgattcccggagatctactgagagagaacacagatgaagtgttcccagacgagcagctgagtgacggagagaatggtatcccagtcggcgtctccccagataagttacctgggtccttaggccaccctagaccacaggagaaggacgtgtgggaggaaatggacgccaataaaaacaaaatcaagctggggatttgcaaggcagctaccgaggaagagaactctcatggccaggccaacggcctgctgaacgcgccatccctgggatcccccattagggtgaggtccgaaataactcagcctgaccgcgatattccgctggttcgcaagttgcggtcaatccacagtttcgaactggaaaaaagattgactctggagccaaaacctgacactgataagttcctggagacctgtctggagaaaatgcagaaagacaccagcgcaggcaaagaaagtatcctaccagctctcctccacaaaccttgtgtgcccgctgtgtcccgcaccgaccacatttggcattacgatgaagaatatctgcccgacgccagcaaacctgctagtgccaacaccccagagcaggctgatggaggagggagcaatgggtttattgctgtgaatctgtcttcatgtaaacaggagatcgattcgaaagaatgggttattgtggataaagagcaggatctgcaggactttcgaaccaatgaggctgtaggacacaagacaacgggtagcccctcggacgaggagccagaggttctccaggttctggaggcgtcacctcaggacgagaaattacagttgggcccatgggcggagaatgatcacctgaagaaggaaactagcggggtggtactggccctgtctgctgagggacctcccaccgccgcatcggagcagtacacagaccgcttagaactgcagcccggagcggcttcgcagtttatcgccgcaacgccgacctccctgatggaggcccaggctgaagggcctttaaccgccataactattcccagaccctccgtcgctagcacccagtctacatccgggagcttccattgtggacagcagcccgaaaaaaaggatttacagcctatggaaccaaccgtagagctgtattcacctcgcgagaatttttcagggttggtggtcacagagggcgagccaccctcaggcggatcaaggacagacctcggacttcaaattgatcacatcggccacgacatgctcccgaacataagggaatcaaacaagtcccaggacctggggccaaaagaactccccgatcacaacaggctggtagtgagggagtttgaaaacttgccgggagaaacagaggaaaagtcaattctgctggaaagtgataacgaggacgagaaactctctcggggacaacattgcatcgaaataagcagcctaccgggtgatttagtcatcgtggagaaggaccattctgctacaaccgaaccccttgatgtaactaaaactcaaaccttttccgtggtgccgaaccaggataagaataacgagatcatgaaactgttaaccgtcggaaccagcgagatttccagcagagacatcgacccacatgtcgagggacagattggccaggtggcagaaatgcagaagaacaagatctctaaagacgatgatattatgtccgaagacttgccgggtcaccagggcgacctgtcaaccttcctccaccaggagggcaagagagaaaagatcacgcctagaaacggtgagttatttcattgcgtaagtgaaaacgagcatggggctcctacacggaaggatatggtcagatcttccttcgttacccggcatagcagaattcctgttttggctcaggagatcgactccactctggaaagctcaagccctgttagcgcaaaggagaaattactgcagaaaaaggcttaccagccagacttagtgaagctgcttgtggagaaacgtcagtttaagagcttcttgggggatctgtcaagtgcctctgacaagcttctggaggagaagttggcaaccgtgcccgctcctttttgcgaggaggaggtcctgacaccgttctcccgtttaaccgttgactcccatctgtcacggtcggctgaagactcttttctatccccaatcataagccagagcaggaagtccaagattccaaggcctgtcagttgggtgaataccgatcaagttaattctagtacctccagtcagttctttcctcgacctccgccaggaaagcctcctacccgccctggcgttgaagcccgactgcggaggtacaaggtactgggaagctccaatagcgattcggatctgttttcgaggctggcccagattctccaaaatggaagtcagaagcccagatctaccacccagtgtaagtccccaggttcgcctcataacccaaaaactccccctaagtccccagtcgttcctcgtcggtccccctcagcttcacctagaagctctagcctgccaaggaccagttccagtagcccttctagagccggaagaccccaccatgaccaacgctctagcagcccccacctgggcaggtctaaaagccctccgtcacacagcggaagctcctcgtcccgtaggagctgtcagcaggaacattgtaaaccaagtaagaacgggctgaagggatccgggagtctgcaccaccactcagcatccaccaagacccctcagggcaagtccaaaccagcttcaaaactgagccgctag

SEQ ID NO: 293522 - DNA, 4968 bp, Artificial Sequence
  derived and/or modified sequence
gagccagggaaagaccatgtttgtagatttattggctgtgggaggaatgatcgattcaactatgtggtcatgcagttgcagggtcggaatctggcagatcttcgccgtagccagtcccgaggcacattcaccattagtaccactctccggctgggtagacagattttggagtctattgaaagcattcattctgtgggattcttgcatcgagacatcaaaccgtcgaacttcgctatgggtcgctttcctagtacatgtaggaaatgttacatgcttgattttggcttggctcgacaatttaccaattcctgtggtgacgtcagaccacctcgagctgtggcaggttttcgagggacagttcgttatgcatcaatcaacgcacatcggaacagggaaatgggaagacatgatgacctttggtccttattctacatgttggtggagtttgtggttggtcagctgccctggagaaaaataaaggacaaggagcaagtaggctctattaaggagagatatgaccacaggctcatgttgaaacatctccctccagaattcagcatctttctagaccatatctcttctttggattattttacaaaaccagactaccagcttcttacatccgtgtttgacaatagcatcaagacttttggagtaattgagagtgacccttttgactgggagaagactggaaatgatggctccctaacaaccaccactacttctaccacccctcagttgcacactcgcttgacccctgctgcaattggaattgccaatgctactcccatccctggagacttgcttcgagaaaatacagatgaggtatttccagatgaacagcttagcgatggagaaaatggcatccctgttggtgtgtcaccagataaattgcctggatctctgggacacccccgtccccaggagaaggatgtttgggaagagatggatgccaacaaaaacaagataaagcttggaatttgtaaggctgctactgaagaggagaacagccatggccaggcaaatggtcttctcaatgctccaagccttgggtcaccaattcgtgtccgctcagagattactcagccagacagagatattccactggtgcgaaagttacgttccattcacagctttgagctggaaaaacgtctgaccctggagccaaagccagacactgacaagttccttgagacctgcctggagaaaatgcagaaagataccagtgcaggaaaagaatctattctccctgctctgctgcataagccttgcgttcctgctgtgtcccgtactgaccacatctggcactatgatgaagaatatcttccagatgcctccaagcctgcttctgccaacacccctgagcaggcagatggtggtggcagcaatggatttatagctgttaacctgagctcttgcaagcaagaaattgattccaaagaatgggtgattgtggacaaggagcaggaccttcaggattttaggacaaatgaggctgtaggacataaaacaactggaagtccttctgatgaggagcctgaagtacttcaagtcctggaggcatcacctcaagatgaaaagctccagttaggtccttgggcagaaaatgatcatttaaagaaggaaacctcaggtgtggtcttagcactttctgcagagggtcctcctactgctgcttcagaacaatatacagataggctggaactccagcctggagctgctagtcagtttattgcagcgacgcccacaagtctaatggaggcgcaggcagaaggaccccttacagcgattacaattcctagaccttctgtggcatctacacagtcaacttcaggaagctttcactgtggtcagcagccagagaagaaagatcttcagcccatggagcccactgtggaactttactctccaagggaaaacttctctggcttggttgtgacagagggtgaacctcctagtggaggaagcagaacagatttggggcttcagatagatcacattggtcatgacatgttacccaacattagagaaagtaacaaatctcaagacctgggaccaaaagaacttcctgatcataatagactggttgtgagagaatttgaaaatctccctggggaaactgaagagaaaagcatccttttagagtcagataatgaagatgagaagttaagtagagggcagcattgtattgagatctcctctctcccaggagatttggtaattgtggaaaaggatcactcagctactactgaacctcttgatgtgacaaaaacacagacttttagtgtggtgccaaatcaagacaaaaataatgagataatgaagcttctgacagttggaacttcagaaatttcttccagagacattgacccacatgttgaaggtcagataggccaagtggcagaaatgcaaaaaaataagatatctaaggatgatgacatcatgagtgaagacttgccaggtcatcaaggagacctctctacttttttgcaccaagagggcaagagagagaaaatcacccctagaaatggagaactatttcattgtgtttcagagaatgaacatggtgccccaacccggaaggatatggttaggtcatcctttgtaactagacacagccgaatccctgttttagcacaagagatagactcaactttggaatcatcctctccagtttctgcaaaagaaaagctcctccaaaagaaagcctatcagccagacctagtcaagcttctggtggaaaaaagacaattcaagtccttccttggcgacctctcaagtgcctctgataaattgctagaggagaaactagctactgttcctgctcccttttgtgaggaggaagtgctcactcccttttcaagactgacagtagattctcacctgagtaggtcagctgaagatagctttctgtcacccatcatctcccagtctagaaagagcaaaattccaaggccagtttcatgggtcaacacagatcaggtcaatagctcaacttcgtctcagttctttcctcggccaccaccaggaaagccacccacgaggcctggagtagaagccaggctacgcagatataaagtcctagggagtagtaactccgactcagaccttttctcccgcctggcccaaattcttcaaaatggatctcagaaaccccggagcactactcagtgcaagagtccaggatctcctcacaatccaaaaacaccacccaagagtccagttgtccctcgcaggagtcccagtgcctctcctcgaagctcatccttgcctcgcacgtctagttcctcaccatctagggctggacggccccaccatgaccagaggagttcgtccccacatctggggagaagcaagtcacctcccagccactcaggatcttcctcctccaggaggtcctgccaacaggagcattgcaaacccagcaagaatggcctgaaaggatccggcagcctccaccaccactcagccagcactaaaaccccccaagggaagagtaagccagccagtaaactcagcagataggagccaggctgcatctctttgaaaggtgtgagatcttcctcctaaacctgatgcatgtgtgtccctgtactttctatgtaaaaaaatcagtgttgatcttctcttgcaaaagaaagtaacatgatcaattatttataagaagacataatacatgataaggaattacctaaggcaggcagcaagtagattaggaatcaatgtctttgtacaagaaggaaaaatagagcaaaaatccaagggggagaaactcattaaaatgagctctcattttttaagctgcctttgaaacaaaagagttgaggataggagatagaatggaattttaggggggttgcctaatttttttaagcctcaattcaaagattatatagcaaaagtgaaacttcttgtttgatattttcattcaaaactttcccaccctgaagagtcattgatcagatattagattatataagaagtctgttgccagggagccagtattcatgtatatttggcttgtgtgtttatttcgtgtattgagaatgaacacctttactttgcctcattcctagtaccctccctggagttcagatttttttttaaaattttgtatgtctcgtctgattcaatctctctgcttttattttatggtcctagttgtactatcaaatccaattacttttttttaggtccccctgattttttttttttagagcaagagttcttaacatattacatttttattatgaaaaataagaaagttaggtaaaggaaagaaaagtctaactagagctattttgcaggctttagtgtttagggagagaaagaaagtgtgggttaatagccttcaagatagaagatgccctttcatctctgttaagtgtcctcctttagaaacttgagtagaaggaaaactgaccagagtagactgcttccttaagtcttctgggttccaactgtttgtaatatcagcatccaagatgatacgagggaagcacaatgctttggactgtgatttgagatttagaaataaattagatatattattgaggcttagaatcctcaaactttgtattttatacatttagccaataaggaattaatatctggggaaataaatttaggcaaatatttcttttttaatgttttattacctgcttctcctgtgttttagttcaacatttgggcttcttggcctgattttcatacaatctcaatttacgaagctgtaaagaggaagatatttgttctaatctcactcttctaataggaatcaggcaaatgaaagtctaccagacttttaaaatgggctgtttttatactctctaggtgttttgtgttgtaaagaccttattaaggtcaggtaaattggtctgcttgctgttgaaatttgccttctagcaaacatatgtgctttctgtttgaccttgtgtttgctgccaaacctaatacagttgaattggg

SEQ ID NO: 293523 - DNA, 104 bp, Artificial Sequence
  derived and/or modified sequence
aatggaatcattgaatggaatggaatggaatcatcaaagaaaggaatcgaagggaatcatcgaatggaatcaaacggaatcatcgaatggaatggaatggaatg

SEQ ID NO: 293524 - protein, 235 aa, Artificial Sequence
  derived and/or modified sequence
MAEKVNNFPPLPKFIPLKPCFYQDFEADIPPQHVSMTKRLYYLWMLNSVTLAVNLVGCLAWLIGGGGATNFGLAFLWLILFTPCSYVCWFRPIYKAFKTDSSFSFMAFFFTFMAQLVISIIQAVGIPGWGVCGWIATISFFGTNIGSAVVMLIPTVMFTVMAVFSFIALSMVHKFYRGSGGSFSKAQEEWTTGAWKNPHVQQAAQNAAMGAAQGAMNQPQTQYSATPNYTYSNEM

SEQ ID NO: 293525 - DNA, 3490 bp, Artificial Sequence
  derived and/or modified sequence
ctcgggcgcgcgcgcgcgcgcgcgcgctccccgcccccagccccggagcggctcgcggccggctccgcgccgcatcgctcgggtgcagcgcagctcagcgcagcgctgcggcctttcggcagccgaacggccgcggcagcatttcctttacaggctgcacttccttccctgctgccagccaggagtttcggaaggtttcctggaggaagtgtgatacagcagttcaggacaaagaggtgtgggcaggccactgggccagctggtaacatcatggcagagaaagtgaacaacttcccaccattgcccaaattcatcccgctgaagccatgtttctaccaagacttcgaggcagatattcctccccagcatgtcagcatgaccaagcgcctctactacctctggatgttgaacagcgtcacgctggccgtgaacctggtgggctgtctcgcgtggctgatcggaggcgggggagccaccaactttggcctcgcctttctctggctcatcctcttcacaccctgctcctacgtctgctggtttcggcccatttacaaggccttcaagactgacagctccttcagtttcatggcattcttctttaccttcatggctcagttggtcatcagcatcatccaggccgtgggcatcccaggctggggcgtctgcggctggattgctaccatctccttcttcggaacgaacattggctcggcggtggtgatgctaattcccactgtcatgttcacagtgatggccgtcttttccttcatcgccctcagcatggttcataaattttaccggggaagtggggggagtttcagcaaagctcaggaggagtggaccacaggggcctggaagaatccacatgtgcagcaggcagcccagaacgcagccatgggggcagcccagggtgccatgaatcagcctcagactcagtattccgccacccccaattacacgtactccaatgagatgtgaaccagccacgcctaccaggtggcagagctggggccattgggacagggggctcaagccacatcgtcatttgtggttaccaagcagggttcccccttcccttttctccttccctactttgtacaaaggaccagagttatatatatatatatatgtatatgtctgtaccccagcccccacctttcagattctgctcttggcactcagctgtgggctgcacgtggagctgtcccgtgcggtagtagctgtgtctgtgtcccctcgtgaaatagtgtgcagtggaggtctcttgtggtgctagatgtgtgtttagagctaaaccagcccccacccccaccctccacctgcccctcttgcctctggcccctctgaccctggcccagggacccctcacggggccaggggaggcatagcagaaagactggccccttcctagggttatgagctggaactgtttctactttcagtcttcctgggaagtaacagtacttagcactcttggtggtgggtgggagggtgggtacaggccagggatattcccttgctcttttgatccctccaggcctcgcctccttcagcctcctcctccctcatctgttccctgatgtcacattccctgtgcaatcttcccttgcccatggtctgtctatctctttcctatgtggcttttctttgtcttccccaaggctgagtgtcccagttttatctgctcctgagactgagcccagatccccaaatctaatctgatttacagttcaaggaagctgatggggagctgggccttacccctgatgtaggaggggcacacagctgggggtgcagagcccacctgggtacctgacccccaggggatgaaaatgcaaggatgagtctgcttgggcctgagagtttgatctgcaggggcaggctcatcttttctctcccctgccttctcctccttctctccccagagcccccttgagcccctctgcctatgtccctctgcctcctccccatgcccccagttgctgtggcttgattctgctaccctgaccccaccatgtgccaggtggcatctgccttactgccttccctgaggagctgggacatgctgggcagttgtcagatgtaaaggcacagctggagcagagggcatgtcagtaatgattggtccctggggaaggtctggctggctccagcacagtgaggcatttaggtatctctcggtgaccgttggattcctggaagcagtagctgttctgtttggatctggtaggacagggctcagagggctaggcacggagggaaggtcagaggagaaggcaggcagggcccagtgagaggggagcatgccttcccccaccctggcttgctcttggtcacagggcggttctgggcacttgaactcagggcccaagcagaagcacaggcccagtcctggctgcaagcacaatagcctgaatgggatttcaggttaggcagggtgggaggggaggctctctggctttagttttgttttgttttccaaatcaaggtaacttgctcccttctgcctacaggccttggtcttggcttgtcctcacccagtcggaactccctaccactttcaggagagtggttttaggcccgtggggctgttctgttccaagcagtgtgagaacatggctggtagaggctctagctgtgtgcggggcctgaaggggagtgggttctcgcccaaagagcatctgcccatttcccaccttcccttctcccaccagaagcttgcctgagctgtttggacaaaaatccaaaccccacttggctactctggcctggcttcagcttggaacccaatacctaggcttacaggccatcctgagccaggggcctctggaaattctcttcctgatggtcctttaggtttgggcacaaaatataattgcctctcccctctcccattttctctcttgggagcaatggtcacagtccctggtacctgaaaaggtacctaggtctaggcccttcttccctttcccttcctctcccctaccccagaactttggctccctttcccttctctctctggtagctccaggaggcctgtgatccagctccctgcctagcatccatgacctgttggatgttacctccaatcagtttcctgtcctacctgcctctttggcttggacctatatggccatgctctggctctacccttgggaagcctgatcccggtgtgtggcccagcttgttcaggccctgggatgctgcatctccaggcaactatgcactttcccggggagagaaccagtatgagaagtgggggcagggcacacattcatctttgtaggaaggtctggcctggggtcgggtgaaggagggcccaggtcagttctggggtcccagtgacctgctttgccattctcctggtgccgctgctgctccctgtttctggagctggatgttccccagctggcagttgagctgcctgagccaatgtgtctgtctttggtaactgagtgaaccataataaaggggaacatttggccctgtg

SEQ ID NO: 293526 - DNA, 3407 bp, Artificial Sequence
  derived and/or modified sequence
ctcgggcgcgcgcgcgcgcgcgcgcgctccccgcccccagccccggagcggctcgcggccggctccgcgccgcatcgctcgggtgcagcgcagctcagcgcagcgctgcggcctttcggcagccgaacggccgcggcagttcaggacaaagaggtgtgggcaggccactgggccagctggtaacatcatggcagagaaagtgaacaacttcccaccattgcccaaattcatcccgctgaagccatgtttctaccaagacttcgaggcagatattcctccccagcatgtcagcatgaccaagcgcctctactacctctggatgttgaacagcgtcacgctggccgtgaacctggtgggctgtctcgcgtggctgatcggaggcgggggagccaccaactttggcctcgcctttctctggctcatcctcttcacaccctgctcctacgtctgctggtttcggcccatttacaaggccttcaagactgacagctccttcagtttcatggcattcttctttaccttcatggctcagttggtcatcagcatcatccaggccgtgggcatcccaggctggggcgtctgcggctggattgctaccatctccttcttcggaacgaacattggctcggcggtggtgatgctaattcccactgtcatgttcacagtgatggccgtcttttccttcatcgccctcagcatggttcataaattttaccggggaagtggggggagtttcagcaaagctcaggaggagtggaccacaggggcctggaagaatccacatgtgcagcaggcagcccagaacgcagccatgggggcagcccagggtgccatgaatcagcctcagactcagtattccgccacccccaattacacgtactccaatgagatgtgaaccagccacgcctaccaggtggcagagctggggccattgggacagggggctcaagccacatcgtcatttgtggttaccaagcagggttcccccttcccttttctccttccctactttgtacaaaggaccagagttatatatatatatatatgtatatgtctgtaccccagcccccacctttcagattctgctcttggcactcagctgtgggctgcacgtggagctgtcccgtgcggtagtagctgtgtctgtgtcccctcgtgaaatagtgtgcagtggaggtctcttgtggtgctagatgtgtgtttagagctaaaccagcccccacccccaccctccacctgcccctcttgcctctggcccctctgaccctggcccagggacccctcacggggccaggggaggcatagcagaaagactggccccttcctagggttatgagctggaactgtttctactttcagtcttcctgggaagtaacagtacttagcactcttggtggtgggtgggagggtgggtacaggccagggatattcccttgctcttttgatccctccaggcctcgcctccttcagcctcctcctccctcatctgttccctgatgtcacattccctgtgcaatcttcccttgcccatggtctgtctatctctttcctatgtggcttttctttgtcttccccaaggctgagtgtcccagttttatctgctcctgagactgagcccagatccccaaatctaatctgatttacagttcaaggaagctgatggggagctgggccttacccctgatgtaggaggggcacacagctgggggtgcagagcccacctgggtacctgacccccaggggatgaaaatgcaaggatgagtctgcttgggcctgagagtttgatctgcaggggcaggctcatcttttctctcccctgccttctcctccttctctccccagagcccccttgagcccctctgcctatgtccctctgcctcctccccatgcccccagttgctgtggcttgattctgctaccctgaccccaccatgtgccaggtggcatctgccttactgccttccctgaggagctgggacatgctgggcagttgtcagatgtaaaggcacagctggagcagagggcatgtcagtaatgattggtccctggggaaggtctggctggctccagcacagtgaggcatttaggtatctctcggtgaccgttggattcctggaagcagtagctgttctgtttggatctggtaggacagggctcagagggctaggcacggagggaaggtcagaggagaaggcaggcagggcccagtgagaggggagcatgccttcccccaccctggcttgctcttggtcacagggcggttctgggcacttgaactcagggcccaagcagaagcacaggcccagtcctggctgcaagcacaatagcctgaatgggatttcaggttaggcagggtgggaggggaggctctctggctttagttttgttttgttttccaaatcaaggtaacttgctcccttctgcctacaggccttggtcttggcttgtcctcacccagtcggaactccctaccactttcaggagagtggttttaggcccgtggggctgttctgttccaagcagtgtgagaacatggctggtagaggctctagctgtgtgcggggcctgaaggggagtgggttctcgcccaaagagcatctgcccatttcccaccttcccttctcccaccagaagcttgcctgagctgtttggacaaaaatccaaaccccacttggctactctggcctggcttcagcttggaacccaatacctaggcttacaggccatcctgagccaggggcctctggaaattctcttcctgatggtcctttaggtttgggcacaaaatataattgcctctcccctctcccattttctctcttgggagcaatggtcacagtccctggtacctgaaaaggtacctaggtctaggcccttcttccctttcccttcctctcccctaccccagaactttggctccctttcccttctctctctggtagctccaggaggcctgtgatccagctccctgcctagcatccatgacctgttggatgttacctccaatcagtttcctgtcctacctgcctctttggcttggacctatatggccatgctctggctctacccttgggaagcctgatcccggtgtgtggcccagcttgttcaggccctgggatgctgcatctccaggcaactatgcactttcccggggagagaaccagtatgagaagtgggggcagggcacacattcatctttgtaggaaggtctggcctggggtcgggtgaaggagggcccaggtcagttctggggtcccagtgacctgctttgccattctcctggtgccgctgctgctccctgtttctggagctggatgttccccagctggcagttgagctgcctgagccaatgtgtctgtctttggtaactgagtgaaccataataaaggggaacatttggccctgtg

SEQ ID NO: 293527 - protein, 1710 aa, Artificial Sequence
  derived and/or modified sequence
MSLDFGSVALPVQNEDEEYDEEDYEREKELQQLLTDLPHDMLDDDLSSPELQYSDCSEDGTDGQPHHPEQLEMSWNEQMLPKSQSVNGYNEIQSLYAGEKCGNVWEENRSKTEDRHPVYHPEEGGDEGGSGYSPPSKCEQTDLYHLPENFRPYTNGQKQEFNNQATNVIKFSDPQWNHFQGPSCQGLEPYNKVTYKPYQSSAQNNGSPAQEITGSDTFEGLQQQFLGANENSAENMQIIQLQVLNKAKERQLENLIEKLNESERQIRYLNHQLVIIKDEKDGLTLSLRESQKLFQNGKEREIQLEAQIKALETQIQALKVNEEQMIKKSRTTEMALESLKQQLVDLHHSESLQRAREQHESIVMGLTKKYEEQVLSLQKNLDATVTALKEQEDICSRLKDHVKQLERNQEAIKLEKTEIINKLTRSLEESQKQCAHLLQSGSVQEVAQLQFQLQQAQKAHAMSANMNKALQEELTELKDEISLYESAAKLGIHPSDSEGELNIELTESYVDLGIKKVNWKKSKVTSIVQEEDPNEELSKDEFILKLKAEVQRLLGSNSMKRHLVSQLQNDLKDCHKKIEDLHQVKKDEKSIEVETKTDTSEKPKNQLWPESSTSDVVRDDILLLKNEIQVLQQQNQELKETEGKLRNTNQDLCNQMRQMVQDFDHDKQEAVDRCERTYQQHHEAMKTQIRESLLAKHALEKQQLFEAYERTHLQLRSELDKLNKEVTAVQECYLEVCREKDNLELTLRKTTEKEQQTQEKIKEKLIQQLEKEWQSKLDQTIKAMKKKTLDCGSQTDQVTTSDVISKKEMAIMIEEQKCTIQQNLEQEKDIAIKGAMKKLEIELELKHCENITKQVEIAVQNAHQRWLGELPELAEYQALVKAEQKKWEEQHEVSVNKRISFAVSEAKEKWKSELENMRKNILPGKELEEKIHSLQKELELKNEEVPVVIRAELAKARSEWNKEKQEEIHRIQEQNEQDYRQFLDDHRNKINEVLAAAKEDFMKQKTELLLQKETELQTCLDQSRREWTMQEAKRIQLEIYQYEEDILTVLGVLLSDTQKEHISDSEDKQLLEIMSTCSSKWMSVQYFEKLKGCIQKAFQDTLPLLVENADPEWKKRNMAELSKDSASQGTGQGDPGPAAGHHAQPLALQATEAEADKKKVLEIKDLCCGHCFQELEKAKQECQDLKGKLEKCCRHLQHLERKHKAVVEKIGEENNKVVEELIEENNDMKNKLEELQTLCKTPPRSLSAGAIENACLPCSGGALEELRGQYIKAVKKIKCDMLRYIQESKERAAEMVKAEVLRERQETARKMRKYYLICLQQILQDDGKEGAEKKIMNAASKLATMAKLLETPISSKSQSKTTQSALPLTSEMLIAVKKSKRNDVNQKIPCCIESKSNSVNTITRTLCEQAPKRRAACNLQRLLENSEHQSIKHVGSKETHLEFQFGDGSCKHLNSLPRNVSPEFVPCEGEGGFGLHKKKDLLSDNGSESLPHSAAYPFLGTLGNKPSPRCTPGPSESGCMHITFRDSNERLGLKVYKCNPLMESENAASEKSQGLDVQEPPVKDGGDLSDCLGWPSSSATLSFDSREASFVHGRPQGTLEIPSESVKSKQFSPSGYLSDTEESNMICQTMKCQRYQTPYLSEETTYLEPGKISVNCGHPSRHKADRLKSDFKKLSSTLPSSVCQQPSRKLIVPLSSQQDSGFDSPFVNLD

SEQ ID NO: 293528 - DNA, 5133 bp, Artificial Sequence
  derived and/or modified sequence
atgagtctggattttggttccgtcgctttgccggtgcagaacgaggatgaggagtacgatgaggaggattatgagcgagagaaggaactccaacagctcttaactgatctgccacacgatatgctagacgacgatctgtcgtcacctgaactgcaatacagtgactgtagcgaagatggcacagatggacagccgcaccacccagaacaattggaaatgagttggaatgagcagatgctcccaaagtcccaaagcgtgaacggctacaatgagattcaatctctgtacgccggggagaaatgtggaaacgtctgggaagaaaatcgaagcaaaacagaagacagacaccccgtgtatcatcccgaagaaggcggggacgagggcggttccggttactcaccaccctcaaagtgtgaacaaaccgatctgtatcatctgcctgaaaattttcggccttataccaatggtcagaaacaggaattcaataaccaagcgaccaacgtaatcaagttcagtgatccccagtggaaccacttccagggaccatcgtgccaggggctcgagccttacaataaagtgacctacaagccctaccagagctcagcacagaataacggctctcccgcccaggaaattactgggtccgataccttcgagggtttgcaacagcaattcctgggcgctaatgaaaatagcgccgagaatatgcagattatacagttgcaggtgcttaacaaagcgaaagagagacaactggagaacctcattgaaaagctaaatgaatccgagaggcagataaggtaccttaaccaccaattggtcattattaaggacgagaaagacgggctgacccttagtctccgggagtcccagaagttatttcagaacggcaaagagcgcgagatacagttggaggcacaaattaaggcacttgagactcagattcaagcccttaaggtgaatgaggagcagatgataaagaaatcccggactaccgagatggccctcgaatctctgaaacagcagttagtcgacctgcaccacagtgagagcctccagcgtgcccgcgagcagcacgaatccatagtgatgggattaacaaagaagtatgaggaacaggtcctgtccctgcagaaaaatctggacgcgaccgttaccgccctcaaggaacaggaagatatatgttctagactcaaagaccacgtgaaacagcttgaacggaaccaagaggcgatcaagctggagaagacagagatcattaacaaattgacacgaagcttggaagaatcccagaagcagtgcgcccatctgcttcagtctggaagtgtccaagaggttgctcagctgcaatttcagctgcagcaggctcagaaagcacatgccatgtccgctaacatgaataaagctcttcaagaagagctcaccgagctgaaggacgaaattagtctctatgagagcgctgctaagctgggaattcatccatccgactctgagggggagctgaacatagaactaaccgagtcatatgtcgacctggggatcaagaaagtcaattggaaaaaaagtaaggttacatcgatcgtccaggaggaggaccccaacgaagagttgtcgaaagatgagtttatcctgaaattgaaggccgaagtccagcgacttctggggtccaattcaatgaagcggcatctcgtctcccagcttcagaacgacctcaaggattgccataagaagattgaggacctgcaccaggttaaaaaagacgaaaagtcaattgaggttgagaccaagacggatacaagcgagaagcccaaaaatcaactctggcccgagagctcaacatctgatgtcgtgagagatgacatactgctcttgaagaatgaaatccaagtgctccagcagcagaatcaagagctcaaggaaacagagggtaaactgcggaatacgaatcaggacctgtgtaatcagatgagacaaatggtccaggatttcgatcacgacaagcaggaggccgtcgacaggtgcgagcgaacttaccaacagcatcatgaggcgatgaagacacagatcagggagagtctgctggccaagcatgctctagagaaacagcagctgtttgaagcatacgaacgaactcacctgcagctcagatccgaactggataaattgaataaagaggttacggctgttcaagagtgctacctcgaagtgtgtagggaaaaagacaacctggaacttacactgaggaaaactaccgaaaaagaacagcagacacaggagaagataaaggagaaattaattcagcagctggaaaaggagtggcaatcaaagttagatcagacaattaaggcaatgaaaaagaaaactctggattgtggctcgcagaccgaccaagttacgacatcagatgtcatcagcaagaaagagatggccattatgatcgaagagcagaagtgtaccattcagcaaaacctcgaacaagagaaggacattgcgatcaaaggcgccatgaagaaactggagatagagctcgaattaaagcattgcgaaaacataaccaagcaagtggagatagctgtgcagaacgcgcaccaacgctggctcggcgagcttcccgagcttgccgaataccaggcactggttaaagctgaacagaaaaagtgggaggagcagcacgaagtcagcgttaacaagagaatcagcttcgccgtctctgaagccaaagagaagtggaagtcagagctggagaatatgcggaaaaacatattgcctgggaaggagcttgaggagaaaatccactctcttcagaaggaattagagctgaagaacgaggaggtccccgtggtcatcagagccgagctggccaaggcgaggtctgagtggaataaggaaaaacaggaagaaattcatcgaatccaggagcaaaacgagcaggattaccgccaattcttggatgaccaccgcaacaagattaatgaagttctggcagccgccaaggaagacttcatgaagcagaaaacagagctcctgctgcagaaggagaccgaactgcagacttgtctggatcaaagcaggcgagaatggactatgcaagaggctaagaggatacagttggaaatttaccaatatgaagaggatattttaactgtgttgggtgttctcctatctgacacccagaaggaacacattagtgatagcgaagataagcagcttcttgaaattatgtctacatgttcatctaaatggatgtccgtgcaatactttgagaagctgaagggctgtatacagaaggcgtttcaggatacactgccgctcctggttgaaaatgccgacccagagtggaagaagaggaacatggccgaactgtcaaaggattctgcctcgcagggtacaggtcaaggtgatcctggcccagcggcggggcaccacgcccagcccttggccctgcaggctactgaggccgaagcagacaaaaagaaagtgttggagattaaggatttgtgctgcggtcactgctttcaagagctggagaaagccaaacaggagtgccaagatctgaaaggaaaactggaaaagtgctgtaggcacttacagcacttggaaaggaagcataaggccgttgttgagaagatcggggaagaaaacaacaaggtagtggaggagctgatcgaagagaataacgacatgaaaaataaactggaggaactccaaactctctgcaaaacaccccctaggagtttgtcagctggagccattgagaatgcctgcctcccgtgctctgggggggctttagaggaactccggggacagtatatcaaggccgtgaaaaaaatcaaatgtgatatgctgaggtacatacaggagagcaaagagcgcgcagctgagatggtgaaagcagaggtccttagagaacggcaggaaactgcccggaaaatgcggaagtattatctgatttgtctgcaacagatcctccaagatgacggcaaggagggggctgagaaaaagattatgaacgctgcctccaagctagccacaatggctaaactactggagactcccattagctccaagtcacagagtaaaacaacgcaatccgccctgcctcttacgtcagaaatgctgatcgcagttaagaagtccaagcgcaacgatgtgaaccagaagataccatgctgcattgagtccaagtctaacagtgtaaacactatcacacgcactctctgcgaacaggctcccaaacgccgggcggcctgtaatctgcagcgcctactagaaaatagcgaacaccagtccatcaagcacgtaggatccaaagagactcacttagaattccagtttggcgatggaagctgtaagcatttaaattctttacctcgcaacgtttctcctgagtttgtgccttgcgaaggcgaaggaggtttcggcctccacaaaaagaaggatctcctctccgacaacggcagcgagagccttcctcactcggcagcgtacccctttctcggtacactagggaacaaaccctcccccaggtgtaccccggggccctccgagagtggctgtatgcacattaccttccgggattctaacgagcgacttggccttaaagtttataagtgcaacccgcttatggaatccgaaaatgcagccagtgagaagagccagggattggatgtccaggagccccccgtcaaggatggaggagaccttagcgactgcttgggttggccctcttccagtgctactttgagtttcgatagcagagaagcgagctttgtccacggtaggcctcagggcacccttgagatccccagtgaatccgtgaaaagcaaacagttcagtccttcaggatacttgagcgacactgaagagtcaaacatgatctgccagactatgaagtgccagcggtaccaaacaccttatctgagtgaagagacgacttatctcgaacccgggaagataagtgtgaactgcggtcacccttcaaggcataaggcagaccggctcaagtccgatttcaagaaactgagctctactctgcccagttccgtgtgtcagcagccatcccgaaagcttattgtgcccctcagtagccagcaggattctggctttgatagcccattcgtcaatttagactag

SEQ ID NO: 293529 - DNA, 5133 bp, Artificial Sequence
  derived and/or modified sequence
atgagcctggactttggatctgtggccctgcctgtgcagaatgaagatgaggagtatgatgaggaggactatgaaagagagaaggagctgcagcagctgctgacagacctgccccatgacatgctggatgatgacctgagcagccctgagctgcagtacagcgactgcagtgaagatggaacagatggccagccccaccaccctgagcagctggagatgtcctggaatgagcagatgctgcccaagagccagagcgtgaatggctacaatgagatccagagcctgtatgctggggagaagtgtggaaatgtgtgggaggagaacagaagcaagacagaagatagacaccctgtgtaccaccctgaggagggcggagatgagggcggcagcggctacagcccccccagcaaatgtgagcagacagacctgtaccacctgcctgagaacttccggccctacaccaacggccagaagcaggagttcaacaaccaggccaccaacgtcatcaagttcagtgacccccagtggaaccacttccagggccccagctgccagggcctggagccctacaacaaggtgacctacaagccctaccagagcagcgcccagaacaacggcagccctgcccaggagatcactggaagtgacacctttgagggcctgcagcagcagttcctgggcgccaatgaaaacagcgctgagaacatgcagatcatccagctgcaggtgctgaacaaggccaaggagcggcagctggagaacctgattgagaagctgaatgaaagtgagcggcagatccgctacctgaaccaccagctggtgatcatcaaggatgagaaggatggcctgaccctgagcctgcgggagagccagaagctgttccagaatggcaaggagcgggagatccagctggaggcccagatcaaggccctggagacccagatccaggccctgaaggtgaatgaggagcagatgatcaagaagagcaggaccacagagatggccctggagagcctgaagcagcagctggtggacctgcaccacagcgagagcctgcagagggcccgggagcagcacgagagcatcgtgatgggcctgaccaagaagtatgaggagcaggtgctgagcctgcagaagaacctggatgccaccgtgacagccctgaaggagcaggaggacatctgcagccggctgaaggaccacgtgaagcagctggagaggaaccaggaggccatcaagctggagaagacagagatcatcaacaagctgaccaggagcctggaggagagccagaagcagtgtgcccacctgctgcagagcggctctgtgcaggaggtggcccagctgcagttccagctgcagcaggcccagaaggcccacgccatgtctgccaacatgaacaaggccctgcaggaggagctgacagagctgaaggatgagatcagcctgtatgagagcgctgccaagctgggcatccaccccagcgacagcgagggggagctgaacatcgagctgacagagagctatgtggacctgggcatcaagaaggtgaactggaagaagagcaaggtgaccagcatcgtgcaggaggaggaccccaatgaggagctgagcaaggatgagttcatcctgaagctgaaggccgaggtgcagaggctgctgggcagcaacagcatgaagaggcacctggtgtcccagctgcagaatgacctgaaggactgccacaagaagattgaggacctgcaccaggtgaagaaggatgagaagagcattgaggtggagaccaagacagacaccagcgagaagcccaagaaccagctgtggccagagagcagcaccagtgatgtggtgagagatgacatcctgctgctgaagaatgagatccaggtgctgcagcagcagaaccaggagctgaaggagacagagggcaagctgaggaacaccaaccaggacctgtgcaaccagatgaggcagatggtgcaggactttgaccatgacaagcaggaggccgtggacagatgtgagaggacctaccagcagcaccacgaggccatgaagacccagatccgggagagcctgctggccaagcacgccctggagaagcagcagctgtttgaggcctatgaaagaacccacctgcagctgcggtctgagctggacaagctgaacaaggaggtgacagctgtgcaggagtgctacctggaggtgtgccgggagaaggacaacctggagctgaccctgaggaagaccacagagaaggagcagcagacccaggagaagatcaaggagaagctgatccagcagctggagaaggagtggcagagcaagctggaccagaccatcaaggccatgaagaagaagaccctggactgtggcagccagacagaccaggtgaccaccagtgatgtgatcagcaagaaggagatggccatcatgattgaggagcagaagtgcaccatccagcagaacctggagcaggagaaggacatcgccatcaagggggccatgaagaagctggagattgagctggagctgaagcactgtgagaacatcaccaagcaggtggagattgctgtgcagaatgcccaccagcgctggctgggggagctgcctgagctggccgagtaccaggccctggtgaaggccgagcagaagaagtgggaggagcagcacgaggtgtctgtgaacaagaggatcagctttgctgtgtctgaggccaaggagaagtggaagtctgagctggagaacatgaggaagaacatcctgcccgggaaggagctggaggagaagatccacagcctgcagaaggagctggagctgaagaatgaggaggtgcctgtggtgatccgggcagagctggccaaggcccggtctgagtggaacaaggagaagcaggaggagatccaccgcatccaggagcagaatgagcaggactaccggcagttcctggatgaccacaggaacaagatcaatgaggtgctggccgccgccaaggaggacttcatgaagcagaagacagagctgctgctgcagaaggagacagagctgcagacctgcctggaccagagccggcgggagtggaccatgcaggaggccaagaggatccagctggagatctaccagtatgaggaggacatcctgactgtgctgggcgtgctgctgagtgacacccagaaggagcacatcagtgacagcgaggacaagcagctgctggagatcatgagcacctgcagcagcaagtggatgtctgtgcagtactttgagaagctgaagggctgcatccagaaggccttccaggacaccctgcccctgctggtggagaatgctgaccctgagtggaagaagaggaacatggccgagctgagcaaggacagcgccagccagggcaccggccagggcgaccccggccctgctgctggccaccacgcccagcccctggccctgcaggccacagaagctgaggccgacaagaagaaggtgctggagatcaaggacctgtgctgcggccactgcttccaggagctggagaaggccaagcaggagtgccaggacctgaagggcaagctggagaagtgctgccgccacctgcagcacctggagaggaagcacaaggctgtggtggagaagatcggggaggagaacaacaaggtggtggaggagctgattgaggagaacaatgacatgaagaacaagctggaggagctgcagaccctgtgcaagaccccacccaggagcctgtctgctggggccattgaaaatgcctgcctgccctgcagcggcggggccctggaggagctgcggggccagtacatcaaggctgtgaagaagatcaagtgtgacatgctgcgctacatccaggagagcaaggagagagctgctgagatggtgaaggccgaggtgctgcgggagcggcaggagacagccaggaagatgaggaagtactacctgatctgcctgcagcagatcctgcaggatgatggcaaggagggcgctgagaagaagatcatgaatgctgccagcaagctggccaccatggccaagctgctggagacccccatcagcagcaagagccagagcaagaccacccagagcgccctgcccctgaccagcgagatgctgattgctgtgaagaagagcaagagaaatgatgtgaaccagaagatcccctgctgcatcgagagcaagagcaacagcgtgaacaccatcaccaggaccctgtgtgagcaggcccccaagagaagagctgcctgcaacctgcagaggctgctggagaacagcgagcaccagagcatcaagcacgtgggcagcaaggagacccacctggagttccagtttggagatggcagctgcaagcacctgaacagcctgcccagaaatgtgtccccagagtttgtgccctgtgagggggagggcggcttcggcctgcacaagaagaaggacctgctgagtgacaatggaagtgagagcctgccccacagcgctgcctaccccttcctgggcaccctgggcaacaagcccagcccccgctgcaccccaggccccagcgagagcggctgcatgcacatcaccttccgggacagcaatgaaaggctgggcctgaaggtgtacaagtgcaaccccctgatggagagtgaaaatgctgccagcgagaagagccagggcctggatgtgcaggagccccctgtgaaggatggaggagacctgagtgactgcctgggctggcccagcagcagcgccaccctgagctttgacagccgggaggccagctttgtgcacggccggccccagggcaccctggagatccccagcgagagcgtgaagagcaagcagttcagccccagcggctacctgagtgacacagaggagagcaacatgatctgccagaccatgaagtgccagcgctaccagaccccctacctgtctgaggagaccacctacctggagcccgggaagatctctgtgaactgtggccaccccagccgccacaaggctgaccggctgaagagtgacttcaagaagctgagcagcaccctgcccagctctgtgtgccagcagcccagcaggaagctgattgtgcccctgagcagccagcaggacagcggctttgacagcccctttgtgaacctggactag

SEQ ID NO: 293530 - DNA, 5133 bp, Artificial Sequence
  derived and/or modified sequence
atgagcctggacttcggcagcgtggccctgcccgtgcagaacgaggatgaggaatacgacgaagaggactacgaaagagaaaaagaactacaacaattactgacagatctgcctcatgatatgctcgacgacgacttgtcctctccagagctgcagtactcagattgctccgaggatggtactgatggacagccacatcatccggagcagctggaaatgagttggaacgaacagatgttacccaagagccaatctgtcaacggttataatgagatccagagtctctatgccggagagaagtgcggaaatgtttgggaagaaaatcggagcaaaaccgaggatagacatcctgtgtatcacccagaggaagggggtgatgaaggcggaagtggctactcaccaccatcgaagtgcgaacagacggacctttaccaccttccagaaaacttccgcccatatacaaatgggcagaaacaagagttcaataaccaggctactaacgtgatcaaatttagcgacccacagtggaatcattttcagggaccttcttgccagggtcttgaaccgtacaacaaagtaacctacaagccgtaccagagcagcgctcagaacaacggctccccagcccaagaaatcacggggtctgatacgtttgagggtctacagcagcagtttctgggcgccaacgagaatagtgcagaaaatatgcagatcattcagttgcaggtgcttaataaggccaaagaacgtcaactggaaaacctcatcgagaagttaaatgagagcgagcggcaaattcggtacctcaatcatcagctggtcatcattaaagatgaaaaagacggcctcacactcagcctgcgtgagtctcaaaagctcttccagaatggcaaggagcgagagatacagctggaagcacagataaaggccctggagacccagatccaggcactgaaagttaatgaggaacaaatgatcaagaagtcacgcacaactgagatggccttggagagccttaagcagcagctggtggacctgcatcactccgaatccctgcagagagcccgcgaacaacacgagagcatcgtgatgggattaactaaaaagtacgaggagcaagttctgagccttcagaagaacctggacgccaccgttacagctttgaaggagcaggaggatatttgttctagactaaaagaccatgtcaagcagctggagagaaatcaggaggctatcaagttggagaaaacagagattataaataaactcacaagatcactggaggagtctcaaaaacagtgtgcccacttgcttcaaagtgggtcggtgcaagaagtggctcagctccaattccagctgcagcaggcccaaaaagctcatgctatgtccgccaatatgaataaggccttgcaggaggagctgactgaactgaaggatgagatttcactatatgaatcggccgcgaagctgggcattcacccctccgattctgagggagaactcaacatcgagctcactgaatcctatgtagatctgggtattaaaaaagtgaattggaagaagtccaaagtgacaagcatagtacaggaagaagaccctaatgaagagctgagtaaagatgagttcatcctgaaactaaaagcagaagtacagcgtctgctgggtagcaacagcatgaagcgtcacctcgtatcccagctccaaaatgacctcaaagactgccacaagaagatagaagacttgcaccaagttaagaaggacgagaaatccattgaagtggagactaaaacagatacaagcgagaagcctaagaaccagctctggcctgagagtagcacctctgatgtggttcgtgacgatatcctcttgctgaagaatgaaattcaggttctgcagcagcagaatcaagagttgaaggaaacagagggcaagctgagaaatacgaaccaggatctctgtaatcaaatgagacagatggtacaagatttcgatcacgacaagcaggaggccgtcgatagatgcgagcggacctatcagcaacatcatgaggccatgaaaacgcaaattcgagagtcccttttagcgaagcacgccctggagaagcaacaactcttcgaagcctatgagaggacacatcttcagctgcgatctgaattggacaagctgaataaagaggtcacggcagttcaggaatgctacctggaagtgtgccgggagaaggataacttggaacttaccctgcggaagactaccgagaaagaacagcagactcaggagaaaattaaggagaagctgatacagcagcttgagaaagaatggcaaagcaagcttgatcagaccattaaagctatgaagaagaaaaccctagactgcggatcacagacagaccaggtcacaacctcggacgttatctctaagaaggagatggcaatcatgattgaagagcaaaagtgcaccattcagcagaacctcgagcaggagaaagatattgctatcaaaggggcaatgaagaagctggagattgaacttgaactcaagcactgtgagaatataacaaagcaggtcgagatcgcagtgcagaacgcgcaccagcggtggctaggggagctcccagagctggctgagtaccaagccttagtcaaagccgaacagaaaaaatgggaggaacaacacgaggtgtccgtgaataaaagaatatcgttcgctgtttctgaggctaaagagaaatggaagtccgagcttgagaatatgcgaaagaacatcttgcccggcaaagagctcgaagaaaaaattcattcattacagaaagagctggagctgaaaaatgaagaggtccccgtggtgatcagagcagagctggccaaagccagaagtgagtggaacaaagagaaacaggaggaaatccatcggattcaggaacaaaacgaacaggactatcggcagtttttggatgaccatcggaataaaatcaatgaggtgttggccgctgccaaagaagactttatgaaacagaagacagagcttctcctccagaaagagacagaattgcagacttgcctcgaccagagccgccgagagtggaccatgcaggaagcgaaaagaatccagctggagatatatcagtatgaggaggacatcctgaccgtgctcggagtgcttttgagcgatacccaaaaggaacatatctcggatagcgaggataagcagttactggagattatgagcacttgttcttccaagtggatgtccgtccagtatttcgaaaagctgaaaggttgcatccagaaggccttccaagatactttgcctttgctcgtcgagaatgctgaccctgagtggaaaaaaaggaatatggcggaactgtcgaaggattctgcatcccaaggcaccggtcagggagatcccgggcccgctgcgggccaccacgctcagcctttggcgcttcaggccactgaagctgaagccgataaaaagaaagttctggagattaaggatctgtgttgcggccactgttttcaggaactcgaaaaagccaagcaggagtgtcaggacctcaaaggcaagctggagaagtgctgccggcacttgcaacacctggagcgcaagcataaggccgtagtggagaagattggagaggagaacaacaaagtcgtggaagaactcatagaagaaaacaacgatatgaaaaacaaactggaagaattgcagactttgtgcaagacacccccacgctccctgagcgccggggcaatcgagaacgcgtgtctgccctgctccggcggtgctctggaagaactgagaggccagtacattaaagctgtgaagaaaataaagtgtgacatgttacggtacattcaggaatcgaaagagagagcagctgagatggtgaaggctgaagtgctgcgcgagaggcaagagacggctagaaagatgcggaagtattacttaatctgtctgcaacagatcctgcaggacgatgggaaggaaggggcggagaaaaaaatcatgaacgcagcatctaaacttgcaaccatggccaagctgttagagacccctatttcttcaaagagccagagcaagacaacccagagtgccctcccccttacctcggagatgctgatcgctgtgaaaaagagtaaacggaatgatgtgaaccaaaagataccctgctgcatcgagagcaagagtaatagcgttaataccatcactaggacactttgtgagcaagctcccaagcggcgcgccgcatgcaatctgcagagactgttggagaactcggagcaccagtctatcaaacatgttgggagtaaggaaactcatctcgaatttcagttcggtgacggatcctgtaaacacttaaatagcctgcctagaaacgtatcacctgaattcgttccatgtgagggagagggagggttcgggctacacaaaaagaaggatttgttgagcgataatggatctgagagtctccctcactccgcagcctatccctttctggggactcttggcaacaagccctcaccacggtgtacccccgggcccagtgagagcggatgcatgcacatcacattcagggattcaaatgaacgcctgggactgaaagtgtacaagtgcaacccgctgatggagtccgaaaacgcggcttccgagaaatctcaggggctggacgtccaggagcctccggtgaaagacggtggagacctttcagattgcctgggctggccaagctcctctgccacgctatctttcgatagtagggaagcgtcgtttgttcatggtcgcccccaaggcacgcttgagattcctagcgagagcgtgaagtcaaagcagttctcaccatctggctacctcagcgacactgaggaaagtaatatgatctgccagacaatgaagtgccagaggtaccagaccccctatttgtctgaggagacaacatacttggaacccgggaagatcagcgtgaactgcggccacccaagccggcacaaggccgacagacttaaatctgacttcaaaaagctgtcgagcaccctcccatcgtcagtatgtcagcagccatcgcggaagctcatcgtacccctgagttctcaacaagacagcggcttcgactcaccctttgttaatctggactag

SEQ ID NO: 293531 - DNA, 5132 bp, Artificial Sequence
  derived and/or modified sequence
atgagtctcgactttggatcagttgccctaccagtgcagaacgaggacgaggagtacgacgaggaggactatgagcgcgagaaggaattgcagcaattgctcacagatctgccccacgacatgctggacgacgatttatcttcccccgagctgcagtattccgactgctctgaagacggtaccgacggacagccccatcatcctgagcaattagagatgtcttggaatgagcagatgttgcctaagagccagagcgttaatgggtataatgagatccagtccctgtacgcaggcgagaaatgtggcaacgtttgggaggaaaacaggtccaaaaccgaagataggcaccccgtctaccatcccgaagagggaggagacgaagggggtagtgggtactctccaccctccaagtgcgaacagactgacctataccacttgccggaaaactttcgtccatatactaatggccagaagcaggagtttaacaaccaagctacaaatgtgattaagttttccgacccacagtggaatcacttccaggggccttcgtgtcagggattagaaccatacaacaaggtgacgtacaagccgtatcagagttcagcgcagaataacggctccccggctcaggagataaccgggtctgacacattcgaggggctgcaacagcaattcttgggcgcaaacgagaactcggccgaaaatatgcaaattatacagttgcaagtactgaataaagctaaggaacggcagttggaaaacctgattgaaaaactcaatgagtccgaaaggcaaatcagatatctaaatcatcagctcgtgatcattaaagatgaaaaagacgggttaacgctgtcacttagggagagccaaaaactcttccagaacggcaaggaaagagagatccagctcgaagcacagataaaggcgcttgagacccagatccaggctctcaaagttaatgaagagcagatgattaaaaagtcccgcacgacagagatggctctggagtccttgaagcaacagctcgtggacctgcatcacagcgagagtctccagcgggcaagagagcagcacgaatccattgtgatgggcctgaccaagaagtacgaggagcaggtactgtcgcttcagaagaatctggacgcaacggttactgccctgaaggagcaggaagatatatgtagtcggctaaaggaccatgttaagcaattggagaggaatcaggaagccatcaaactggagaagacggaaatcattaacaaactcactcggagcctggaggagagccaaaagcagtgtgcccacttgctgcagtccgggtctgttcaggaggttgcccaattgcagttccagctccaacaagcacagaaagctcacgccatgagcgccaacatgaataaggccttgcaggaagaactcaccgagctcaaggacgagatctcactctacgagtccgctgccaagttgggcattcacccctccgattctgagggcgaactgaacatagaactgaccgagagctacgtggacctgggaattaaaaaagttaattggaagaaaagtaaagtgacaagtattgttcaggaagaagatccaaatgaggagctgtctaaggatgaatttatactaaaactcaaagctgaagtgcagcggttactgggctccaacagcatgaaaaggcatctagtgtcccaacttcagaacgatctaaaggactgccacaagaaaatcgaggacctgcatcaggtgaaaaaagatgaaaaaagcatcgaggtagagaccaagaccgatacctccgaaaagcctaaaaaccagctatggcccgaaagctccacaagcgatgtggtgcgagacgacatcctgttgcttaaaaatgagatccaagtgctccaacagcaaaaccaggaactgaaagagacagagggaaaattgagaaataccaaccaagacctttgtaaccagatgcggcagatggtacaagacttcgaccacgacaaacaggaggcagtagatagatgcgagagaacctaccaacagcaccatgaggcaatgaaaacacagatccgagagagtctgcttgccaaacatgccctggaaaaacagcagctgttcgaagcttacgagaggacgcacctgcagctgcggtctgaactggataaactgaataaagaggtgactgcagtgcaagaatgctatttagaggtttgtcgggagaaggataatctcgaattgaccctcagaaagacgactgagaaggagcaacagacacaggaaaaaattaaagagaagctaatacaacagctggaaaaggaatggcagagcaagctagaccagacaattaaagcaatgaagaagaagaccctggattgcggctcccagaccgaccaggttacaaccagcgacgttatctccaagaaggaaatggcgatcatgatagaggagcagaagtgcacaatccagcagaacctcgaacaggagaaggacatcgccatcaagggcgcaatgaagaaactggagatcgaactggagctcaagcattgcgaaaacatcacaaagcaagtcgagatcgctgtccaaaacgcccaccagcggtggcttggcgagctgccggagcttgccgagtaccaagccctggtgaaggccgagcaaaagaaatgggaggaacagcacgaggtttcagttaataagcgtatttccttcgccgtgtctgaggcaaaggagaaatggaaatccgaattggagaatatgcggaagaacattctccccggaaaggagctcgaggaaaagattcacagtcttcagaaagaactggagctgaaaaatgaggaggttccagtcgtgattagggccgagctcgcgaaggcgagatcagaatggaataaagaaaagcaggaggagatccatagaatccaggagcagaacgaacaggactaccgtcagttcctggacgatcaccgaaataagataaatgaggtccttgccgctgcaaaggaagattttatgaagcaaaagaccgagttgctcctgcaaaaagaaacggagctgcagacatgcctggatcaatctcgcagagaatggaccatgcaggaagccaagaggatccagctcgaaatctaccagtatgaggaagatattctgaccgtccttggggtgctgctgagtgacacgcaaaaagaacacatctcggatagcgaggacaaacagctgctggaaatcatgtccacatgctcgagcaaatggatgagcgtccagtactttgagaaattaaaaggttgcatccagaaggctttccaggacactctacctcttctcgtagagaatgcagatccggaatggaagaaaaggaacatggcagagctatccaaagacagcgcttctcaaggaaccggtcagggcgaccctggaccagcagcgggtcaccatgcccaacccctggctctgcaggctaccgaagccgaagcagacaagaaaaaggtcttagaaattaaagacctgtgctgcggccactgctttcaggagcttgagaaagccaaacaggagtgccaggacttgaagggcaagctggagaaatgctgccgtcacttgcagcacctggaacggaagcacaaagctgtggtcgagaagattggggaggagaacaataaagtagtggaggagctgattgaggagaacaatgacatgaaaaacaagctagaggagctccaaaccctgtgcaagacaccacccaggtcattatctgccggagcgatcgagaacgcatgccttccgtgctccggaggagccctcgaagagctgaggggtcaatatatcaaagcggtcaagaagatcaagtgcgatatgctacgttatatccaggagtccaaagaaagggctgccgagatggtcaaggccgaagtcttaagagagaggcaagaaacagctcgcaagatgcggaagtactacctaatctgtctacaacagattctgcaggacgacggcaaagagggtgccgagaagaagattatgaatgccgcatcaaaattggccacaatggcgaagctcctagagacccccatcagtagcaaatcacagagcaaaaccacccaatctgctctgcctttgacatccgaaatgctcattgctgtgaaaaaatcaaaaagaaacgatgttaatcaaaagatcccttgctgtatcgaatctaagtccaactccgttaatacaatcacacgcacactgtgcgagcaggcgcctaagcggagagctgcctgtaatcttcagcgcctgctggaaaattccgaacatcagtccatcaagcacgtcggttctaaggaaactcacctggagtttcagttcggcgatggctcctgtaaacatctgaactccttgccacgcaatgtttcccccgaattcgtcccttgtgaaggggaggggggttttgggctgcacaagaaaaaagacctactgtctgacaacggatcagaatctctgccacactcagctgcctacccctttcttgggaccctggggaataagccaagcccaaggtgtaccccgggacctagtgaatccgggtgtatgcatattaccttcagagattcaaacgaacggctgggcttgaaggtgtataaatgcaaccctcttatggagagcgagaacgctgcctcggaaaaatcacaaggactcgatgtccaggagcctcctgtaaaggatggcggtgatctctccgactgcctgggatggccttcatcatctgccaccctgtcattcgatagtcgagaggccagcttcgtgcacggccgtccccagggaacactcgagattccctcggagagcgtaaagtcgaagcagtttagccccagcgggtacttgagcgataccgaggaaagcaacatgatttgtcagacaatgaaatgtcagcggtatcagactccgtacctctccgaagagaccacctacctggagcctggcaaaattagtgtgaattgcggacacccttccaggcataaggctgaccgtctgaaatcagacttcaagaagttgagctctactctcccatcctctgtctgccagcagccaagtcggaagttaattgtcccccttagctcccaacaggacagcggctttgactctccgtttgtgaacttggacta

SEQ ID NO: 293532 - DNA, 5635 bp, Artificial Sequence
  derived and/or modified sequence
ccgggcgagcttctagtcggcgattgaaggatgcgagtgctccttaagggcctccgccccgtgagttcggttgtgactaggaaggagctagtggactagagccagggtaaggggatctgctagaagttggtcttccgccaggactagagtttcctcgcggtaacagcctccgtggcctccggaggaccatgtcattagactttggcagtgtggcactaccagtgcaaaatgaagatgaagagtatgacgaagaggactatgaaagagagaaagagttgcagcagttactcacagaccttccccatgacatgctggatgacgacctctcctctccagagctccagtattcggactgcagcgaggatggcacagacggacaaccacatcatcctgagcaattggagatgagctggaatgagcaaatgctgcccaaatctcaaagtgtaaatggctataatgaaattcagagtttatatgctggagaaaaatgtggtaatgtctgggaagaaaatagaagtaaaactgaagaccgacatcctgtgtaccatcctgaagaaggtggagatgaaggtggaagtggttatagtcctccaagtaaatgtgaacagactgatttatatcaccttcctgaaaactttaggccatataccaatggtcagaagcaggaatttaataaccaagcaaccaatgtaattaaattttcagatcctcaatggaaccattttcagggtcccagttgtcaaggtttggaaccgtataataaagtgacatataaaccttatcagtcttctgcccagaataatggctcaccagcccaggagataacaggaagtgacacattcgaaggcctgcaacaacaatttttaggagctaatgagaactctgcagaaaatatgcagattattcaacttcaggttcttaacaaagcaaaagagagacaactggagaacttaattgaaaagttaaatgaaagtgaacgtcaaattcgatatctgaatcaccagcttgtaataataaaagatgaaaaggatggtttgactctcagccttcgagaatcacagaaactctttcagaatggaaaagaaagagagatacagcttgaagctcaaataaaagcactggagactcagatacaagcattaaaagtcaatgaagaacagatgatcaagaagtccagaacaactgaaatggctctggaaagcttgaagcagcagctggtggaccttcatcattctgaatcacttcaacgagctagagaacagcatgagagcattgttatgggcctcacaaagaagtacgaagagcaagtattgtccttacaaaagaatttggatgccacagtcaccgcacttaaagaacaggaagacatttgctctcgtctgaaagatcacgtgaaacaactggaaaggaatcaagaagcaatcaagttagaaaagactgagatcattaataagttgacaagaagtctagaggagagtcaaaagcagtgtgcccacttgttgcagtccgggtcagtacaagaggtggctcagctacagttccagctgcagcaagcacagaaggcacatgctatgagtgcaaacatgaacaaggctttgcaagaagaattaacagaactaaaagatgaaatttctctctatgaatctgctgcaaaactaggaatacatccaagtgactcagaaggagaattaaatatagaactcactgaatcgtatgtggatttgggtattaaaaaggtcaactggaaaaaatccaaagttaccagcattgtacaagaagaagacccaaatgaagagctttcaaaagatgagttcattctgaagttaaaggcagaagtacagcgtttgctgggtagcaactcaatgaagcgtcatctggtgtctcagttacaaaatgacctcaaagactgtcataagaaaattgaagatctccaccaagtgaagaaggatgaaaaaagcattgaggttgagactaaaacagatacctcagaaaaaccaaagaatcaattatggcctgagtcttctacttctgatgttgtcagagatgatattctgctgcttaaaaatgaaattcaagttttacaacaacaaaatcaggaacttaaagaaactgaaggaaaactgagaaatacaaatcaagacttatgtaatcaaatgagacaaatggtacaagattttgaccatgacaaacaagaagctgtggataggtgtgaaaggacttatcagcagcaccatgaagccatgaaaactcaaatacgtgaaagcctattagcaaagcatgctttggagaagcagcagctctttgaggcttatgagagaactcatttgcaactgaggtctgagttggataagttgaataaggaggtgactgctgtgcaggaatgttacctagaagtgtgcagagagaaggataatctagaattgactctcaggaagaccactgaaaaggagcaacagactcaggagaagatcaaagaaaaactcattcaacagcttgaaaaggagtggcagtctaagctggatcaaactataaaggcaatgaaaaagaagaccttagattgtggcagccaaactgaccaagtaaccaccagtgatgttatttccaagaaagagatggcaattatgatagaagagcagaagtgcacaatccagcaaaacttagaacaagagaaggacatagccatcaagggggctatgaagaaactcgaaattgaattggaactcaaacattgtgaaaatattaccaaacaggtagaaatagctgtgcaaaatgctcatcagcgatggctgggagaactaccagagctggcagagtatcaagcacttgtgaaggcagaacagaaaaagtgggaagaacagcatgaggtctctgtgaacaaaaggatatcatttgctgtttctgaagctaaagagaaatggaagagtgagcttgaaaatatgaggaaaaatatacttcctggaaaggaattggaagagaagattcattctcttcagaaggaacttgagttaaagaacgaagaagtccctgtggtcatcagggctgagttagctaaggctcggagtgaatggaacaaagaaaagcaagaagaaatccacagaatccaagaacaaaatgagcaagattaccggcaatttttagatgatcaccgaaataaaattaatgaggtgcttgcggcagctaaagaagactttatgaaacaaaaaactgaactacttcttcagaaggagacagaattacaaacttgtctagaccagagtcgtagagaatggactatgcaggaagccaagcggatccaactggaaatctatcagtatgaggaagacatcctgactgtacttggggttcttttaagtgatacccaaaaggagcacatcagtgattctgaggacaagcagcttttggaaatcatgtcgacttgttcttcaaaatggatgtctgtgcaatattttgaaaaactaaagggctgcatacagaaagcatttcaagatacacttcctctgcttgtagaaaacgctgacccagaatggaaaaagagaaatatggccgagctctctaaggattctgccagccagggcactggccaaggagaccctggacctgctgctggacaccatgctcagcccttggccttacaagcaacagaagcagaagctgataagaaaaaggtccttgaaattaaggatttatgctgtggacactgcttccaagaacttgaaaaggcaaagcaggaatgtcaagatctgaaaggaaaactggagaaatgctgtaggcatcttcagcatttagaaaggaagcacaaagctgtagtggaaaaaattggagaagagaataataaagttgttgaagaattaatagaagaaaacaacgacatgaagaataaattggaagaattgcaaacactttgtaaaacaccaccaaggtcattgtcagcaggggccattgaaaatgcttgcctgccatgcagtgggggagccttggaagaacttcgtgggcagtacattaaagctgtaaaaaaaattaaatgtgacatgcttcgttatattcaggagagtaaggaacgagctgcagaaatggtaaaagcagaggtactgcgagaacgtcaagaaaccgcccgaaagatgcgcaaatattatttgatttgcctccaacagattttgcaggatgatggaaaagaaggggctgagaaaaagattatgaatgctgctagcaaacttgctacaatggcaaaattactggaaacacctatttctagtaagtcccaaagcaaaactacacagtcagcactgcccctaacttcagagatgctgattgcagttaaaaaatcaaaaagaaatgatgtgaatcagaaaataccatgttgtattgaaagcaaatcaaatagtgtaaacaccatcaccagaactctgtgcgaacaagctcccaagaggagggcagcttgtaacttacaaaggctgttagagaactcagagcatcagagcataaagcatgtgggatccaaagagacacatttggaattccagtttggggatggtagttgcaagcacctaaacagtttgccaaggaatgtttctcctgagtttgttccttgtgaaggtgaaggaggctttggtttgcacaagaagaaagacctactcagtgataatggttctgaatcacttccgcattcagctgcatacccctttcttggaaccttaggaaataaaccctcacctagatgtacccctggtccttctgaatcaggatgcatgcatataacctttcgcgattctaatgaaagacttggtttaaaagtatataaatgcaatccactaatggaaagtgaaaatgctgcatctgagaaaagtcaaggtttggatgttcaggaacctccagtaaaagatggaggggaccttagtgactgcttgggctggccttccagcagtgcaaccttatcctttgacagtcgtgaagcatcatttgtacatggtaggccacaaggaactttggaaataccaagtgaatctgttaaatccaaacagttttcaccatccggttatctttcagatacagaggaaagtaatatgatttgtcaaacaatgaaatgtcagcgttatcaaactccatacctgtcagaagaaaccacgtatttggagccaggaaagatcagtgtgaattgtggacacccatctcgtcataaggctgatagattaaagtcagatttcaaaaaactgagcagtacattaccatcttcagtgtgtcagcagccttcaagaaaattaattgttccgctatctagccaacaagatagtggctttgatagcccatttgttaatctagactaattatggtacagtatttaagaagaatcattaatatattaacaaaaatggaagggaagacctcatactgaaaaaaattgtgagccctgcctcttttgagatgttttaataacatctgttatataagtaaagcattcttctaaaattgcttgagatatttatgttgccttaatattccaaaggcctgatggtgtatgtataatctgcttttgtgtggtgcttatttttggtttctaaaccatctatttttatacttataaattgactcactctgcagtgttaacttatttaaataaacttgcatatggtctgtagaa

SEQ ID NO: 293533 - DNA, 5133 bp, Artificial Sequence
  derived and/or modified sequence
atgagcctggacttcggcagcgtggccctgcccgtgcagaacgaggacgaggagtacgacgaggaggactacgagagagagaaggagctgcagcagctgctgaccgacctgccccacgacatgctggacgacgacctgagcagccccgagctgcagtacagcgactgcagcgaggacggcaccgacggccagccccaccaccccgagcagctggagatgagctggaacgagcagatgctgcccaagagccagagcgtgaacggctacaacgagatccagagcctgtacgccggcgagaagtgcggcaacgtgtgggaggagaacagaagcaagaccgaggacagacaccccgtgtaccaccccgaggagggcggcgacgagggcggcagcggctacagcccccccagcaagtgcgagcagaccgacctgtaccacctgcccgagaacttcagaccctacaccaacggccagaagcaggagttcaacaaccaggccaccaacgtgatcaagttcagcgacccccagtggaaccacttccagggccccagctgccagggcctggagccctacaacaaggtgacctacaagccctaccagagcagcgcccagaacaacggcagccccgcccaggagatcaccggcagcgacaccttcgagggcctgcagcagcagttcctgggcgccaacgagaacagcgccgagaacatgcagatcatccagctgcaggtgctgaacaaggccaaggagagacagctggagaacctgatcgagaagctgaacgagagcgagagacagatcagatacctgaaccaccagctggtgatcatcaaggacgagaaggacggcctgaccctgagcctgagagagagccagaagctgttccagaacggcaaggagagagagatccagctggaggcccagatcaaggccctggagacccagatccaggccctgaaggtgaacgaggagcagatgatcaagaagagcagaaccaccgagatggccctggagagcctgaagcagcagctggtggacctgcaccacagcgagagcctgcagagagccagagagcagcacgagagcatcgtgatgggcctgaccaagaagtacgaggagcaggtgctgagcctgcagaagaacctggacgccaccgtgaccgccctgaaggagcaggaggacatctgcagcagactgaaggaccacgtgaagcagctggagagaaaccaggaggccatcaagctggagaagaccgagatcatcaacaagctgaccagaagcctggaggagagccagaagcagtgcgcccacctgctgcagagcggcagcgtgcaggaggtggcccagctgcagttccagctgcagcaggcccagaaggcccacgccatgagcgccaacatgaacaaggccctgcaggaggagctgaccgagctgaaggacgagatcagcctgtacgagagcgccgccaagctgggcatccaccccagcgacagcgagggcgagctgaacatcgagctgaccgagagctacgtggacctgggcatcaagaaggtgaactggaagaagagcaaggtgaccagcatcgtgcaggaggaggaccccaacgaggagctgagcaaggacgagttcatcctgaagctgaaggccgaggtgcagagactgctgggcagcaacagcatgaagagacacctggtgagccagctgcagaacgacctgaaggactgccacaagaagatcgaggacctgcaccaggtgaagaaggacgagaagagcatcgaggtggagaccaagaccgacaccagcgagaagcccaagaaccagctgtggcccgagagcagcaccagcgacgtggtgagagacgacatcctgctgctgaagaacgagatccaggtgctgcagcagcagaaccaggagctgaaggagaccgagggcaagctgagaaacaccaaccaggacctgtgcaaccagatgagacagatggtgcaggacttcgaccacgacaagcaggaggccgtggacagatgcgagagaacctaccagcagcaccacgaggccatgaagacccagatcagagagagcctgctggccaagcacgccctggagaagcagcagctgttcgaggcctacgagagaacccacctgcagctgagaagcgagctggacaagctgaacaaggaggtgaccgccgtgcaggagtgctacctggaggtgtgcagagagaaggacaacctggagctgaccctgagaaagaccaccgagaaggagcagcagacccaggagaagatcaaggagaagctgatccagcagctggagaaggagtggcagagcaagctggaccagaccatcaaggccatgaagaagaagaccctggactgcggcagccagaccgaccaggtgaccaccagcgacgtgatcagcaagaaggagatggccatcatgatcgaggagcagaagtgcaccatccagcagaacctggagcaggagaaggacatcgccatcaagggcgccatgaagaagctggagatcgagctggagctgaagcactgcgagaacatcaccaagcaggtggagatcgccgtgcagaacgcccaccagagatggctgggcgagctgcccgagctggccgagtaccaggccctggtgaaggccgagcagaagaagtgggaggagcagcacgaggtgagcgtgaacaagagaatcagcttcgccgtgagcgaggccaaggagaagtggaagagcgagctggagaacatgagaaagaacatcctgcccggcaaggagctggaggagaagatccacagcctgcagaaggagctggagctgaagaacgaggaggtgcccgtggtgatcagagccgagctggccaaggccagaagcgagtggaacaaggagaagcaggaggagatccacagaatccaggagcagaacgagcaggactacagacagttcctggacgaccacagaaacaagatcaacgaggtgctggccgccgccaaggaggacttcatgaagcagaagaccgagctgctgctgcagaaggagaccgagctgcagacctgcctggaccagagcagaagagagtggaccatgcaggaggccaagagaatccagctggagatctaccagtacgaggaggacatcctgaccgtgctgggcgtgctgctgagcgacacccagaaggagcacatcagcgacagcgaggacaagcagctgctggagatcatgagcacctgcagcagcaagtggatgagcgtgcagtacttcgagaagctgaagggctgcatccagaaggccttccaggacaccctgcccctgctggtggagaacgccgaccccgagtggaagaagagaaacatggccgagctgagcaaggacagcgccagccagggcaccggccagggcgaccccggccccgccgccggccaccacgcccagcccctggccctgcaggccaccgaggccgaggccgacaagaagaaggtgctggagatcaaggacctgtgctgcggccactgcttccaggagctggagaaggccaagcaggagtgccaggacctgaagggcaagctggagaagtgctgcagacacctgcagcacctggagagaaagcacaaggccgtggtggagaagatcggcgaggagaacaacaaggtggtggaggagctgatcgaggagaacaacgacatgaagaacaagctggaggagctgcagaccctgtgcaagaccccccccagaagcctgagcgccggcgccatcgagaacgcctgcctgccctgcagcggcggcgccctggaggagctgagaggccagtacatcaaggccgtgaagaagatcaagtgcgacatgctgagatacatccaggagagcaaggagagagccgccgagatggtgaaggccgaggtgctgagagagagacaggagaccgccagaaagatgagaaagtactacctgatctgcctgcagcagatcctgcaggacgacggcaaggagggcgccgagaagaagatcatgaacgccgccagcaagctggccaccatggccaagctgctggagacccccatcagcagcaagagccagagcaagaccacccagagcgccctgcccctgaccagcgagatgctgatcgccgtgaagaagagcaagagaaacgacgtgaaccagaagatcccctgctgcatcgagagcaagagcaacagcgtgaacaccatcaccagaaccctgtgcgagcaggcccccaagagaagagccgcctgcaacctgcagagactgctggagaacagcgagcaccagagcatcaagcacgtgggcagcaaggagacccacctggagttccagttcggcgacggcagctgcaagcacctgaacagcctgcccagaaacgtgagccccgagttcgtgccctgcgagggcgagggcggcttcggcctgcacaagaagaaggacctgctgagcgacaacggcagcgagagcctgccccacagcgccgcctaccccttcctgggcaccctgggcaacaagcccagccccagatgcacccccggccccagcgagagcggctgcatgcacatcaccttcagagacagcaacgagagactgggcctgaaggtgtacaagtgcaaccccctgatggagagcgagaacgccgccagcgagaagagccagggcctggacgtgcaggagccccccgtgaaggacggcggcgacctgagcgactgcctgggctggcccagcagcagcgccaccctgagcttcgacagcagagaggccagcttcgtgcacggcagaccccagggcaccctggagatccccagcgagagcgtgaagagcaagcagttcagccccagcggctacctgagcgacaccgaggagagcaacatgatctgccagaccatgaagtgccagagataccagaccccctacctgagcgaggagaccacctacctggagcccggcaagatcagcgtgaactgcggccaccccagcagacacaaggccgacagactgaagagcgacttcaagaagctgagcagcaccctgcccagcagcgtgtgccagcagcccagcagaaagctgatcgtgcccctgagcagccagcaggacagcggcttcgacagccccttcgtgaacctggactag

SEQ ID NO: 293534 - protein, 1391 aa, Artificial Sequence
  derived and/or modified sequence
MAVEGSTITSRIKNLLRSPSIKLRRSKAGNRREDLSSKVTLEKVLGITVSGGRGLACDPRSGLVAYPAGCVVVLFNPRKHKQHHILNSSRKTITALAFSPDGKYLVTGESGHMPAVRVWDVAEHSQVAELQEHKYGVACVAFSPSAKYIVSVGYQHDMIVNVWAWKKNIVVASNKVSSRVTAVSFSEDCSYFVTAGNRHIKFWYLDDSKTSKVNATVPLLGRSGLLGELRNNLFTDVACGRGKKADSTFCITSSGLLCEFSDRRLLDKWVELRVYPEVKDSNQACLPPSSFITCSSDNTIRLWNTESSGVHGSTLHRNILSSDLIKIIYVDGNTQALLDTELPGGDKADASLLDPRVGIRSVCVSPNGQHLASGDRMGTLRVHELQSLSEMLKVEAHDSEILCLEYSKPDTGLKLLASASRDRLIHVLDAGREYSLQQTLDEHSSSITAVKFAASDGQVRMISCGADKSIYFRTAQKSGDGVQFTRTHHVVRKTTLYDMDVEPSWKYTAIGCQDRNIRIFNISSGKQKKLFKGSQGEDGTLIKVQTDPSGIYIATSCSDKNLSIFDFSSGECVATMFGHSEIVTGMKFSNDCKHLISVSGDSCIFVWRLSSEMTISMRQRLAELRQRQRGGKQQGPSSPQRASGPNRHQAPSMLSPGPALSSDSDKEGEDEGTEEELPALPVLAKSTKKALASVPSPALPRSLSHWEMSRAQESVGFLDPAPAANPGPRRRGRWVQPGVELSVRSMLDLRQLETLAPSLQDPSQDSLAIIPSGPRKHGQEALETSLTSQNEKPPRPQASQPCSYPHIIRLLSQEEGVFAQDLEPAPIEDGIVYPEPSDNPTMDTSEFQVQAPARGTLGRVYPGSRSSEKHSPDSACSVDYSSSCLSSPEHPTEDSESTEPLSVDGISSDLEEPAEGDEEEEEEEGGMGPYGLQEGSPQTPDQEQFLKQHFETLASGAAPGAPVQVPERSESRSISSRFLLQVQTRPLREPSPSSSSLALMSRPAQVPQASGEQPRGNGANPPGAPPEVEPSSGNPSPQQAASVLLPRCRLNPDSSWAPKRVATASPFSGLQKAQSVHSLVPQERHEASLQAPSPGALLSREIEAQDGLGSLPPADGRPSRPHSYQNPTTSSMAKISRSISVGENLGLVAEPQAHAPIRVSPLSKLALPSRAHLVLDIPKPLPDRPTLAAFSPVTKGRAPGEAEKPGFPVGLGKAHSTTERWACLGEGTTPKPRTECQAHPGPSSPCAQQLPVSSLFQGPENLQPPPPEKTPNPMECTKPGAALSQDSEPAVSLEQCEQLVAELRGSVRQAVRLYHSVAGCKMPSAEQSRIAQLLRDTFSSVRQELEAVAGAVLSSPGSSPGAVGAEQTQALLEQYSELLLRAVERRMERKL

SEQ ID NO: 293535 - protein, 1347 aa, Artificial Sequence
  derived and/or modified sequence
MPAVRVWDVAEHSQVAELQEHKYGVACVAFSPSAKYIVSVGYQHDMIVNVWAWKKNIVVASNKVSSRVTAVSFSEDCSYFVTAGNRHIKFWYLDDSKTSKVNATVPLLGRSGLLGELRNNLFTDVACGRGKKADSTFCITSSGLLCEFSDRRLLDKWVELRTTVAHCISVSQDYIFCGCADGTVRLFNPSNLHFLSTLPRPHALGTDIASVTEASRLFSGVANARYPDTIALTFDPTNQWLSCVYNDHSIYVWDVRDPKKVGKVYSALYHSSCVWSVEDLIKIIYVDGNTQALLDTELPGGDKADASLLDPRVGIRSVCVSPNGQHLASGDRMGTLRVHELQSLSEMLKVEAHDSEILCLEYSKPDTGLKLLASASRDRLIHVLDAGREYSLQQTLDEHSSSITAVKFAASDGQVRMISCGADKSIYFRTAQKSGDGVQFTRTHHVVRKTTLYDMDVEPSWKYTAIGCQDRNIRIFNISSGKQKKLFKGSQGEDGTLIKVQTDPSGIYIATSCSDKNLSIFDFSSGECVATMFGHSEIVTGMKFSNDCKHLISVSGDSCIFVWRLSSEMTISMRQRLAELRQRQRGGKQQGPSSPQRASGPNRHQAPSMLSPGPALSSDSDKEGEDEGTEEELPALPVLAKSTKKALASVPSPALPRSLSHWEMSRAQESVGFLDPAPAANPGPRRRGRWVQPGVELSVRSMLDLRQLETLAPSLQDPSQDSLAIIPSGPRKHGQEALETSLTSQNEKPPRPQASQPCSYPHIIRLLSQEEGVFAQDLEPAPIEDGIVYPEPSDNPTMDTSEFQVQAPARGTLGRVYPGSRSSEKHSPDSACSVDYSSSCLSSPEHPTEDSESTEPLSVDGISSDLEEPAEGDEEEEEEEGGMGPYGLQEGSPQTPDQEQFLKQHFETLASGAAPGAPVQVPERSESRSISSRFLLQVQTRPLREPSPSSSSLALMSRPAQVPQASGEQPRGNGANPPGAPPEVEPSSGNPSPQQAASVLLPRCRLNPDSSWAPKRVATASPFSGLQKAQSVHSLVPQERHEASLQAPSPGALLSREIEAQDGLGSLPPADGRPSRPHSYQNPTTSSMAKISRSISVGENLGLVAEPQAHAPIRVSPLSKLALPSRAHLVLDIPKPLPDRPTLAAFSPVTKGRAPGEAEKPGFPVGLGKAHSTTERWACLGEGTTPKPRTECQAHPGPSSPCAQQLPVSSLFQGPENLQPPPPEKTPNPMECTKPGAALSQDSEPAVSLEQCEQLVAELRGSVRQAVRLYHSVAGCKMPSAEQSRIAQLLRDTFSSVRQELEAVAGAVLSSPGSSPGAVGAEQTQALLEQYSELLLRAVERRMERKL

SEQ ID NO: 293536 - DNA, 4044 bp, Artificial Sequence
  derived and/or modified sequence
atgcccgccgtgagagtgtgggacgtggccgagcacagccaggtggccgagctgcaggagcacaagtacggcgtggcctgcgtggccttcagccccagcgccaagtacatcgtgagcgtgggctaccagcacgacatgatcgtgaacgtgtgggcctggaagaagaacatcgtggtggccagcaacaaggtgagcagcagagtgaccgccgtgagcttcagcgaggactgcagctacttcgtgaccgccggcaacagacacatcaagttctggtacctggacgacagcaagaccagcaaggtgaacgccaccgtgcccctgctgggcagaagcggcctgctgggcgagctgagaaacaacctgttcaccgacgtggcctgcggcagaggcaagaaggccgacagcaccttctgcatcaccagcagcggcctgctgtgcgagttcagcgacagaagactgctggacaagtgggtggagctgagaaccaccgtggcccactgcatcagcgtgagccaggactacatcttctgcggctgcgccgacggcaccgtgagactgttcaaccccagcaacctgcacttcctgagcaccctgcccagaccccacgccctgggcaccgacatcgccagcgtgaccgaggccagcagactgttcagcggcgtggccaacgccagataccccgacaccatcgccctgaccttcgaccccaccaaccagtggctgagctgcgtgtacaacgaccacagcatctacgtgtgggacgtgagagaccccaagaaggtgggcaaggtgtacagcgccctgtaccacagcagctgcgtgtggagcgtggaggacctgatcaagatcatctacgtggacggcaacacccaggccctgctggacaccgagctgcccggcggcgacaaggccgacgccagcctgctggaccccagagtgggcatcagaagcgtgtgcgtgagccccaacggccagcacctggccagcggcgacagaatgggcaccctgagagtgcacgagctgcagagcctgagcgagatgctgaaggtggaggcccacgacagcgagatcctgtgcctggagtacagcaagcccgacaccggcctgaagctgctggccagcgccagcagagacagactgatccacgtgctggacgccggcagagagtacagcctgcagcagaccctggacgagcacagcagcagcatcaccgccgtgaagttcgccgccagcgacggccaggtgagaatgatcagctgcggcgccgacaagagcatctacttcagaaccgcccagaagagcggcgacggcgtgcagttcaccagaacccaccacgtggtgagaaagaccaccctgtacgacatggacgtggagcccagctggaagtacaccgccatcggctgccaggacagaaacatcagaatcttcaacatcagcagcggcaagcagaagaagctgttcaagggcagccagggcgaggacggcaccctgatcaaggtgcagaccgaccccagcggcatctacatcgccaccagctgcagcgacaagaacctgagcatcttcgacttcagcagcggcgagtgcgtggccaccatgttcggccacagcgagatcgtgaccggcatgaagttcagcaacgactgcaagcacctgatcagcgtgagcggcgacagctgcatcttcgtgtggagactgagcagcgagatgaccatcagcatgagacagagactggccgagctgagacagagacagagaggcggcaagcagcagggccccagcagcccccagagagccagcggccccaacagacaccaggcccccagcatgctgagccccggccccgccctgagcagcgacagcgacaaggagggcgaggacgagggcaccgaggaggagctgcccgccctgcccgtgctggccaagagcaccaagaaggccctggccagcgtgcccagccccgccctgcccagaagcctgagccactgggagatgagcagagcccaggagagcgtgggcttcctggaccccgcccccgccgccaaccccggccccagaagaagaggcagatgggtgcagcccggcgtggagctgagcgtgagaagcatgctggacctgagacagctggagaccctggcccccagcctgcaggaccccagccaggacagcctggccatcatccccagcggccccagaaagcacggccaggaggccctggagaccagcctgaccagccagaacgagaagccccccagaccccaggccagccagccctgcagctacccccacatcatcagactgctgagccaggaggagggcgtgttcgcccaggacctggagcccgcccccatcgaggacggcatcgtgtaccccgagcccagcgacaaccccaccatggacaccagcgagttccaggtgcaggcccccgccagaggcaccctgggcagagtgtaccccggcagcagaagcagcgagaagcacagccccgacagcgcctgcagcgtggactacagcagcagctgcctgagcagccccgagcaccccaccgaggacagcgagagcaccgagcccctgagcgtggacggcatcagcagcgacctggaggagcccgccgagggcgacgaggaggaggaggaggaggagggcggcatgggcccctacggcctgcaggagggcagcccccagacccccgaccaggagcagttcctgaagcagcacttcgagaccctggccagcggcgccgcccccggcgcccccgtgcaggtgcccgagagaagcgagagcagaagcatcagcagcagattcctgctgcaggtgcagaccagacccctgagagagcccagccccagcagcagcagcctggccctgatgagcagacccgcccaggtgccccaggccagcggcgagcagcccagaggcaacggcgccaacccccccggcgccccccccgaggtggagcccagcagcggcaaccccagcccccagcaggccgccagcgtgctgctgcccagatgcagactgaaccccgacagcagctgggcccccaagagagtggccaccgccagccccttcagcggcctgcagaaggcccagagcgtgcacagcctggtgccccaggagagacacgaggccagcctgcaggcccccagccccggcgccctgctgagcagagagatcgaggcccaggacggcctgggcagcctgccccccgccgacggcagacccagcagaccccacagctaccagaaccccaccaccagcagcatggccaagatcagcagaagcatcagcgtgggcgagaacctgggcctggtggccgagccccaggcccacgcccccatcagagtgagccccctgagcaagctggccctgcccagcagagcccacctggtgctggacatccccaagcccctgcccgacagacccaccctggccgccttcagccccgtgaccaagggcagagcccccggcgaggccgagaagcccggcttccccgtgggcctgggcaaggcccacagcaccaccgagagatgggcctgcctgggcgagggcaccacccccaagcccagaaccgagtgccaggcccaccccggccccagcagcccctgcgcccagcagctgcccgtgagcagcctgttccagggccccgagaacctgcagccccccccccccgagaagacccccaaccccatggagtgcaccaagcccggcgccgccctgagccaggacagcgagcccgccgtgagcctggagcagtgcgagcagctggtggccgagctgagaggcagcgtgagacaggccgtgagactgtaccacagcgtggccggctgcaagatgcccagcgccgagcagagcagaatcgcccagctgctgagagacaccttcagcagcgtgagacaggagctggaggccgtggccggcgccgtgctgagcagccccggcagcagccccggcgccgtgggcgccgagcagacccaggccctgctggagcagtacagcgagctgctgctgagagccgtggagagaagaatggagagaaagctgtag

SEQ ID NO: 293537 - DNA, 4044 bp, Artificial Sequence
  derived and/or modified sequence
atgccagccgtccgggtttgggatgtagccgagcactcccaggtggccgagcttcaggaacacaagtacggtgtggcatgcgtcgcgttttcccccagtgccaagtacatcgtaagcgtggggtaccagcacgacatgattgtgaacgtttgggcctggaagaagaacattgtagttgcttcaaataaggtcagcagtagagtcaccgccgtcagtttcagcgaggactgttcttacttcgtgaccgccggaaacaggcatattaagttctggtatctcgacgactcgaaaaccagcaaggtaaacgccacagtacctctgttaggtcgtagcggactgcttggggaactccgaaataacctcttcacggacgtcgcttgtggacgcggtaaaaaggcggatagtacattttgcatcacttcaagcgggctgctgtgcgaattcagtgaccggaggttgctcgataaatgggtagagcttcgcaccaccgttgcccattgcataagtgtgagtcaggactacatcttctgtggctgtgctgacggtacagtgcgcctgttcaatccttcaaacttgcactttttgagtaccctgcccaggccacatgcactgggaaccgatattgctagcgtcacagaggcgtctcggttattctcaggcgtggccaacgcgcgttatcctgataccatagctctgacatttgaccctacaaaccagtggctgagttgtgtgtacaatgatcattctatatatgtgtgggatgttcgggatccaaagaaagtgggcaaggtgtattctgctctgtatcactcttcctgtgtgtggtctgtggaggaccttattaaaatcatctacgtggacggaaacacccaggctctcttggacacagaattgcctggcggtgataaagccgatgcatcccttttggaccccagggtgggcatccgtagcgtgtgtgtgagccccaacgggcagcatttggccagcggcgaccgaatgggcacattaagagtacacgagctacagtcattgtctgagatgctgaaggttgaagcccacgatagcgaaatactctgcttggaatactccaaacccgataccggcctcaaactcctcgcctccgcctccagggacagattaatccacgtcctcgacgcagggcgcgagtactcactgcagcagacactggacgaacattcatcatcaatcactgccgtgaagttcgctgcgtccgatggacaggtacgaatgatatcttgcggcgcggataaatccatctacttccgaacagctcagaagtccggagacggcgtccagttcacacgcactcatcacgtggttcggaagaccactctttatgatatggatgtagaaccatcatggaaatataccgccatcggatgccaagaccggaacataagaatttttaatatttcatcaggaaagcagaaaaaacttttcaagggaagccagggcgaagacggaacattaattaaggtacaaacagatcccagcggtatctacatcgccacttcgtgctcagataaaaacctcagtatcttcgacttttcgtcaggcgaatgcgttgccaccatgttcggacactctgagatcgtcaccggaatgaagttttccaatgactgcaaacacctgatctctgtctctggtgacagttgcatttttgtatggaggctatcctcagaaatgacaattagcatgagacagaggcttgccgagctcagacagcgccagcggggaggcaaacagcagggcccatcctcaccccaacgcgccagtggaccaaaccgccatcaagccccatcgatgctgtccccaggacctgcattaagctccgactctgacaaggaaggcgaggacgagggaactgaggaagagctgcccgctctgcctgtgctcgctaaaagtaccaagaaggccctcgcctcggtgccgtccccagctctgcctcggtcacttagccattgggagatgtctcgcgctcaggagagtgttggcttcctcgatccagcccccgcagcaaatcctggacctaggaggcgaggccggtgggttcagcctggagtggaactcagcgtgaggtctatgctcgatctgagacagctggagaccctcgctccaagcctccaggatccatcgcaggacagcctggccattataccgagcggaccccgtaagcacggccaagaagccctcgaaactagtttaaccagtcaaaacgagaagccaccccgcccccaggccagccagccttgcagctacccccatatcatcagactattatcgcaggaagaaggagtgtttgcacaggatctcgagccagcccccatagaggatggaattgtataccctgagccaagcgataatcctaccatggatacctccgagttccaagtgcaggcgcctgctagagggacactcggcagagtctatcctggaagccggtcgagcgagaaacactcccctgatagtgcttgttctgtggactacagctcaagttgcctcagcagccctgagcacccgaccgaggactcggagagcacggagcctctcagtgtggacgggatcagctctgatctagaggagccagccgagggggacgaagaggaagaggaagaagaaggtggaatgggcccctatgggctgcaagagggctccccccagactccagaccaggaacaatttctaaagcaacacttcgagaccttggcctccggagccgccccgggcgcacccgttcaggttcctgagcggtccgaatctagatcaatctcaagtagatttctgctccaggttcagacgcgcccgctgcgcgagcctagcccatcctcgagttcattggcgttaatgagcaggcctgctcaagtgccacaagcgagcggtgagcagccacggggcaacggagccaacccaccaggggccccccctgaggttgagcctagctccggcaacccaagtcctcagcaggctgcttccgtactgctgccacggtgtcgtctaaacccagactcatcctgggctccaaaaagagtcgctacagcgtctcccttttccggtctgcagaaagctcagtctgtgcactccctggtgcctcaggagcgacacgaggcctccctgcaggcaccctcgcctggcgcccttctgtcgagggagatagaggcacaggatgggttggggtcactaccgcctgctgacggaagaccctccaggccacacagttaccaaaatcccactactagttccatggccaagatatcccgctccatttctgtgggggaaaacctcggcttagtggcagagcctcaagcacacgccccaattagggtcagccccctctctaagctggctttgccatcgcgagctcacctagtgcttgatatcccgaagccattgcctgatcgccccaccttagcagcatttagcccggttaccaagggacgggcgccgggagaggctgaaaagccgggctttcctgtgggcctgggaaaagctcactccactactgagcggtgggcatgtttgggtgagggaactacacccaaaccaaggactgaatgtcaggcccacccaggaccttcctctccttgtgcccagcagctgcccgttagtagtttgttccagggtcccgagaatctgcagccccctcctccggagaaaacccctaatcccatggagtgcactaaaccaggggctgctctttcccaggacagcgaaccagccgtctctttggaacagtgtgagcaacttgtcgcagagctcaggggaagcgtccgtcaggccgtgcgactgtaccactcagtcgcaggatgtaaaatgccttccgcagaacagagtaggatagcacagctactcagagacactttctccagtgtccgtcaggagctggaggccgtagctggagcagtcttgagttcgcctggaagttctccgggtgcagtaggagcagagcaaactcaggcgctactggagcagtattctgaattactgctgcgcgccgtggagaggagaatggagagaaaactttag

SEQ ID NO: 293538 - DNA, 4044 bp, Artificial Sequence
  derived and/or modified sequence
atgcctgctgtgcgggtgtgggatgtggccgagcacagccaggtggccgagctgcaggagcacaagtatggagtggcctgtgtggccttcagccccagcgccaagtacatcgtgtctgtgggctaccagcacgacatgattgtgaatgtgtgggcctggaagaagaacatcgtggtggccagcaacaaggtgagcagccgggtgacagctgtgtccttcagcgaggactgcagctactttgtgacagctggcaacagacacatcaagttctggtacctggatgacagcaagaccagcaaggtgaatgccaccgtgcccctgctgggccgcagcggcctgctgggggagctgaggaacaacctcttcacagatgtggcctgtggccggggcaagaaggctgacagcaccttctgcatcaccagcagcggcctgctgtgtgagttcagtgaccggcggctgctggacaagtgggtggagctgcggaccaccgtggcccactgcatctctgtgtcccaggactacatcttctgtggctgtgctgatggcaccgtgcggctcttcaaccccagcaacctgcacttcctgagcaccctgccccggccccacgccctgggcacagacatcgcctctgtgacagaggccagccgcctcttctctggagtggccaatgcccgctacccagacaccatcgccctgacctttgaccccaccaaccagtggctgagctgtgtgtacaatgaccacagcatctacgtgtgggatgtgcgggaccccaagaaggtgggcaaggtgtacagcgccctgtaccacagcagctgtgtgtggagcgtggaggacctgatcaagatcatctacgtggatggcaacacccaggccctgctggacacagagctgcctggaggagacaaggcagatgccagcctgctggacccccgggtgggcatccgctctgtgtgtgtgagccccaacggccagcacctggccagcggggacaggatgggcaccctgcgggtgcatgagctgcagagcctgtctgagatgctgaaggtggaggcccatgattctgagatcctgtgcctggagtacagcaagccagacaccggcctgaagctgctggccagcgccagccgggacaggctcatccacgtgctggatgctggccgggagtacagcctgcagcagaccctggatgagcacagcagcagcatcacagctgtgaagtttgctgccagtgatggccaggtgaggatgatcagctgtggggctgacaagagcatctacttcagaacagcccagaagtctggagatggagtgcagttcaccaggacccaccacgtggtgaggaagaccaccctgtatgacatggatgtggagcccagctggaagtacacagccatcggctgccaggacaggaacatccgcatcttcaacatcagcagcggcaagcagaagaagctgttcaagggcagccagggagaagatggcaccctcatcaaggtgcagacagaccccagcggcatctacatcgccaccagctgcagcgacaagaacctgagcatctttgacttcagcagtggagaatgtgtggccaccatgtttggccacagcgagatcgtgacaggcatgaagttcagcaatgactgcaagcacctgatctctgtgtctggggacagctgcatctttgtgtggaggctgagcagcgagatgaccatctccatgaggcagaggctggccgagctgcggcagaggcagaggggcggcaagcagcagggccccagcagcccccagagggccagcggccccaacagacaccaggcccccagcatgctgagccctggccctgccctgagcagtgacagcgacaaggagggagaagatgagggcacagaggaggagctgcctgccctgcctgtgctggccaagagcaccaagaaggccctggcctctgtgcccagccctgccctgcccaggagcctgagccactgggagatgagccgggcccaggagagcgtgggcttcctggaccctgccccagctgccaaccctggcccccggcggcggggccgctgggtgcagcccggggtggagctgtctgtgcgctccatgctggacctgcggcagctggagaccctggcccccagcctgcaggaccccagccaggacagcctggccatcatccccagcggccccaggaagcacggccaggaggccctggagaccagcctgaccagccagaatgagaagccaccccggccccaggccagccagccctgcagctacccccacatcatccggctgctgagccaggaggagggcgtgtttgcccaggacctggagcccgcccccattgaagatggcatcgtgtacccagagcccagcgacaaccccaccatggacaccagcgagttccaggtgcaggccccagcccggggcaccctgggccgggtgtacccaggcagccgcagcagcgagaagcacagcccagacagcgcctgcagcgtggactacagcagcagctgcctgagcagccctgagcaccccacagaagattctgagagcacagagcccctgtctgtggatggcatcagcagtgacctggaggagccagcagaaggagatgaggaggaggaggaggaggagggcggcatgggcccctacggcctgcaggagggcagcccccagaccccagaccaggagcagttcctgaagcagcactttgagaccctggccagcggggccgcccctggggcccctgtgcaggtgcctgagaggtctgagagccgcagcatcagcagccgcttcctgctgcaggtgcagacccggcccctgcgggagcccagccccagcagcagcagcctggccctgatgagcaggcctgcccaggtgccccaggccagcggggagcagcccagaggaaatggagccaaccccccaggggcccctcctgaggtggagcccagcagcggcaaccccagcccccagcaggccgcctctgtgctgctgccccgctgccgcctgaacccagacagctcctgggcccccaagagggtggccacagccagccccttcagcggcctgcagaaggcccagagcgtgcacagcctggtgccccaggagagacatgaggccagcctgcaggcccccagccctggggccctgctgagccgggagattgaggcccaggacggcctgggcagcctgcccccagcagatggccggcccagccggccccacagctaccagaaccccaccaccagctccatggccaagatcagccgcagcatctctgtgggggagaacctgggcctggtggccgagccccaggcccacgcccccatccgggtgagccccctgagcaagctggccctgcccagccgggcccacctggtgctggacatccccaagcccctgcctgaccggcccaccctggccgccttcagccctgtgaccaagggccgggcccctggagaggccgagaagccaggcttccctgtgggcctgggcaaggcccacagcaccacagagcgctgggcctgcctgggggagggcaccacccccaagcccaggacagagtgccaggcccaccctggccccagcagcccctgtgcccagcagctgcctgtgagcagcctcttccagggccctgagaacctgcagcccccacctcctgagaagacccccaaccccatggagtgcaccaagccaggagctgccctgagccaggacagcgagcctgctgtgtccctggagcagtgtgagcagctggtggccgagctgcggggctctgtgcggcaggccgtgcggctgtaccacagcgtggccggctgcaagatgcccagcgctgagcagagccgcatcgcccagctgctgcgggacaccttcagctctgtgcggcaggagctggaggccgtggccggggctgtgctgagcagccctggcagcagccctggagctgtgggcgctgagcagacccaggccctgctggagcagtacagcgagctgctgctgcgggctgtggagaggaggatggagaggaagctgtag

SEQ ID NO: 293539 - DNA, 4044 bp, Artificial Sequence
  derived and/or modified sequence
atgcccgccgtgcgggtgtgggacgtggccgagcacagccaggtggcagaattgcaagagcataaatatggtgtggcctgtgtggcattctctccaagcgctaagtatattgtctcagtcggttatcaacacgatatgattgtcaacgtgtgggcgtggaaaaagaatattgtcgtcgctagcaacaaagtgtcatcccgagtcaccgcggtcagttttagcgaggattgctcatactttgtgacagctggcaatcgccatatcaagttctggtacttggacgactccaaaacctctaaggtcaacgccactgttcctctcctgggccgttctggcctcttgggagagctgcgcaacaatctgtttactgatgtggcctgcgggcgtggcaagaaagccgattccaccttttgcataaccagtagcggcctcctgtgcgaattctcagatcgtcggctactagacaagtgggtggaattaaggacaactgtggctcattgtataagtgttagccaggactatattttttgtggctgtgcggacggcactgtcaggctgtttaatcccagtaaccttcattttctgtctactctgcctaggcctcacgctcttggaacagatatcgccagcgtgaccgaggcctcccggttgttcagcggagtggccaatgctcgctatcccgatactatcgccctaacctttgaccctactaaccaatggctgagctgcgtgtataacgatcattcaatttatgtgtgggacgtcagggacccgaaaaaggtgggtaaggtatactcagcactgtaccattccagttgtgtttggtctgtggaagatctgataaagataatttacgttgatggcaatacacaggccctgctagacacagagctccccggcggagacaaggcggacgctagcttactggatcctcgggtcgggataaggagcgtctgtgtctcacctaacggtcagcacctcgccagtggggaccgcatgggtacactgagagtgcacgaactacagagtctgtccgaaatgctaaaagtggaggctcatgacagtgaaatcctgtgtctcgagtattccaagccagacactgggctgaagctgctcgctagcgcatcaagggaccgcctgatccatgtgctggatgcgggccgggaatattcccttcagcagacactggacgagcattcttcgtcgataaccgccgtgaaattcgccgccagcgacggtcaagtgcgtatgatttcctgcggagccgataagagcatatattttagaacagcgcagaaatcaggagacggcgtgcaattcaccaggacacaccacgtggtccggaaaacaacgctctacgatatggacgtcgagccctcctggaaatacacggccataggctgtcaggatcgcaacatccggatcttcaatatatccagtggaaagcagaaaaagctgttcaaaggaagccagggcgaagacggaaccctcattaaagtgcaaactgatccctctggcatctacattgctactagttgcagcgacaagaacctatcgatctttgatttctctagcggagaatgtgtggcaaccatgttcggccacagtgaaattgtgactggtatgaagttttcaaatgattgcaagcatttaatctcggttagcggagatagttgcatattcgtgtggaggctgagcagcgaaatgacaattagcatgcgccagcgactggcagaattgagacaaaggcaacgcggtgggaagcagcaaggcccaagcagccctcagcgggcctcaggaccaaatcgccatcaggcaccctcgatgctttcacctgggcctgcacttagttcagatagcgataaggaaggggaggatgaaggcaccgaggaagaattgcccgcattacctgtgctagctaaatcaaccaaaaaggcactggctagcgttccctctcctgcgctgccacggagcctaagccactgggagatgagtcgggctcaggagtctgtcggctttctggatcccgctcccgccgccaatcctgggcctcgccgccggggtaggtgggtgcagcctggtgtggaactgagcgtgcgcagcatgctagacctcagacagctggaaacgctggctccaagtctccaggatccatctcaggactcccttgctattattccaagtggccccagaaagcatggacaagaagccctagagaccagcctgacatcccagaacgaaaagcctcctcggccccaggccagtcagccatgttcctacccacatatcataagacttctcagccaggaggagggagtattcgcccaggacctggaacccgccccaatcgaggatggaatcgtgtatcccgaaccgtccgataaccccacaatggacacttccgaattccaggttcaggcccctgctcgtggcacattaggaagggtgtacccaggaagtagatcctccgaaaaacactcccctgattcagcatgcagcgtggattactcgtcctcctgcttgtcatcacccgagcaccctaccgaagactccgaatcgactgaaccactttccgtcgacggcataagctccgacctcgaagaacccgccgaaggtgacgaggaggaagaagaagaggagggtggtatggggccatatggcctccaggaagggtctccacagacgcccgatcaggaacaattcctgaagcaacacttcgaaaccctggcctctggagctgcccctggggccccagtccaggtgccggagcggtctgaaagccgttccatatcatctaggtttctgttgcaagtgcagactcggcccctgcgggagccctccccatcgtccagctcactggccttgatgtccagaccagcccaagtgcctcaggctagcggagaacagccccgcgggaatggagcaaatcccccgggcgccccacccgaggtcgagcctagctctgggaacccaagccctcagcaagccgcctccgtgttgctccctcgatgccgtctaaatccagactcaagttgggctcccaaaagggtggccacagcctcgcccttctctggtcttcagaaagcacagtccgttcactccctggttccacaagagcggcatgaggcatctcttcaggctccgagccccggtgcgttattgtcgagagagatcgaggcccaggacggcctgggatctctcccccctgccgacggccgcccaagtaggccgcattcataccagaaccccacgacatcaagcatggctaaaattagtcgcagcataagtgttggtgagaacctgggactcgtggccgagccccaagcccacgcacccatcagagttagtccactctctaaacttgcgcttccttctcgggcccatctggtgctggacatcccgaaacccttaccagaccgcccaacgttggctgccttctcacctgtcacaaaaggcagagccccaggggaggccgaaaaacctggttttcctgtggggctcgggaaagcccactccaccactgaacgctgggcctgcctgggcgagggcacaacgccaaaacctaggacggagtgccaggcccaccctggaccttctagcccatgtgcccagcagctacccgtatcgtctctctttcagggtccggaaaacttacagccgccaccccctgaaaagacccctaatcccatggagtgcactaagccaggggctgcattgagtcaagactcggaaccggccgtctccctggaacagtgcgagcaactggttgccgagctgaggggctcggtgcgacaggcggtgaggctgtaccattcagtggctgggtgtaaaatgccttcagcggaacagtcccgcattgcacaactcctgagagacacgttctcttcggtgaggcaggagctggaagccgtggccggcgccgtcctctcttctcccggctcttctccgggcgccgtaggcgctgagcagactcaggctctcctggagcagtactcagagctgctcctgcgggctgtggaacggcgcatggaaaggaagctgtag

SEQ ID NO: 293540 - DNA, 4695 bp, Artificial Sequence
  derived and/or modified sequence
gtgccaccatagctcctgctgctgcctctaccgctgcggctaccgcggcggagctgaaattgccgaacgcgatgcccgagggcgctgtgagcggggtggccttagctcgccgaggctggtcagtgagagggcatactgggaagccctctggagtgggaagacagtgccgctgttgagacaagacccaggactgggccggggactgtcccaaagggtttctcgtcataatggctgtggaagggtcaaccattaccagccggatcaagaatctgttgagatctccatccatcaaactgcgcaggagtaaggcaggaaaccgacgagaggacctcagctccaaggtgtgtggttgtgttgttcaatccccggaaacacaaacagcaccacatcctcaacagttccaggaaaaccatcactgcccttgccttctcccctgatggcaagtacttggtcactggagagagtgggcacatgcctgccgtgcgggtttgggacgtggcagagcacagccaggtggccgagctgcaggagcacaagtatggtgtggcttgtgtggccttctctcctagcgccaagtacattgtctctgtgggctaccagcatgacatgatcgtcaacgtgtgggcctggaagaaaaacattgtggtggcctccaacaaggtgtccagtcgggtgacagcagtgtccttctctgaggattgcagctactttgtcactgcaggcaaccgacacatcaaattctggtatctcgatgacagcaagacctcaaaggtgaatgccactgtgcccttgctgggccgctcagggctgctgggagagctacggaacaacctattcactgatgtggcctgtggcagaggaaaaaaggcggacagtaccttctgcatcacgtcctcagggctgctgtgcgagttcagtgatcgaaggcttttggacaagtgggtggagctgaggaccacagtggcccactgcatctctgtgagccaagactacatcttctgtggctgtgctgatggcaccgtgcgccttttcaacccctctaacctgcacttccttagcaccttgccccgaccccatgctctggggacagacattgctagcgtcaccgaggccagtcgcctcttctctggagtggcgaatgccaggtatccagacaccattgccttgacctttgatcctactaatcagtggctgtcttgtgtgtacaacgatcatagcatttatgtttgggatgtgagggaccccaagaaagtgggcaaggtgtactcggctctgtatcattcttcctgcgtctggagtgtggaggacctcattaaaatcatctatgtggatgggaacacccaggccctgctggacacagagctgcctggaggagacaaagctgatgcatccctgttggatccccgcgtgggcatccgctcggtgtgtgtcagccccaatggacagcatctagcatcaggggaccgtatgggcacacttagggtgcacgaacttcagtccctgagtgagatgctgaaggtggaggcccatgactctgagattctgtgcctggagtattctaagccagacacaggtctgaaactgctagcatcggcgagccgggaccggctgatccatgtgctggatgccgggcgggagtacagcctacagcagacgctggacgaacactcatcctccatcactgctgttaagtttgcagccagtgatgggcaagtccgcatgatcagctgtggagcagacaagagcatctacttccgcactgcgcagaagtctggagatggagtgcagttcacacggacacaccacgtggtgcggaagacgaccctctatgacatggatgtggagcccagctggaagtacacggctatcggctgccaggaccgaaatattcggatatttaacatcagcagtggaaagcagaagaagctgtttaaagggtcacagggtgaggacggcacactcattaaggtgcagacagacccctcagggatctacattgccaccagctgttctgacaagaatctctccatttttgacttctcctcaggcgagtgcgtggccaccatgtttggccactcagagattgtcactggcatgaaatttagtaatgattgtaaacatctcatctctgtgtctggggacagctgcatatttgtgtggcgcctgagctctgagatgaccatcagcatgaggcagcgtctggccgagttgcgccagcgtcagcggggcggcaagcagcaaggaccatcctctccccaaagggcttctggacccaaccggcaccaggccccatcaatgctgtctcctggaccggctctctcatcagacagtgacaaggagggagaagatgaggggactgaagaagaacttccagcactgcccgtccttgccaagagtaccaagaaggcactggcctcggtccccagcccagctttgccccgaagcctgtcccactgggagatgagtcgggcacaggagtccgtggggttcctggacccagctcctgcagccaacccaggacccagaagaagagggcgctgggttcagccaggtgtggaactgagcgttagatccatgctggatctgcggcagctggaaacactggccccaagcctgcaggaccctagccaggactcgctggccatcatcccatctggtcccaggaagcatgggcaggaggcccttgagacttcactcactagccagaatgaaaagccccctcggcctcaggcttcccaaccttgttcctatccccatattatccgattattgtcacaagaggaaggggtctttgcccaagatctggaacctgcacccattgaagatggtattgtctacccggagccgagtgacaaccccaccatggataccagtgagttccaagtgcaggctccagcccggggaactctgggaagagtgtacccaggcagcaggagctcagaaaagcacagccctgacagtgcctgctctgtggattacagcagcagctgcctttccagcccggagcaccccactgaagactctgagagcacggagcccctcagtgtggatggcatctcctcagaccttgaagagccagctgagggtgatgaagaagaggaagaagaggagggaggcatgggcccctatgggctacaggagggcagcccccagactccagaccaggagcagtttctaaaacagcactttgagactctggccagtggagctgctccaggggccccagtgcaggtcccagagaggtcagagtctcggagtatctcttcacgattcctgttgcaagtacagacccgcccactcagggaaccatccccatcctcctcaagcctggcactgatgtcgagaccagcccaggtgccacaggcatctggtgagcagccgagaggcaatggtgccaatccccctggagcacccccggaggtggaaccgtcctctggcaaccccagcccccagcaggcagcctctgtgctgttgccacgatgccgtctcaaccctgacagcagctgggctcccaagagagtggccacagccagccccttttctggactccagaaggcccagtctgtgcacagtctggtgccacaggaaagacatgaggccagtctgcaggccccttcaccaggcgcactgctgtctcgggagatcgaagctcaggatggtctgggctccctgcccccagctgatggccgtccgtctcggcctcactcctatcagaaccccaccaccagttccatggccaagatatcccgcagtatctctgttggggagaacctgggcctggtggctgaacctcaagctcatgcccccatccgagtctcaccactcagcaagctggccctgcccagccgggctcacctggtcctggacatccccaaaccactgcctgaccgtcctaccctggctgcattctctcctgtcaccaaaggccgggcccctggcgaggcagaaaagcctggcttcccggtgggcctaggaaaagctcacagtacaactgagagatgggcctgtttgggggagggcaccactcccaagcctaggacagagtgccaggctcatcctgggcccagcagcccctgtgcccagcaactgccagtcagcagcctcttccaaggccctgaaaacttgcagcccccaccccctgagaagactcccaaccccatggaatgcaccaagccaggggcagccctgagccaggactcagagccagcggtgagcctggagcagtgtgagcagctggtggcagagctccgcggcagcgtgcgccaggcagtgcggctctaccactcggtggctggctgcaagatgccctcagcagagcaaagtcggattgcccagctcctcagagacaccttctcttcagtgcgacaggagctggaagctgtggctggggcagtgctgtccagcccaggcagcagccctggggctgtgggagccgagcagacacaggccctgctggagcaatactcagaactgttgcttcgagccgtggaacggcgtatggaacgcaaactctgagttctggaagcctgtcccaagtgaatgaatgctccagcgattccaaactgcagcccctctgcccctcaccaaaacctgcggggctgcttggagtggaaagcagggagcagtgttcagaggcaaagcagccttcccagccgctcctcgtggggggcctgtatttattaatttatttccctg

SEQ ID NO: 293541 - DNA, 4044 bp, Artificial Sequence
  derived and/or modified sequence
atgccagcagtacgggtgtgggatgtagctgaacacagtcaggtggccgaactgcaagagcacaagtacggcgtggcgtgtgttgctttttcacccagtgccaagtatattgtatccgtggggtatcaacacgacatgatcgttaatgtatgggcttggaaaaagaacattgtcgtcgcatccaacaaggtgtcttcacgcgttactgccgtgtcgttcagcgaggattgttcatactttgtaaccgctggcaacaggcacataaagttttggtacttagatgattcgaaaacgagcaaggtcaacgccacagtgcctctgctcggcaggagtggcctgctgggcgagttacggaacaacctgttcacagacgtcgcctgcggccgaggcaaaaaggccgattccactttctgcattacatcaagcgggctactttgcgagttcagcgacagacggctacttgacaaatgggtggaactgcgtaccacagtggcacactgcatttctgttagccaggactatattttctgcgggtgcgcagacggcaccgttcgcttattcaatccgagcaaccttcattttctgtcgaccctgccgcgtccccacgcgctgggcaccgacattgcttccgtgacagaggcatctcgtctgttctcgggagttgctaatgctcggtatcccgacacgatcgcgcttacttttgacccaacaaaccagtggctgtcctgcgtctacaacgaccactctatttacgtctgggacgtgcgggacccgaagaaagttggcaaagtgtactctgctttgtatcacagtagttgcgtctggagtgttgaagatctgataaagattatctacgtggacggaaacacccaggctcttttggacactgaattaccgggtggtgacaaagcggatgcatcacttttggacccacgagtgggcatccgttctgtatgtgtttccccaaacggccagcacctggcatccggcgataggatgggcactcttagagtgcacgagctgcagtccctgagtgagatgctgaaggtagaagcccatgatagtgagatactgtgcttagagtactctaaacccgataccgggctaaagctactcgcctccgcttcacgggatcggctgatacacgtgctggatgcaggtcgtgaatacagtctgcagcagactctcgacgagcatagttctagcattaccgccgtgaaattcgcggcttcagatggccaggtgaggatgatctcatgcggggctgacaaatctatctatttccgtaccgctcagaagtccggcgatggcgtccaattcacacgtacacatcacgtggtaagaaagactacgctttacgatatggatgtggagcccagctggaaatacaccgcgatcgggtgccaagaccgcaatatccgtatcttcaacatttcttcaggaaagcagaaaaaactcttcaaggggtcccagggcgaagacggtactctcataaaagtgcagaccgatccctcgggcatctatatcgccacaagttgcagcgataaaaatctttctattttcgatttttcttcgggggaatgcgtggccaccatgtttggccatagtgagatcgttacaggaatgaagttcagtaatgactgtaagcaccttatcagtgtcagtggtgactcttgcatcttcgtgtggcgcctgtcttcagagatgaccatcagcatgcgccagcggctcgctgaactcaggcagcgacagaggggaggaaaacagcaagggcctagttccccccagagggccagtggtcctaatcgccaccaggctcctagtatgctgagccctgggccagccctcagctccgacagtgataaggagggggaagacgaaggcacggaggaagaattgccggctctcccagtccttgcaaaatctactaaaaaggcgctcgcaagtgtgccctcgccagcattgcctcgttctctgtcccattgggagatgagtcgcgcacaggagtctgtcggctttctggatcctgcaccagctgctaaccccggacctcgcaggcgcggaaggtgggtccagcctggagtggagctgagcgtccgcagcatgttggatctccggcaactggagacccttgcaccctctctgcaggatccctcacaggactctctagcaataatcccttcagggcctagaaagcatggacaggaagctctcgagacatccctcaccagccagaatgagaagccgccaagaccccaggcttcacagccctgcagttatcctcatattatacggctgctgagtcaggaggaaggcgtctttgcacaggacctggaacccgcacctattgaggacggaatagtctatcccgaaccttctgacaatccaaccatggatacctcagaattccaggtccaggccccagccagggggactctcggcagggtgtatcctggttctcgctcatcagaaaagcattcgcccgattcggcttgctctgttgactattccagcagctgcctgagctcccccgagcacccgaccgaagatagcgagtcaacagagcctttgtcagttgacggcatttcttccgacctcgaagagcctgctgaaggcgatgaggaagaggaagaggaggaggggggtatggggccttacggactgcaggaaggctcaccacaaacccccgaccaagagcagttcctcaaacagcatttcgaaacattggcgagtggagctgctcctggggctcccgtgcaggtgcctgaacgaagtgaaagtcgctccatatcatcacggttcttgctgcaggttcaaacccgtcccctgcgcgaacctagtccttcttcctcctctctagctctaatgtccagaccagctcaggtgcctcaggccagtggagagcagcccaggggcaatggcgcaaacccccctggggcacctccggaagtggagccctcttccggaaatccttccccacagcaagctgcatcggtgctgctgcccaggtgtaggctgaacccagactctagttgggcgcctaagcgggtcgctaccgcttcaccatttagcggcctccagaaggcccagtccgtgcactccctggtgccgcaagaacgtcatgaggcaagcctgcaggctcctagccccggagctctgctgagtagagaaattgaagctcaggatggcctgggctccctccctccagccgacggtcgcccatccaggcctcattcttaccaaaatccgacaacatcttcgatggccaaaatttctcgctccatttctgtgggcgaaaatctgggactggtcgccgaaccccaggcccacgctcctatccgggtcagtcctctgtcgaagctggccctgccgagccgggctcatttggtactggacatacccaagccgctcccagaccggccaacgctggcggcattttctccagtaacaaagggacgtgcccctggggaggcagaaaagcctgggtttcctgttggtcttggaaaggcccacagcaccaccgagcgttgggcctgccttggagaggggactacccccaagccacggacggagtgccaggcccatccaggtccatcgtccccatgcgcacagcaactccctgtcagctccctcttccaaggcccagagaatctacaaccacccccacccgagaagacgccaaacccgatggaatgcactaaaccaggagctgcgctgagtcaggatagcgaacctgccgttagcttggagcagtgtgagcagctggtggccgaactgaggggcagtgttcgccaggcagtaagactgtatcactctgtggctggctgcaaaatgccatccgctgaacagtcccgcatcgcacaactgctgcgggataccttttcctccgtgcggcaggaattagaggccgtggcaggcgctgtgctgtctagtccaggctcgtcacctggcgctgtcggtgcagagcaaacgcaggccctgctcgagcagtactctgagttactgctgcgagccgtagaacgacggatggagaggaagctttag

SEQ ID NO: 293542 - protein, 1273 aa, Artificial Sequence
  derived and/or modified sequence
MKRRLDDQESPVYAAQQRRIPGSTEAFPHQHRVLAPAPPVYEAVSETMQSATGIQYSVTPSYQVSAMPQSSGSHGPAIAAVHSSHHHPTAVQPHGGQVVQSHAHPAPPVAPVQGQQQFQRLKVEDALSYLDQVKLQFGSQPQVYNDFLDIMKEFKSQSIDTPGVISRVSQLFKGHPDLIMGFNTFLPPGYKIEVQTNDMVNVTTPGQVHQIPTHGIQPQPQPPPQHPSQPSAQSAPAPAQPAPQPPPAKVSKPSQLQAHTPASQQTPPLPPYASPRSPPVQPHTPVTISLGTAPSLQNNQPVEFNHAINYVNKIKNRFQGQPDIYKAFLEILHTYQKEQRNAKEAGGNYTPALTEQEVYAQVARLFKNQEDLLSEFGQFLPDANSSVLLSKTTAEKVDSVRNDHGGTVKKPQLNNKPQRPSQNGCQIRRHPTGTTPPVKKKPKLLNLKDSSMADASKHGGGTESLFFDKVRKALRSAEAYENFLRCLVIFNQEVISRAELVQLVSPFLGKFPELFNWFKNFLGYKESVHLETYPKERATEGIAMEIDYASCKRLGSSYRALPKSYQQPKCTGRTPLCKEVLNDTWVSFPSWSEDSTFVSSKKTQYEEHIYRCEDERFELDVVLETNLATIRVLEAIQKKLSRLSAEEQAKFRLDNTLGGTSEVIHRKALQRIYADKAADIIDGLRKNPSIAVPIVLKRLKMKEEEWREAQRGFNKVWREQNEKYYLKSLDHQGINFKQNDTKVLRSKSLLNEIESIYDERQEQATEENAGVPVGPHLSLAYEDKQILEDAAALIIHHVKRQTGIQKEDKYKIKQIMHHFIPDLLFAQRGDLSDVEEEEEEEMDVDEATGAVKKHNGVGGSPPKSKLLFSNTAAQKLRGMDEVYNLFYVNNNWYIFMRLHQILCLRLLRICSQAERQIEEENREREWEREVLGIKRDKSDSPAIQLRLKEPMDVDVEDYYPAFLDMVRSLLDGNIDSSQYEDSLREMFTIHAYIAFTMDKLIQSIVRQLQHIVSDEICVQVTDLYLAENNNGATGGQLNTQNSRSLLESTYQRKAEQLMSDENCFKLMFIQSQGQVQLTIELLDTEEENSDDPVEAERWSDYVERYMNSDTTSPELREHLAQKPVFLPRNLRRIRKCQRGREQQEKEGKEGNSKKTMENVDSLDKLECRFKLNSYKMVYVIKSEDYMYRRTALLRAHQSHERVSKRLHQRFQAWVDKWTKEHVPREMAAETSKWLMGEGLEGLVPCTTTCDTETLHFVSINKYRVKYGTVFKAP

SEQ ID NO: 293543 - DNA, 81 bp, Artificial Sequence
  derived and/or modified sequence
gaaattccaattaaaatgaaatcgacttatcttaacaaatatagcaatgctgacaacacttctccggatatgggtactgct

SEQ ID NO: 293544 - DNA, 3822 bp, Artificial Sequence
  derived and/or modified sequence
atgaagcggcggctggacgatcaggaaagcccggtttatgccgcacagcagcggcggatcccaggaagtactgaggccttcccgcaccagcatagggtgctggcccccgccccgccggtgtatgaagcagtgagtgaaacgatgcagagtgctaccgggatacagtactcagtgacaccatcctaccaggtttccgcaatgccccagagtagtggctcacatggccctgcaatagcggcagtgcacagttctcatcaccatcccacagccgtgcagccacatggcggtcaggtggttcagtctcatgctcacccagctccaccggtggcacctgtgcagggccagcagcagttccagcgattgaaagttgaagacgccctgagttatctggaccaagtcaagctgcagtttggctcacagccccaagtgtataacgacttcctcgatattatgaaggaattcaaatcacagagtattgatacacccggcgtcatttcgagggtgagccagctgttcaagggtcaccccgacttgattatgggttttaatacatttctccctccgggatacaagattgaagtgcagacaaacgatatggtcaacgtgactactccgggccaggttcatcagatccctacccacgggatccagccccagccacagccccccccacaacatccctcacaaccatctgcacagtcagctcccgcccctgctcaaccagcccctcagccaccgcccgctaaagtatccaagccttcccaacttcaggcgcatacccccgcctctcagcagacccctcctctgccaccctacgcctcaccacgatctcccccagtccagccccataccccagtgacaatttcactgggaactgccccatcactgcagaataaccaaccggttgaattcaaccacgctataaactacgtgaataagattaagaacaggttccaaggccagcccgatatttataaggcttttctggaaattcttcacacctaccagaaagagcagcgaaacgcgaaggaggcaggtggaaactacacgccagcactgactgagcaagaagtgtacgcacaggtggccagactgttcaaaaaccaggaagacttactctcagaatttgggcaatttttgccagatgctaacagcagtgttctgctgtctaagactactgccgagaaggtcgatagcgtgcggaacgatcacggtggaacagtcaaaaagcctcaactcaacaataaaccacagcgaccctctcagaacgggtgccagattaggagacatcctaccggaacaactccaccagtaaaaaagaaacccaaactgttaaatctgaaagattcatctatggcagacgcctccaaacacggcgggggcactgaatctctgttcttcgacaaagtgcgaaaggccctgagatctgccgaggcatatgagaattttttacgctgtctcgttatcttcaatcaagaagtgatctcaagagcggaattagtgcaactggtgagcccctttctggggaaatttcccgagctatttaactggttcaaaaacttcctagggtacaaggagagcgtgcacctggagacgtatcctaaggagagggccaccgagggcatcgccatggagatagactacgcctcatgtaagcgccttggtagctcatacagggccctacctaagtcttaccagcagccgaagtgtacaggaaggacccccctttgcaaggaggtcctgaatgatacatgggtgagtttcccctcctggtccgaagattccacctttgtgtctagtaaaaaaacccagtatgaggagcatatttatcggtgcgaggacgaacggttcgagttggacgtggtcctggaaaccaatttagcaacaatccgggtcctggaagcaattcaaaagaagctgtctcgcctctcggcagaagagcaagcaaagttcaggctggataacacactcggaggaacttccgaagttatacaccgaaaggccctgcagagaatttacgcagacaaggcagccgatataattgacggcctccgaaaaaatccgagcatcgctgtgcccatagttctgaagcgactaaaaatgaaagaagaagagtggcgggaggctcagcgtggttttaacaaagtgtggagggagcagaacgaaaagtattatctgaagtctctggatcaccagggtatcaacttcaagcagaatgacacaaaggttctgcgaagcaagagtttgcttaatgaaatcgagtccatctacgacgagaggcaagagcaagccaccgaggaaaatgctggggtgcccgtgggtccccacctaagcctcgcctacgaagacaaacagatcctggaggacgccgctgcccttatcattcatcatgtgaagaggcaaaccggcatccaaaaggaagataagtacaaaattaagcagatcatgcatcattttattccagatctcttattcgcccagcgcggtgacctgagcgatgtggaggaggaagaagaagaggaaatggatgttgacgaggcgactggtgctgtaaaaaagcataacggagtaggagggagccctcctaagtctaaattgcttttctcgaacacagccgctcaaaaactgcgggggatggacgaggtttacaatttattttacgttaataataattggtacatctttatgcgactacatcagattctgtgccttcgattactgcgcatttgctcacaggcagaacgacagatcgaagaagagaaccgcgaacgggagtgggaaagggaggtgctaggcatcaaaagggacaagtccgactcccctgcaattcagctccgactgaaggagcctatggacgtggacgtggaggactattaccctgcttttctggatatggtgcgcagtctactagacggtaatatcgatagctcccagtatgaagacagcctgagggaaatgttcactattcacgcatatatcgctttcacgatggataaacttattcaaagcatagttaggcagttgcaacacatcgtaagcgacgagatctgtgtgcaagtaaccgacctctacttggctgagaataacaacggagccacaggcgggcagctcaatactcagaacagcagaagtcttctggagagtacctaccaaagaaaggcagagcagctgatgagtgacgagaattgttttaaactgatgttcatccaatcacaagggcaggtacagctcaccattgagctgctagacacagaggaggaaaattccgacgatcccgtcgaggcagagcgatggtctgattatgttgaaaggtacatgaatagtgataccacatcccctgagctgagagaacatctagctcaaaaaccagtcttcctgcctcggaacctgcgcagaattcgcaaatgccagcggggccgggagcagcaggagaaggagggaaaggaggggaattctaaaaagacgatggaaaacgttgactctctcgacaagctagagtgcaggtttaaattgaactcatataaaatggtttacgtgattaaatctgaggattatatgtatagacgcacggccctactgagagcccaccagagccacgaacgcgtatctaaaaggctccatcagagatttcaggcatgggttgacaagtggaccaaggaacacgttccaagagagatggcagccgaaacaagtaagtggctgatgggtgagggtctcgaaggactggtgccctgcacgacaacctgcgataccgagactctccactttgtttccatcaacaaatatcgggtcaagtacggtactgtattcaaggcgccatag

SEQ ID NO: 293545 - DNA, 3822 bp, Artificial Sequence
  derived and/or modified sequence
atgaagaggcgactggatgaccaagaatcccccgtctacgctgcacagcaaagacgcatacccggatccaccgaggccttccctcatcagcatagagtgctcgcgcctgccccaccagtgtacgaggccgtctctgagaccatgcagagtgcgactggtattcagtactccgtgacaccctcctaccaggtttccgctatgcctcaaagctcgggatcacacggcccagccattgccgctgtgcattcatcccatcaccacccaacggcagtacagccgcacgggggccaggttgtgcagagccatgcccacccagccccacctgtggcacccgtccagggccagcaacagtttcagcggctgaaagtcgaggacgcgcttagctacctggatcaagtaaaattacagtttggcagccagccgcaggtgtacaacgactttctggatatcatgaaggagttcaagtcccagtcaatcgacacacccggcgtaatatcaagagtaagccaactgttcaagggtcacccagacttaatcatgggctttaacactttcttgccacctgggtacaagattgaagttcagactaatgacatggtgaacgtaactactcctgggcaagtacaccagattcccacccacggcattcaaccccagccacagcctccgccccaacacccaagccagcctagcgcccaatctgcaccagcacccgcacagcctgccccacagccaccaccggccaaagtgagtaagccgagtcaactgcaggcgcacaccccagccagccagcagactcccccccttcccccctatgcttctccccgcagccctcctgtgcagccccacacgcctgtcacgatttcactgggcaccgcccccagtttgcagaataaccaacctgtagagttcaatcatgcgataaactatgtaaacaaaatcaaaaacaggttccagggacagcccgatatttacaaggcttttctggagatactccacacctaccagaaagagcagcggaatgccaaggaagctggcgggaactacactccagctttaactgagcaggaagtgtatgcccaagtggctcggctgtttaaaaatcaagaggacttactgtctgagtttggacagttcctcccagatgccaactcgtctgtgctgttaagcaagacgaccgctgaaaaagtggactcagtcagaaatgatcatgggggcactgtcaagaagccacaactgaacaacaaacctcagagaccctcccagaatggctgtcagatcaggcgccatcccacgggaaccactccaccagtgaagaagaagccaaagctgttgaatctgaaggattcctctatggctgacgcttctaaacacggcggaggcactgaaagcttattcttcgacaaggtgaggaaagcgctgcgtagcgctgaagcttatgagaactttctacgatgcctcgtcattttcaaccaggaggtaattagccgagccgagctcgtccagcttgtctccccctttcttgggaagttccctgagctctttaattggtttaaaaattttctaggctacaaggaatcagttcatctggagacttacccaaaagagagggccaccgaaggcatcgccatggaaatcgactacgcttcctgcaagaggctgggcagctcctatagggccctgcccaagagctaccaacaacctaaatgcacaggaagaactccactgtgcaaggaagtcctgaacgatacatgggtatcctttccaagctggagcgaagacagcacatttgtgtccagcaagaagactcaatacgaggagcatatatacagatgtgaggacgaaagatttgaactggacgtggttctggaaaccaacctggctaccatccgagtgttggaggctatccagaaaaagctgagtcgtctctctgcagaagagcaggcaaagtttagactagacaatacgctcggcggaacctcggaggtgatccatagaaaggcattacagcgtatatatgcagataaagccgcagacataattgacggtctgagaaagaatccgagtatcgctgtccctatcgtgcttaaaagactcaaaatgaaggaggaggagtggagagaggcccagcgcggattcaataaagtttggcgtgagcaaaatgaaaagtactatttgaaaagtcttgaccaccaaggaataaatttcaagcagaatgataccaaagtgctacgctccaagtctctcctgaacgaaatcgagtcaatatatgatgaaaggcaggagcaagctacagaggagaatgcaggcgttcctgtcgggcctcacctgagtctggcctacgaagacaaacagattttggaggacgccgctgccttaatcatccatcacgtgaaaaggcagactggcatccagaaggaggataagtacaaaataaaacaaatcatgcatcatttcattccagatcttttgtttgcgcagaggggggatctgtcagatgtggaagaggaggaagaggaggaaatggacgttgacgaagccaccggtgcagtcaaaaagcacaatggagtggggggctctcctcccaagtccaaactgctctttagtaataccgccgctcagaaactgcggggtatggatgaagtgtacaatctcttttatgtgaataataattggtacatcttcatgaggcttcatcagattctgtgccttcggctcctgcgcatttgcagccaagccgaaagacaaattgaggaggagaaccgggagagggagtgggaaagggaagttctaggtatcaagcgggacaagagtgactcccccgcgatccaactcagactgaaagagcctatggatgttgatgttgaggactactatcctgccttcttggatatggttaggagcctcctcgacggcaatattgactcctcccagtacgaagactccctccgtgagatgtttacgatccacgcatacattgcatttaccatggacaagcttatccagtctattgtgagacagctccagcacatagtgtccgacgagatctgtgtacaggtgaccgatctgtacctggctgagaataacaatggggcaacgggcggccagctgaatacgcagaatagccgctccctgctggaatcaacatatcagagaaaggcggagcagctgatgagtgatgaaaattgctttaagcttatgtttattcagagccaggggcaggttcaactgacaattgaacttctggatactgaggaggaaaatagcgatgaccccgttgaagcggaacgttggagtgattatgttgaacggtatatgaatagtgatactacatctcccgaattgcgggagcacctggctcaaaaaccagtattcttgccgcggaacttacgacgcatcagaaaatgtcagcgcgggcgcgagcagcaggagaaagagggaaaagaagggaacagtaaaaaaactatggaaaacgtagattccctggataagcttgaatgtcggtttaaactgaatagctacaagatggtgtacgtaataaagtctgaagactatatgtaccggcgaaccgccctgctgcgtgcacaccagtcacacgagagggtgagtaaacggctgcaccagaggtttcaggcttgggttgataagtggacgaaggaacacgtcccacgggagatggccgccgaaacgtctaagtggctcatgggcgaagggctcgaaggcctggtgccatgcaccaccacttgtgatacagaaaccctgcattttgtgagtattaacaaataccgggttaaatatgggacagtttttaaggcgccttag

SEQ ID NO: 293546 - DNA, 3822 bp, Artificial Sequence
  derived and/or modified sequence
atgaagaggcgcttagacgaccaagaatccccagtttacgccgctcaacagaggcgaattcccggctcaacggaagctttcccacaccaacaccgcgtgttggcacctgccccgccagtctacgaggctgtttcagagactatgcagtcagccaccgggattcagtacagtgtcactcccagctaccaggtgagcgctatgccacagtcaagtggcagtcatgggccagcgatcgccgcggtacattcttcccatcatcatcccacagccgtccagccacacggaggtcaggtggtccagtctcacgctcatcccgctccccctgttgccccagtccagggtcagcagcagtttcagcggctcaaggtcgaggatgctctttcatacctagaccaagtaaagctgcaattcgggtcacagccccaggtctataatgatttcctagatattatgaaagagttcaagagccaaagcatcgacaccccaggagtgattagccgggttagccaattgttcaagggccatcctgacctcattatggggtttaacactttcctaccacccggctacaagatcgaggtccagactaacgatatggttaacgttacaacacccggtcaggtgcaccaaatccccacacatggtatccagccccagccccaacctcccccccaacatcctagccaaccctcggcccagagtgctcctgctcctgctcagcctgctccccagcctccaccggctaaggtgtcaaaacctagccagctgcaggcacacacccctgccagccagcagacgccgccattgccaccctatgcttccccgagaagccctccagttcagccacatactcccgtgactatcagccttggcactgccccatccctacagaacaatcagcccgttgagtttaaccatgcaatcaactacgtcaacaaaattaaaaataggttccaagggcagcctgatatatacaaggcatttctggagatcctgcatacataccaaaaagaacaacggaacgctaaagaagccggtggtaactacacacccgccctgacagaacaagaggtctatgcacaggttgcccggctgtttaagaaccaggaggatttactcagtgagtttggccagttcctgcctgacgcaaactcctcagtgcttctgagcaaaactaccgcagagaaggtagattctgtacgcaatgaccacgggggcacagtcaagaagccccaattgaataataaaccacagaggccgagccagaacggatgccagatccgcagacatcccaccggcacaacaccaccagtgaaaaagaaacctaagttgctgaacttgaaggattctagcatggcggatgcctctaagcatggtggcggcaccgagtctctgtttttcgataaagtgcggaaagctctcagatctgcagaggcctatgagaacttcttgagatgtctagttatatttaaccaggaggtgatttctagagccgagctcgttcagctcgtttctccattcctaggcaaatttcctgaactttttaattggttcaagaacttcctgggatataaggagtcggtccatttggagacctatcccaaagagagggccacggagggtattgccatggaaatcgattacgccagttgtaagaggcttgggtcctcttatagagccttacccaagagctaccagcagcctaaatgtacaggtagaaccccactgtgtaaggaggtcctaaatgacacctgggtctcgttcccaagctggtccgaggatagtaccttcgtgtcttcaaaaaagacacaatacgaggaacatatctacagatgtgaagatgaacggttcgagctcgatgtggtgctggagacgaacctcgccacgatccgcgttctggaggcaattcagaagaagctttcaaggctgtcggccgaggagcaggcaaagttcaggctggacaatacactgggaggcacttcagaagtgattcatcgcaaggccttgcaacgaatctatgctgataaagcggccgacattatcgacggcctgcggaaaaacccttctatagctgtccccatcgtgttaaaacggcttaaaatgaaagaggaggagtggcgagaagcacagagagggttcaacaaggtatggcgggaacagaatgagaagtattacttaaagtccctggatcaccaggggatcaatttcaagcaaaacgataccaaggttcttcgctcaaagtccctgctgaatgaaatcgagagcatttacgatgaacgtcaggaacaggcaaccgaggaaaatgcaggggtgcctgttggcccccacctgtccctggcatatgaagacaaacagattctcgaagatgcagccgccctgatcatccaccatgtcaagaggcaaaccggcatacaaaaggaggacaaatacaaaataaagcagataatgcatcacttcattcctgacctcctgttcgcacagcgaggtgatctgtccgacgtggaggaagaagaggaggaagagatggatgttgacgaagctacgggggcggttaaaaagcataacggggtgggcggaagtccccctaaatcaaaattactattcagcaacacggccgctcagaaacttagaggcatggatgaagtatataatctcttctatgtgaataacaattggtacatcttcatgagactgcatcagatcctgtgtttacgactgctgcgaatctgttcccaagcggagcggcagatcgaggaggaaaacagagaaagggaatgggaacgggaagtgctgggcatcaagcgtgacaagagtgattccccagcaatacagctgcgcctcaaagaacccatggatgttgacgtggaggattactacccagccttcctcgatatggtgcgcagcctgctggacggcaacatagacagctcacaatatgaagatagcctcagagaaatgtttactattcacgcctacatcgcttttaccatggacaagctcatacagtcgattgtgcggcagcttcaacacattgtctctgacgaaatttgcgtccaggtcacggacctgtatcttgctgaaaacaataacggtgccactggcggccaactgaatacccaaaactctcggtccctacttgagagcacgtaccaacgtaaggctgagcagttaatgagtgacgagaattgtttcaagctcatgtttatacagtctcagggacaagtgcagctgaccatagagctgctggacaccgaagaggaaaactctgatgatcctgtagaagcagagcgttggagcgactatgtggaacgttatatgaattcggataccacaagcccagaactgcgagagcacttagctcaaaagccagtcttcctacctcgaaacctgcggcggatacgaaagtgccagagaggaagggagcaacaagagaaggaagggaaggagggtaatagtaagaaaacaatggagaacgtggattctctagacaagttagagtgccggtttaagttgaattcctacaagatggtctacgtcatcaaatcagaggattacatgtaccgccgcactgcgctgctcagggcccatcaaagccacgaaagagtgtccaaaaggctgcatcagagattccaggcctgggttgacaagtggacaaaggagcatgttcccagggaaatggcggccgaaacatctaaatggcttatgggcgaaggattggagggcctggtgccctgcaccactacctgtgacacagagacacttcacttcgtgtctatcaataagtacagggtgaagtatgggactgtcttcaaggccccttag

SEQ ID NO: 293547 - DNA, 3822 bp, Artificial Sequence
  derived and/or modified sequence
atgaagaggcggctggatgaccaggagagccctgtgtatgctgcccagcagaggcgcatccctggcagcacagaggccttcccccaccagcaccgggtgctggccccagcccctcctgtgtatgaagctgtgtctgagaccatgcagagcgccaccggcatccagtacagcgtgacccccagctaccaggtgtctgccatgccccagagcagcggcagccacggccctgccatcgctgctgtgcacagcagccaccaccaccccacagctgtgcagccccacggcggccaggtggtgcagagccacgcccacccagcccctcctgtggcccctgtgcagggccagcagcagttccagaggctgaaggtggaggatgccctgagctacctggaccaggtgaagctgcagtttggcagccagccccaggtgtacaatgacttcctggacatcatgaaggagttcaagagccagagcattgacaccccaggagtcatcagccgggtgtcccagctgttcaagggccacccagacctgatcatgggcttcaacaccttcctgcccccaggctacaagattgaggtgcagaccaatgacatggtgaatgtgaccaccccaggccaggtgcaccagatccccacccacggcatccagccccagccccagcccccaccccagcaccccagccagcccagcgcccagagcgccccagccccagcccagcctgccccccagcccccaccagccaaggtgtccaagcccagccagctgcaggcccacaccccagccagccagcagaccccacccctgcccccctatgccagccccaggagcccccctgtgcagccccacacccctgtgaccatcagcctgggcacagcccccagcctgcagaacaaccagcctgtggagttcaaccacgccatcaactacgtgaacaagatcaagaaccgcttccagggccagcctgacatctacaaggccttcctggagatcctgcacacctaccagaaggagcagagaaatgccaaggaggccggcggcaactacaccccagccctgacagagcaggaggtgtatgcccaggtggcccggctcttcaagaaccaggaggacctgctgtctgaatttggccagttcctgcctgatgccaacagctctgtgctgctgagcaagaccacagctgagaaggtggacagcgtgagaaatgaccacggcggcaccgtgaagaagccccagctgaacaacaagccccagaggcccagccagaatggctgccagatccgccgccaccccaccggcaccaccccacctgtgaagaagaagcccaagctgctgaacctgaaggacagctccatggctgatgccagcaagcacggcggcggcacagagagcctcttctttgacaaggtgaggaaggccctgcggtctgctgaggcctatgagaacttcctgcgctgcctggtgatcttcaaccaggaggtgatcagcagagctgagctggtgcagctggtgagccccttcctgggcaagtttcctgagctgttcaactggttcaagaacttcctgggctacaaggagagcgtgcacctggagacctaccccaaggagcgggccacagagggcatcgccatggagattgattatgccagctgcaagaggctgggcagcagctaccgggccctgcccaagagctaccagcagcccaagtgcaccggccgcacccccctgtgcaaggaggtgctgaatgacacctgggtgtccttccccagctggagcgaggacagcacctttgtgagcagcaagaagacccagtatgaggagcacatctaccgctgtgaagatgaaagatttgagctggatgtggtgctggagaccaacctggccaccatccgggtgctggaggccatccagaagaagctgagccggctgtctgctgaggagcaggccaagttccggctggacaacaccctgggcggcaccagcgaggtgatccacaggaaggccctgcagaggatctatgctgacaaggctgctgacatcattgatggcctgaggaagaaccccagcattgctgtgcccatcgtgctgaagaggctgaagatgaaggaggaggagtggagggaggcccagaggggcttcaacaaggtgtggagggagcagaatgagaagtactacctgaagagcctggaccaccagggcatcaacttcaagcagaatgacaccaaggtgctgcggagcaagagcctgctgaatgaaattgagagcatctatgatgagcggcaggagcaggccacagaagaaaatgccggcgtgcctgtgggcccccacctgagcctggcctatgaggacaagcagatcctggaggatgctgctgccctgatcatccaccacgtgaagaggcagacaggcatccagaaggaggacaagtacaagatcaagcagatcatgcaccacttcatcccagacctgctgtttgcccagagaggagacctgagtgatgtggaggaggaggaggaggaggagatggatgtggatgaggccaccggggctgtgaagaagcacaatggagtgggcggcagcccccccaagagcaagctgctcttcagcaacacagctgcccagaagctgcggggcatggatgaggtgtacaacctcttctacgtgaacaacaactggtacatcttcatgaggctgcaccagatcctgtgcctgcggctgctgcgcatctgcagccaggccgagcggcagatcgaggaggagaaccgggagcgggagtgggagcgggaggtgctgggcatcaagagggacaagagtgacagccctgccatccagctgcggctgaaggagcccatggatgtggatgtggaggactactacccagccttcctggacatggtgcgcagcctgctggatggcaacatcgacagcagccagtatgaggacagcctgcgggagatgttcaccatccacgcctacatcgccttcaccatggacaagctgatccagagcatcgtgcggcagctgcagcacatcgtgtctgatgagatctgtgtgcaggtgacagacctgtacctggccgagaacaacaacggggccactggaggccagctgaacacccagaacagccgcagcctgctggagagcacctaccagaggaaggccgagcagctgatgtctgatgagaactgcttcaagctgatgttcatccagagccagggccaggtgcagctgaccatcgagctgctggacacagaggaggagaacagtgatgatcctgtggaggccgagcgctggagcgactatgtggagcgctacatgaacagcgacaccaccagccctgagctgcgggagcacctggcccagaagcctgtgttcctgcccaggaacctgcggcgcatcaggaagtgccagaggggccgggagcagcaggagaaggagggcaaggagggcaacagcaagaagaccatggagaatgtggacagcctggacaagctggagtgccgcttcaagctgaacagctacaagatggtgtatgtgatcaagtctgaggactacatgtacagaagaacagccctgctgcgggcccaccagagccatgagcgggtgtccaagaggctgcaccagcgcttccaggcctgggtggacaagtggaccaaggagcacgtgccccgggagatggctgctgagaccagcaagtggctgatgggagagggcctggagggcctggtgccctgcaccaccacctgtgacacagagaccctgcactttgtgtccatcaacaagtacagagtgaagtatggcaccgtcttcaaggccccctag

SEQ ID NO: 293548 - DNA, 3822 bp, Artificial Sequence
  derived and/or modified sequence
atgaagcggcggctggacgaccaggagagccccgtgtacgccgcccagcaaaggcgtatccccggttcgacagaggcatttccgcaccagcaccgcgtcctggcgcccgctcccccagtttatgaggctgtatcggagaccatgcaatccgccacaggaatccaatacagcgtgaccccaagctatcaggtgagcgcgatgcctcagagctcaggttcacacggccctgctattgcagcagtacatagctcccaccatcatcctaccgcagtccagcctcatggcggtcaagtggtacagtctcatgcgcaccctgcacccccagttgccccagtacaaggccagcagcagttccagcgacttaaggttgaggacgccctatcatacctcgaccaggtgaaactccagttcggctcacagccacaggtctacaacgacttcctggatatcatgaaagaatttaagagccagtccatagatacccccggggtgattagcagggtgagtcagttgttcaaaggacatcctgacctcattatgggtttcaacacattccttcctccaggctataagatcgaagttcagaccaatgacatggtcaacgtcactacccccgggcaggtccaccagatccctactcacggaatacaaccacagccgcagcctcccccccagcatccttctcagccctcagctcaaagtgcccctgctccagcccagcctgccccacagccacctcctgcaaaagtttctaaaccttcccaactccaggcgcatacacccgcttctcagcaaacccctcccctgccgccgtatgccagtcctcgatcccctcccgtgcagccccacacaccggtgacaatcagtctggggactgcacccagcctgcaaaataatcagcctgtggaatttaaccacgccattaactacgtgaacaagatcaaaaatcgcttccagggtcagcccgatatttacaaagccttcttagagattctgcacacctatcagaaggaacagcgcaatgctaaggaagccggcgggaattacacaccagccctgaccgaacaagaagtgtatgcacaggtggctagactttttaagaaccaggaagacttactgagcgaattcgggcagttcctcccagatgccaatagctctgtattgctgtccaaaaccactgcagagaaggtagatagcgtccggaatgatcacgggggcacggtgaaaaaacctcagctcaacaacaagccgcagcggcccagccagaatggatgtcagatccgccgccatcccactggcacgactccaccggtcaaaaagaaacccaaactcctgaatctcaaagattcttccatggccgatgcttctaagcacgggggaggcaccgagagtctatttttcgacaaggtgcgaaaagcccttcgcagcgcagaggcatatgagaattttctgcgctgcctggtaatctttaaccaggaggtgatatctcgggcagaactcgtgcagctggtatccccattcctcggaaagtttcctgagctctttaattggttcaaaaactttctgggatacaaggaaagcgtgcacctggaaacataccccaaggagcgggcaactgaagggatagcaatggagatcgattacgcttcgtgcaagcggctcggctcaagctacagggctctccctaagtcttaccagcagcctaagtgcactggacggaccccgctctgtaaagaggtgctgaacgatacttgggtctcttttccctcctggtctgaggatagtaccttcgttagctctaaaaaaacccagtacgaggaacacatctaccgatgtgaggacgaacgtttcgaactggacgtggtactggagacaaacttggccactattagagtactagaggctattcagaagaagctcagtagactgagtgccgaagagcaagccaagtttaggctggacaacaccctgggaggcacaagcgaagtcatacaccgcaaagcactccaacggatctacgcagacaaagccgcagacataatcgacggcctgcgcaaaaacccatcgattgcagtgccaattgtcctgaaaaggctaaagatgaaggaggaggagtggagggaggcacagcggggttttaataaggtgtggagagagcaaaacgaaaaatactatctgaagtctctggatcatcagggtatcaatttcaaacagaatgatactaaggttctgcggtctaaatcactactgaatgagatagaatctatctatgatgagcgacaggagcaagccacagaagagaacgctggggtccccgttggaccccaccttagtctggcctacgaggacaaacagatcctggaagacgccgctgccctgatcatccatcacgtcaaacggcaaaccggtatccaaaaagaagataagtataagattaagcagatcatgcatcatttcatccccgacctgctttttgcacagcgaggagatcttagtgatgttgaggaggaagaggaggaagagatggacgtggacgaagccacaggcgcagtgaagaagcataacggggtgggtggctctccccctaagtccaagctcctcttctcaaatacagctgcgcagaaactaagagggatggatgaggtgtacaacctcttttacgtgaacaacaattggtacatcttcatgcggctacatcagatcctgtgcctgcgcctcctgcggatttgctctcaagccgaaagacagatcgaagaagaaaacagagaaagggagtgggagagagaggtgttgggcatcaagcgggataagagcgactctcccgcgatccaattgaggcttaaggagccgatggatgttgatgtggaagactattacccggcttttctggacatggtcaggtccctacttgacggtaacattgattcctcccaatatgaggattcattacgggaaatgttcaccattcacgcatacatcgccttcaccatggacaagttgatccaaagcatcgtgcgccagctgcagcacatcgtctctgacgaaatatgcgtgcaggtgactgatctatatctagccgaaaacaacaatggggcgactgggggacagttgaatacacagaattcacgctcattgttggagagtacctaccagcgaaaggcagagcagctgatgtcagacgaaaattgtttcaaattgatgtttattcaatcccagggccaggtgcagctgactattgaactgctggatactgaagaggagaatagcgacgatcctgtcgaagctgagaggtggagtgactatgtagaaagatatatgaattcagatacaacctcacccgaactcagggagcacctggcacagaaacccgtgttcctcccacgcaacctgcggcgcattcgcaaatgtcaaaggggccgggaacaacaagagaaagaagggaaggagggtaatagcaaaaagaccatggagaatgttgacagtcttgataagctggagtgcagatttaagttgaacagttacaagatggtgtacgtaatcaagagtgaggactatatgtacagacggaccgctttgttgcgggcgcatcaatcccatgaacgagtgtccaagagactgcatcagcggttccaggcctgggtcgacaagtggactaaagagcacgttccccgggagatggcggccgaaacgtcaaagtggctcatgggggagggacttgaggggttagtgccttgcactactacatgcgatactgaaacactccacttcgtttccatcaataagtacagggtcaagtatggcacagtgttcaaggccccctag

SEQ ID NO: 293549 - DNA, 3822 bp, Artificial Sequence
  derived and/or modified sequence
atgaagcggcggctggacgaccaggagagccccgtgtacgccgcccagcagaggcggattccaggtagcacggaggcctttccccatcagcacagagtgcttgcaccagccccccctgtgtacgaagcagtgtccgaaactatgcagtcagccaccggcattcagtattccgtgacacctagctatcaggtgagtgccatgcctcaatcatcagggtcccacggccccgccatcgccgccgtgcattccagccatcatcatcctacagccgtgcaaccacatggtggccaggtcgtacagtcgcatgcacacccagcgccaccagtggcaccagtacagggccagcaacagtttcagagattgaaagtggaggatgctctctcttacctggaccaggtaaagctgcagttcgggtcacaaccacaagtgtataacgacttcctggacatcatgaaggaatttaaaagccaatccatcgatactccgggggtgatatctagagtttctcagctattcaaaggccatcccgatctgatcatgggctttaacacgttcctgccgccgggctataaaattgaggtgcagactaatgacatggtcaatgttactacacccgggcaggtccatcagattccgacccatggcatccagccacagccccagccccccccccagcaccccagccagccatctgcacaatcggcccctgccccagcccagcccgcccctcagcctcccccagcaaaagtctctaaaccaagtcagttgcaagcccatactcccgccagtcagcagactccccccctgcccccttatgcctcgccacgctcgcccccggtgcagcctcacacacccgtgaccatttcccttgggaccgctccaagccttcagaataatcagccagtggagtttaatcacgccattaactacgtaaataagattaagaacagatttcaaggccagcctgacatttacaaggctttcttggaaatcctgcatacgtaccagaaagagcaacgtaacgctaaagaggctggcggcaactatacacctgcactaacagagcaggaggtatacgcccaggtggcccgtctctttaaaaaccaggaggacctactgtctgaattcggacaattcctcccagacgccaatagcagcgttctcctttcaaaaacaaccgccgaaaaggtcgattcagtacgcaacgaccatggaggtaccgttaagaagcctcagctcaataataagccccagcgccccagccagaacggatgccagattcggcggcaccctacgggaacaacacccccagttaaaaagaaaccgaagcttctaaatcttaaagattccagtatggctgatgcaagcaagcatggcgggggtactgaatccctgttcttcgataaggtcagaaaggctctgaggagcgcagaggcctacgagaactttctacgctgtcttgtgatctttaatcaggaagtaatcagtagggcggaactcgtgcagctcgtatcgccattccttggcaagttcccagagttgttcaactggttcaaaaatttcctgggctataaagaaagtgttcacttagaaacgtatcccaaggagcgggctactgaaggcattgcaatggaaattgattacgcatcctgcaagagactcggttcgagctatcgggcactgccaaagagttaccagcagcctaagtgtactggtcgaacccccttgtgcaaagaggtgctcaacgacacctgggtctcatttccttcgtggagcgaagactcaacctttgtgagctcaaagaagacccaatacgaggagcatatatatcgctgtgaggacgaacggttcgaactggacgtggttctggagacgaacttggctacaattcgggtgctggaagctattcagaaaaagctgagtagactctccgccgaagagcaagcaaagtttagactggacaataccctcgggggcacgagcgaagtcattcacagaaaggcgctgcagcggatatacgctgataaagccgctgacattatcgatggattgcgcaagaatccttcgatagccgtacctattgtgctgaagcgtcttaagatgaaggaagaagaatggcgggaagctcagcgcggatttaataaggtctggcgagagcaaaatgagaaatattacctcaagtcactcgaccatcaggggatcaactttaaacagaacgataccaaggtcctgcgcagcaagtctcttcttaacgaaattgaatcaatctatgatgagagacaggagcaagcaaccgaggaaaatgccggcgtcccagttggcccccacttgagccttgcttatgaagacaaacaaattcttgaagacgccgctgccctgatcatccaccacgtaaaacggcagaccgggatacagaaggaggataaatacaagattaaacagatcatgcaccatttcatcccagacctgctgttcgcccagcggggggatctgagtgatgtggaggaagaggaggaagaggaaatggatgtagacgaggccaccggggctgtcaaaaaacacaatggcgtcggcggttctccaccgaaaagtaaattactcttctcaaacactgctgcccagaagttacgagggatggacgaggtctacaacctcttctatgtcaataataactggtacatcttcatgagactccaccagattctgtgtctgcgtttgctccggatatgcagccaggcggagaggcagatagaggaagagaatcgggagcgcgaatgggaacgcgaagtgctaggcatcaaacgggataaatccgatagcccagcaattcagctccgcctgaaggagcccatggatgtcgacgtcgaggattactacccagctttcctagatatggtaagatctctgctggacggaaacatcgatagctcacagtatgaagattcgctgcgtgaaatgttcacaatccatgcctacatcgcctttacgatggacaagttgatccagagcatcgtgcgtcagctccagcacattgtcagtgatgagatttgcgtgcaggtgacagatttatatctggccgaaaacaacaacggagctaccggaggccagctgaacactcaaaattcgcggtcccttcttgagagcacatatcagcgtaaggcggagcagttaatgtccgatgagaactgctttaagctcatgttcattcagtcacaagggcaagtgcagctgacaattgaactgcttgatacagaggaggagaattccgacgatcccgttgaggcagaacggtggtctgattacgtggaaagatacatgaatagtgatacaacaagtcccgaattgcgcgagcacctggcccaaaaaccagtttttctccctcgtaatcttcggcggatcagaaagtgccagcggggacgtgagcagcaagagaaggaaggtaaagagggcaacagcaagaagactatggagaacgtggactccctggacaaactggagtgcagattcaaattaaactcctacaagatggtttatgtgatcaagagtgaggactatatgtatagaaggacagcgctgctaagagcacatcagtctcacgagcgggttagtaaaaggcttcaccagagatttcaggcttgggtggacaagtggactaaggagcatgtgcctagagaaatggcagctgaaacgagcaagtggctcatgggtgaagggctcgaagggctggtgccgtgcaccactacctgtgatactgaaaccctccactttgtgagcatcaataagtatcgcgttaagtatggaacggtcttcaaagccccatag

SEQ ID NO: 293550 - DNA, 3822 bp, Artificial Sequence
  derived and/or modified sequence
atgaagcggcggctggacgaccaggagagccccgtgtacgccgcccaacagcgccggattcctgggtcaaccgaggcatttccgcaccagcatcgggttctagctccagcaccacccgtgtacgaagccgtgagtgagaccatgcaatctgctactgggatccaatattcagtgaccccaagttatcaagtcagcgccatgccacagtcttccggtagtcatggtcctgcaattgctgccgtgcattctagccaccatcacccaacagctgtccagccccacggcggtcaggtggttcaatcacatgctcatccagctcctcctgtggcgcccgttcaggggcagcaacaatttcaacgcctcaaagtggaggacgctctgtcgtacttggaccaggtgaagctgcagtttggcagtcagccacaggtgtataatgacttcctcgacatcatgaaagagtttaagagccaatcgatcgacacaccaggcgtgatctcacgcgtgagccagttgttcaagggccaccccgatctgattatgggattcaacaccttccttccccccggatataagatcgaggtgcaaactaacgacatggttaatgtgaccactccggggcaagtccaccagatccctacacacggcatccaaccgcagcctcaaccccctccccagcatccaagtcaacccagcgcccagagtgcaccagcacctgcacagcccgctccccaacccccacctgccaaagtctctaagcccagccagctgcaggctcacacgcccgcatcgcagcaaacacctccgctcccaccctacgctagcccaagatccccccccgtgcagccacacacaccagttacaatctccctggggactgcccccagtctgcagaacaatcaacctgtcgagtttaatcatgcgatcaactacgttaataagatcaagaatcgattccagggccagcctgatatctataaggcttttctcgagattctgcatacataccagaaagagcagcgaaatgccaaagaggcaggcggcaattacactcctgctctgaccgaacaggaggtgtacgctcaggttgctaggttgtttaaaaatcaggaagacttgctgtcggagttcggtcagtttcttcctgacgctaacagttcggtactactgtcaaagaccacagctgaaaaggtcgattccgtgagaaacgaccatggaggaacggtgaaaaagcctcagctgaacaacaagccacagcggcccagtcaaaatggatgccaaatcagaaggcatccaacaggaactactcctccggtgaagaaaaagcctaaattgctcaatcttaaggactcttcaatggccgatgcatccaagcacggcggcggcaccgagtcactcttttttgacaaggtgcgcaaggcccttagatctgcagaagcttacgagaacttcctgaggtgtctggtcatcttcaaccaagaggtcataagtagagcagagctggtacaacttgtcagtccctttctaggcaagttccctgaattgttcaattggttcaagaacttcctaggctacaaggagtccgtgcatctggaaacctaccccaaagagcgcgctacagagggtattgctatggaaattgattacgcaagttgcaagagactcgggtcttcatatcgggccttgccaaaatcctatcaacagcccaaatgcacagggagaacgcctctatgtaaagaggtgctgaatgacacctgggtgtctttcccatcttggagcgaggattccacattcgtgtcgagtaaaaaaacacagtatgaggaacacatctatcggtgtgaggacgagagattcgagcttgatgtcgttctcgagacaaatctggccactattagagtccttgaggctattcagaaaaagctgagccggttgagtgctgaggaacaggctaaattcaggctggacaataccctgggtggaacctcggaggtgattcacaggaaagcactgcagagaatctacgctgataaagcagcagacatcattgacgggttaaggaaaaatcctagtatagcagtccccatcgtactgaaacgcctgaaaatgaaggaagaagaatggagagaagcacagaggggctttaacaaggtgtggcgggaacaaaacgagaagtattacctgaaaagcctggatcaccagggcatcaactttaagcaaaatgatacaaaagtgctcaggagcaagagccttttaaacgaaatcgaaagcatctacgatgagagacaggaacaggccaccgaggaaaatgctggggtgccagtcgggcctcatctttcactggcatacgaggataagcagatactggaggacgctgctgctctgataattcaccacgtgaaaagacagactggtattcagaaggaagataagtataaaatcaaacagatcatgcatcactttatccctgacttactattcgcacaacggggggacctctctgacgtggaggaggaagaagaggaagagatggatgtcgacgaagctactggcgccgtgaagaaacacaacggggttggcggttcacctcctaaaagcaagctcctgtttagcaacacggctgctcaaaaactgcgaggaatggacgaagtatataatctcttttacgtgaacaacaattggtatatcttcatgcgcctacaccagattctgtgcttgcgcttgctgcgtatctgcagccaggccgagcggcaaatcgaagaggaaaatagagagcgagaatgggagcgggaggtgctcggaatcaaaagggataagagtgacagtccagcgattcagttgcggctcaaggaacccatggatgtggatgtggaagactactaccccgctttcctcgatatggtaaggtctctcctggacggcaacattgacagctcacagtatgaagatagcctgagagaaatgtttacaattcatgcttatattgctttcacaatggacaaactgatccagtcaatcgtgaggcaactgcagcacatagtgagcgatgaaatctgcgtgcaagtgaccgatctctacctagccgagaacaataatggggccactggcggccagctgaacacgcaaaatagtaggagcctgttggaatccacctaccagaggaaagccgagcagttaatgtccgacgagaactgttttaagctgatgttcattcaatctcagggacaagtgcagctgacaattgaacttctggataccgaggaggaaaactccgacgaccctgtggaagccgagcgatggtccgattacgtcgagagatacatgaatagtgacactacttccccggagctcagagagcacctggcccaaaagcctgtgttcttgccacggaacctaagacggatcagaaaatgtcagcgcggccgagaacagcaggaaaaggaaggaaaagaagggaactcaaagaagaccatggagaatgtcgacagccttgataaattggagtgtcgatttaagctcaattcctataagatggtctatgtaattaaatctgaggactatatgtaccgccgcacagcattactaagagcgcatcagtctcacgagagggtgtctaagcgcttacaccagagatttcaagcatgggtggacaaatggacgaaggagcacgttcctagggaaatggccgccgagacttccaagtggctgatgggggaaggcctggagggcttagtgccctgcacgacaacatgtgatacagagacattacacttcgtgtccatcaataaatatcgcgtgaagtatgggaccgtctttaaagctccatag

SEQ ID NO: 293551 - DNA, 3822 bp, Artificial Sequence
  derived and/or modified sequence
atgaaaagacgcctcgatgaccaggaatctcctgtgtatgcggcacagcaacggcgaattccgggaagcacagaagctttccctcatcaacaccgggttctcgccccagctccccctgtctatgaagctgtctctgagactatgcagtccgcaactggaattcaatattcagtgaccccgtcctaccaggtgagcgctatgcctcagagctccgggtcgcatggtcctgcgatcgctgcagtccacagttctcatcaccaccccaccgcagtgcagccacacgggggtcaggtggttcagagccacgcccatcccgcacctccagtggcccctgtgcagggccagcagcaatttcagaggctcaaggtggaagatgctctttcctacttagaccaggttaagctgcagttcgggtcacaaccacaggtttacaacgattttctggacattatgaaagaattcaagtctcagtcaatcgatacaccaggcgttatttcaagggtcagtcagctgttcaaagggcatccagatttgatcatggggtttaacacgttcctgcctcccggttacaaaatcgaagtgcagactaacgacatggttaatgtcaccaccccaggacaagtccatcaaattccaacacatggcatccagccccagccgcagcctccaccacagcaccccagccagccttctgcccagagtgccccagcacccgctcagccggcaccccagccaccacccgcaaaggtttccaagcccagtcagttgcaagcccacacccccgcttcacagcagaccccaccccttcctccatatgcaagtccacgatcaccaccggttcagccacacacacccgtcacaatctcactcggcacagccccttccctccagaataaccaaccagtcgaattcaaccacgctatcaactatgtcaataaaattaagaatcgatttcagggccaacccgatatctataaagctttcttggagatcttgcatacttaccaaaaggagcagcgcaacgcaaaagaggccggaggcaactacactcctgcccttactgagcaggaggtttacgcccaagtggctcggctcttcaaaaatcaggaggatctgttgtcagagttcggccagttcctgccagacgcgaattcaagtgtgttactgagtaagacaacggccgaaaaagttgattccgtgcggaacgatcatgggggtacagtgaaaaaaccccaactgaacaataagccacaaaggccaagtcaaaatggctgccagatacgcaggcacccaacagggactacaccccctgtgaaaaagaagcccaaactgctaaacctcaaggactcctctatggctgatgccagtaaacacgggggagggacggagtctctctttttcgataaagttcgaaaggcactgcggtcagctgaagcttacgagaactttctgcggtgcctcgtgatctttaaccaggaggtcatatctcgggctgaactggtccagttagtgagccccttcctgggcaaattccctgagctattcaactggttcaagaattttctaggatacaaagaaagtgtccacctggagacttatccaaaggagcgtgctacggagggaatcgccatggaaattgactatgcttcgtgtaagaggcttgggagttcctacagagcgcttccgaagtcctaccagcagcccaagtgcacgggacgcacccctctgtgcaaagaggtcctgaacgatacctgggtttccttcccttcctggagcgaagactccacttttgtgagttccaagaagactcaatacgaagagcacatctacagatgcgaggacgagaggttcgaactggacgtggtgttggaaactaatctggcaactatcagggtgctggaggctattcaaaagaaactgagtagattaagtgccgaagaacaagccaagttccgtctcgataacacccttggtgggacgtccgaagtgattcaccggaaagctcttcaacgtatctacgctgataaagctgctgacattattgacgggttgcgaaagaatccctccatcgccgtgcccatcgtcctcaaacgactgaaaatgaaggaggaggagtggagggaagcccaacgcggattcaacaaggtctggcgagaacagaatgagaagtattatctgaagagcctcgaccatcagggtataaacttcaagcagaacgacacgaaagtcctgaggtccaagtcactgctcaatgagatagaatcaatttacgatgaaaggcaggaacaagcgactgaagagaatgccggagtgccagtcggcccacacctgtctctagcatacgaggataaacagatcctggaggatgccgctgcattaataatccatcatgtaaagcggcaaaccggaatccaaaaagaggacaagtacaaaattaagcagatcatgcatcactttatacctgatctgctgtttgcccaacggggtgacctgtctgacgtggaagaggaagaggaggaggagatggacgtggacgaggccacaggagccgtcaaaaaacacaatggcgtgggtgggagcccacccaaatcaaagttgcttttcagcaatactgctgctcaaaagctgcgaggcatggatgaggtatacaatctgttctacgttaacaacaactggtatatttttatgcgcctgcaccagatcctgtgtctaagactgctgcggatctgctctcaggcagagcgacagattgaggaggagaacagggagcgggagtgggagcgagaggtgctgggtatcaagcgggataaatcagactcccccgcaattcagcttaggctcaaggaacctatggatgtcgacgttgaggattactacccagcattcctggacatggtgcgaagcctgctggacggcaatattgattcatctcagtatgaagactccttaagggaaatgttcacgattcatgcttacatcgctttcaccatggacaaactcatccagtccattgtgcggcaacttcagcacattgtcagcgatgagatctgtgtgcaagtaacagatctatacctggctgagaacaataacggcgctaccgggggtcagttgaacactcaaaattcaaggtctctgctcgaatcgacctatcaacgtaaagccgagcagctgatgtcagacgaaaactgctttaaactaatgttcattcaaagccaggggcaggttcaacttactatcgagctcctcgatacagaggaggagaactccgacgaccctgtggaggccgagcggtggtccgactacgtggaaagatatatgaacagcgatacaacaagcccggaattacgcgagcacctggcacagaagcctgtgtttctacctaggaatctgcggagaattcggaagtgtcagcgtggacgagaacagcaggagaaggaaggaaaggaggggaattcaaagaagactatggagaacgttgactctctggacaaacttgagtgtagatttaagcttaatagttacaaaatggtgtacgtcattaagtctgaagactacatgtataggcggacagccctcctgcgggctcaccagagccacgagagagtaagcaagaggctccaccagcggtttcaggcatgggtggataagtggacaaaagagcatgtgcctcgcgagatggcggcagagactagcaaatggttgatgggggaggggctagagggtctggtaccatgcacgacgacctgtgataccgagactcttcattttgtgtccattaacaagtatagagtgaagtatggcacagtctttaaagctccatag

SEQ ID NO: 293552 - DNA, 3822 bp, Artificial Sequence
  derived and/or modified sequence
atgaagcgtcgccttgacgaccaagaaagtcccgtttacgcagctcagcaacgcagaatcccagggtcaaccgaagctttccctcaccagcacagggttctggctccggctccgcctgtgtacgaggccgtgtcagagacaatgcagtccgccaccggcattcagtattccgtaacaccaagttaccaggttagcgcgatgccacagagtagcgggagccacggccctgccatcgcggcagtacacagttcccatcaccaccctactgccgttcagcctcacggaggtcaggtggtacaaagccatgcacaccccgcacccccagtcgccccagtgcaggggcagcaacagtttcagaggttaaaggtagaggacgccctgtcctaccttgaccaggttaagctgcagttcggcagccaaccccaggtatacaacgactttttggatattatgaaagagttcaagtcccagtccatagacacaccaggggtaatttcacgcgtgtctcagctctttaaagggcatcctgatctgataatggggttcaacacattcttgcccccagggtataagattgaagttcagaccaatgatatggtgaatgtaaccactcccggacaggtccatcaaatccctacacacggtattcagcctcaaccacagcccccaccccagcacccctcccaacccagcgcccagtccgcgcctgccccagctcagccagctccccagcccccaccggcaaaagtttcaaaaccctcacagttgcaggcccatactcctgcttctcagcagactccacccctaccaccctatgcctctccacgttcacctccagttcagccgcacacgcctgtaaccatcagtctcggtacagcgccatctcttcagaataaccagcccgtcgagtttaatcatgccatcaactacgtaaacaaaattaaaaaccgatttcagggccagccagatatttacaaagcctttctggaaattctccacacctaccaaaaggagcagaggaatgccaaagaggccggtgggaactatacccccgcacttactgagcaggaagtctatgcgcaggttgctcgtctgttcaaaaatcaggaagatctcttgagtgagtttgggcagtttcttcccgatgcaaattcaagcgtgctgctgtctaagacaacagccgaaaaggtggatagcgtacggaacgaccacggcggtactgttaagaaaccacaactcaacaataaacctcagcgcccttcgcagaatggttgtcagattcgtcgtcaccctacagggaccacccccccagttaagaagaaacctaagctgctcaatctgaaagactcttctatggcggatgccagcaaacacggtgggggaacggaatctttgttctttgacaaggttcggaaggcgctgcggagcgcagaggcctacgagaatttcctgagatgtctggtaatcttcaatcaggaggtgatcagcagagccgagctggtgcaactggtaagcccatttctcgggaaattcccagagcttttcaactggtttaagaacttcctggggtataaagagagtgtgcatttggagacttacccaaaggaaagggccaccgaaggaatagccatggagattgactatgcttcatgtaaacggttagggtccagctatcgagccctccctaaatcttatcagcagcctaagtgtaccgggagaacgcccctgtgcaaagaagtcttaaacgatacctgggtgtcatttccatcctggtcagaagattctacttttgtttcctccaagaaaacacagtatgaggagcatatataccgatgcgaggacgagcgctttgagctggacgtcgttctcgagaccaatctggcaacgatccgcgtgctggaggcgattcagaagaagttgtctagattatctgctgaagaacaggctaaattcagactagacaataccctcggcggaacatcagaagtgatccatcgcaaggcactgcaaaggatctacgctgacaaggccgctgacataatcgacgggttgcggaaaaaccccagcatagccgttccaatagtgctaaaaaggctcaagatgaaggaagaagagtggagagaggcccagcgcggattcaacaaagtctggagggagcagaatgagaagtactacctgaaatcactcgatcaccaaggcatcaactttaagcagaacgatacgaaggtgctgaggtctaaatcacttcttaatgagatcgaatctatttatgacgagaggcaggagcaggcaacagaagaaaacgctggagtacctgtggggcctcacctgagtctggcctatgaagataaacaaattttggaggatgccgcagctcttatcatccaccacgtgaagcgtcagactggtattcagaaggaggacaagtacaagattaagcaaattatgcatcacttcatacctgacctgctatttgcccagcgcggtgacttaagcgacgtcgaggaagaagaagaagaagaaatggacgtggatgaagccacaggcgcagtgaaaaaacacaatggcgtgggtggatcccccccaaagagcaaactattgttttctaataccgccgcacagaagctcaggggcatggacgaggtatacaacctgttctatgttaataataattggtatatcttcatgagactgcaccagatcttgtgcctacggctgctgcgtatctgtagtcaggctgaaaggcagatcgaagaggaaaatagagagcgggagtgggaacgggaagtcctcggcataaaacgggacaaatctgattcaccagccatccagttgaggttgaaagaaccgatggatgtggatgtggaggattactaccccgcttttctcgacatggtgcgctccctgctggacggcaatatcgattcttcacagtatgaagacagcctgagagagatgtttacgattcatgcctacattgctttcactatggataaacttatccaaagcattgttcgccagctacagcacatcgtctcagacgagatttgcgtacaggtgaccgacctttaccttgcggaaaacaataatggggctactgggggtcagctcaacacccagaactcaagatccctgctggagagcacataccagagaaaagccgagcaacttatgagcgacgaaaattgctttaagcttatgttcatccagtcgcagggccaggtgcagctaaccatcgagttactggataccgaagaggagaacagcgatgatcctgtcgaagccgagcgttggagtgactacgtcgaaaggtacatgaattctgacaccacgtcacccgaactgcgcgagcaccttgctcaaaagccagtgtttctccccagaaacttacggagaattagaaaatgtcaaagaggacgcgaacagcaggagaaggaaggaaaggagggcaatagcaagaagaccatggaaaatgtggattcgctggataaactcgagtgtcggtttaagctgaacagctataagatggtgtacgtcatcaaatccgaagactatatgtacagacggacggccttgctacgcgctcaccagtcacacgaacgagtatccaagcgtcttcaccagaggttccaggcttgggtggacaaatggacaaaagaacatgtgccaagggagatggcagccgagacctctaaatggctgatgggggagggtctggagggactcgtcccatgcacgaccacatgtgacacagagactctacatttcgtcagtattaacaaatatagggttaagtacggcacagtgtttaaggcaccatag

SEQ ID NO: 293553 - DNA, 3822 bp, Artificial Sequence
  derived and/or modified sequence
atgaagagacgcctcgacgaccaggaatctcccgtgtacgcggcacaacaaaggcgcatacctggatccactgaagcgttcccccatcagcatcgggttctggcgcctgctccacccgtatatgaggctgtgtcagaaacgatgcaatccgcaaccggaatacaatattctgtcaccccctcttatcaggtgtccgccatgccacaatccagcggaagccatgggcctgcaatcgccgctgtgcattcttcgcatcatcaccctaccgccgtgcagccacacggaggtcaggtcgttcagtcccatgcacacccagccccacctgtcgcgcctgtccagggtcaacagcaatttcagcgcctcaaagtcgaagatgctctttcatatttggatcaagtgaagctccagtttgggtctcagccacaggtttacaacgacttcctcgacattatgaaagagttcaaatctcagtcaatagacacccccggagtcatatctcgggtttctcagctgttcaaagggcaccccgacctgatcatgggttttaacaccttccttcctcccggatacaaaattgaggttcagactaatgatatggtcaacgtcacgacacctgggcaggtgcatcaaattccaacccatggcattcaacctcagccacagccccctcctcaacaccctagtcagccttcagcccagtccgctcccgctccggctcagccagctccccaaccccctccagcgaaggtttccaaacccagtcaactacaggcacacaccccagcctcccagcaaactcctcctctgccaccgtatgcttcacctcggtccccacctgtacaaccccacacacccgtcacaatcagtctggggaccgccccaagcctgcaaaataaccagccggttgaattcaatcatgccatcaactacgttaataaaataaaaaataggtttcagggccagcctgacatttacaaagctttcctcgagatactacacacctaccagaaagagcagaggaacgcaaaggaggccggtgggaactatactccagccctgactgaacaagaagtgtacgcacaggttgcccgtctgtttaagaatcaggaggacctcctcagcgaattcggccagttccttccagatgcgaatagcagtgtgcttctgagcaagaccaccgctgagaaagttgattctgttcgaaatgatcacggtggtacagtcaagaaaccccaactgaacaataagcctcagaggccttcgcagaatggatgtcagattcgaagacatccgacgggcacaactccacctgtgaaaaaaaagcccaagctgttgaatctcaaggatagttccatggcagatgctagtaagcatgggggaggcaccgaaagcctgttctttgataaagtcaggaaggcgctgcgaagtgcagaggcctatgagaactttctgagatgcctggttatctttaatcaggaggttatctcaagggcagaactggtccaactcgtgtctccattccttggcaagtttccagaactctttaattggtttaagaatttccttggatataaagaaagcgtgcatctggaaacatacccaaaagagcgtgcgacggagggcatcgccatggagatcgactatgcttcttgcaaaaggcttggcagttcataccgtgctctccctaagagctaccagcaaccaaagtgtaccggacggactccattgtgtaaagaagttctcaacgatacatgggtcagttttccatcttggtctgaggacagtacctttgtatcatcaaaaaagacccagtacgaagagcatatctataggtgtgaagacgagcgatttgagctcgatgtggtgttggaaacaaatttagcaaccattcgggtgcttgaagctatccagaagaagctctcaaggctgtccgctgaggagcaggccaaatttcgcctagacaacacacttgggggtacatctgaggtcattcaccggaaggctctgcagcgcatctacgcagacaaggccgctgacattatcgacggcctgaggaagaatcccagcattgccgttccgattgtgctgaaaaggctcaaaatgaaagaggaggagtggagagaggcccagcggggattcaacaaggtgtggagggagcagaatgagaagtactacctcaagtctttggatcaccaagggattaatttcaagcagaacgacacaaaggtcctgaggagcaaaagcctgctcaatgagatcgaaagtatttacgatgaacggcaggaacaggctacagaggagaacgccggtgttcctgtcggcccacatctgtccctcgcttacgaggacaaacagatactggaggatgccgctgctctgatcatccaccacgtgaagcgccagactgggatccagaaagaggataaatataaaattaagcagatcatgcaccacttcattccagatttgctctttgctcagcgcggtgacctctcggatgtggaggaagaagaggaagaagagatggacgtggatgaggcaaccggcgctgtgaaaaagcacaacggggtcgggggtagtcctcctaaatcaaagcttctctttagcaatactgccgcacagaaactccgaggaatggacgaggtgtataatctcttttacgtgaataacaattggtatattttcatgcgactacaccagatattatgcctcagactactcagaatctgctcccaggcagaaaggcagatcgaggaggaaaatagagagcgggagtgggaacgggaagtcctagggatcaagagagacaaatctgattctccagcaattcagttgagattgaaagagccgatggacgtggatgttgaagactactacccagccttcctggatatggtgcgctccctgctggacgggaatatagattcctctcagtatgaagacagcctgcgggaaatgtttactatccacgcttatatagccttcacaatggataaactgattcagtccattgtgaggcaactgcaacatattgttagcgatgagatttgcgttcaagtaacggacctttatcttgccgagaataacaacggagccacgggtgggcagcttaacactcagaattcccgcagcctcctggaatccacgtatcagagaaaagccgaacaactgatgtccgacgaaaattgcttcaagctaatgttcattcaatctcaaggccaggtgcagcttacaatcgaacttttggacactgaagaagagaactctgatgaccctgtggaggccgaaaggtggagtgattacgtggagcgctatatgaattctgacaccaccagcccagagctgagagaacatctcgcacagaagcctgtgttcctccccagaaacctgcgtcgtattcgaaagtgtcagcggggacgggaacagcaggagaaagaagggaaagagggcaactccaaaaaaacgatggagaacgtcgatagcctggataagctggagtgtagattcaagctgaattcatacaaaatggtgtatgtcatcaagtcagaggactatatgtatcgcagaacagcactcttgcgcgcacaccaaagccacgaaagagtatctaagaggctgcatcagagattccaggcatgggtcgataagtggaccaaagaacatgtccccagagagatggctgcagagacgtctaagtggttgatgggagagggactggaaggactcgtaccctgtaccacgacctgcgatacagagactctccatttcgtgtcgatcaacaaatatagggttaaatacggcacagtgttcaaggctccatag

SEQ ID NO: 293554 - DNA, 5050 bp, Artificial Sequence
  derived and/or modified sequence
gttaaacagctgcttttaatttggtccccccaatctcaggcgtttggggggctagtccgccggccgctcggtctggccggcccgacgtggtgtgggccctgcgggccctgggaccgagctgaggggaggctcggagttccgcggccgaggttttgtagtgcatccctgagcatgagcacagaatgaagcggcgtttggatgaccaggagtcaccggtgtatgcagcccagcagcgtcggatccctggcagcacagaggcttttcctcaccagcaccgggtgcttgcccctgcccctcctgtgtatgaagcagtgtctgagaccatgcagtcagctacgggaattcagtactctgtaacacccagctaccaggtttcagccatgccacagagctccggcagtcatgggcccgctatagcagcagttcatagcagccatcatcacccaacagcggtgcagccccacggaggccaggtggtccagagtcatgctcatccagccccaccagttgcaccagtgcagggacagcagcaatttcagaggctgaaggtggaggatgcgctatcttatcttgaccaggtgaagctgcagtttggtagtcagcctcaggtctacaatgatttccttgacatcatgaaggaatttaaatctcagagcatcgacaccccaggagtgattagtcgtgtgtcccagctattcaaaggccaccccgatctgataatgggattcaacaccttcttgccccctggctacaaaattgaggtgcaaaccaatgacatggtgaatgtgacaactcctggccaggttcatcagattcccacccatggcatccagccacagcctcaaccaccaccccaacatccttcccagccttcagcccagtcagccccagctcctgcccagccagctcctcagcccccacctgccaaagtcagcaagccctcccaactgcaagcacatactccggccagtcagcagactcccccacttccaccgtatgcatccccacgttctccgccggtccagcctcacacaccagtgacaatctcgttgggaacggccccatccttgcagaacaatcaacctgtggagtttaatcatgccatcaactatgttaataagatcaagaacagatttcagggccaaccagacatctacaaagcattcctggagattttgcacacatatcagaaagagcagagaaatgccaaggaagctggaggaaactacactccagcattgacagagcaggaggtgtatgcccaggttgctcgtctctttaaaaaccaggaagatttgttgtcagagtttggacaattcctaccagatgccaacagctccgtgcttttaagcaaaacaactgctgagaaggttgattctgtgagaaatgatcatggaggcactgtcaagaagccccaactgaacaacaagccgcagaggcccagccagaatggctgccagatccgcagacatcctacaggaaccacccctccagttaagaagaaacccaaactgctcaatctgaaggattcttctatggcagatgccagcaaacatggtggtggaacagaatcgttattttttgataaggtccgaaaggctcttcggagtgcagaagcctacgaaaatttcctacgctgtcttgttatttttaaccaggaggtgatctctcgtgctgagcttgtgcaactagtctctcctttcctggggaaattccctgagttgtttaattggtttaaaaactttctgggctataaggagtctgtacatctggaaacttatccaaaggagcgagccacagagggcattgctatggagatagattatgcttcttgtaaacgattgggctccagctatcgagccttaccaaagagttaccagcagcccaagtgtacaggacggactcctctctgtaaagaggttttaaatgatacctgggtttccttcccttcgtggtctgaggactctacctttgtgagttccaagaagactcaatatgaagaacatatttatcgttgtgaagatgaacgctttgagcttgatgtagttttagagaccaatctggcaacaatccgggttctggaagcaatacagaagaagctttcccgcttgtctgctgaagaacaagccaaatttcgcttggacaacacccttgggggcacatcagaagtcatccatagaaaagcactccagaggatatatgctgataaagcagctgacatcattgatggtctgagaaagaatccctccattgctgttccaattgtccttaaaaggttgaagatgaaagaggaagaatggcgagaagctcagagaggctttaacaaagtatggcgagaacaaaatgagaaatactacttgaagtctctggaccaccaggggatcaactttaaacagaatgacaccaaggtcctgaggtctaagagcttactcaatgagattgagagtatctatgatgagaggcaagagcaggctacggaggagaatgctggtgtacctgttggcccacacctctcacttgcgtatgaagacaaacaaatactggaagatgctgctgctctgattatccaccatgtgaagaggcagacaggcattcagaaggaggacaaatataagataaaacaaatcatgcatcattttattccagatttgctctttgcccaaagaggtgatctctcagatgtggaggaagaggaagaagaagagatggatgtagatgaagccacaggggcagttaagaagcacaatggtgttgggggcagtccccctaagtccaagttactgtttagtaacacagcagctcaaaaattaagaggaatggatgaagtatacaacctcttctatgtcaacaacaactggtatatttttatgcgactgcaccagattctctgcctgaggctgctacggatttgttcccaagccgaacggcaaattgaagaagaaaaccgagagagagaatgggaacgggaagtgctgggcataaagcgagacaagagtgacagccctgccattcagctacgtctcaaagaacctatggatgttgatgtagaagattattacccagctttcctggacatggtgcggagcctgctggatggcaacatagactcatcacagtatgaagattcactgagagagatgttcaccattcatgcctacattgcctttaccatggacaaactgatccagagcattgtcagacagctgcagcatatcgtgagtgatgagatctgtgtgcaggtgactgacctttacctggcagaaaataataatggggccaccggaggccagctgaacacacagaactcaaggagcctcctggagtcaacgtatcagcggaaagctgagcagctaatgtcagatgagaattgctttaagcttatgtttattcagagccaaggccaggtccagctgactattgagcttctggacacagaagaggagaattcggatgaccctgtggaagcagagcgctggtcagactacgtggagcgatacatgaattcagatactacctcgcctgagcttcgtgaacatctagcacagaaaccagtatttctccccaggaatctacggcggatccggaagtgtcaacgtggtcgagagcagcaggaaaaggaagggaaggaaggaaacagcaagaagaccatggagaatgtggatagtctggataagctggagtgtagattcaagctgaattcctacaagatggtgtatgtgatcaaatcagaggactatatgtatcggaggaccgccctgctccgggctcatcagtcccatgagcgtgtaagcaagcgtctacatcagagattccaggcctgggtagataaatggaccaaggagcatgtgccccgtgaaatggcagcagagaccagcaagtggctcatgggtgaggggctggagggcctggtgccctgtaccaccacctgtgatacagagaccctgcattttgtgagcattaacaagtatcgtgtcaaatacggcacagtattcaaagccccttaactgcaaagccagagcagataacttggggtgtgtgtggggatgtgtgtgtgggcctatgcactcacacactgaagaaacaaggaagatgcctttcaagcctcactgggcctctctgggacatggccacctgacctgtgtgtggctggtgcagcctggcaccaagtgggctacctgttaggaacatgaataccttacaaagctgaagctggaacttttcccaaagggttttgggtatagcctgccctggaggggaaggaagtccatgcaagcaaagacatgcagtttgcttgcacacaccagcagagctaagactggagtctcctgtggcctaactttcaatgagggaaccggatgctgttcacactttgactggatggagatgcatttacaaaacagactggagaaggacttaatactcagatggattggaactatcatggtcactgctcctctcccctccccacaaaaggaaaaaaaagctggatttgattttttttttctggtcactcgagcacatctaagatcacccattaggttttatctgggacctgcagtttggctttgggattgatcatcttgtggattttattcctgacgattcccttgctgcctacccttttctctcctctggttctcaacctcaacgagttcaaatcagttgtcctttttagctcccgtggaactgttttgtatctgcctctttactagtctaccttagtgccatccaccagctttactctctgacacacacacgcacacacacacacaattttaacttgtttttttgtacataatgtacatactgtcaattttttattaaaagaaatatgctttgatgtgctagcataactgctctagcttcttgtgtaccatagtactgtggcttcagatttagtacctatgaacagatgtacaagacatttattacactttttaccaaagggagttaccattgtagtacttttgtgtaaaacttgtcttcccctttgcccccaacttttttttttttttttttgtaaataaataaagcttggttcttacttaag
